United States Patent Application Publication US 2014/0057251 A1 - sequence listing, part 76

SEQ ID NO: 118205 - DNA, 1338 bp, Cannabis sativa
agttaagaaaatagtatatggggtaatttccctattatttatcggttcagattttattcattaaaaattgttttgaatttttccagctacaaaaatgaaatactttttttttgcgaaaaataagaattgtgtttaattttttttttttaatttaaaaatgaaaaacaaaaaacgttagataaattttttattattatttaagtaaggagagagaaagtaaaatgaaaagaaaaaaaaggtgagtgaaagaaaataacaaaacataaataaaatgtaccaaaaattctatgactaaaaatatttaataaattttgaactaacttatattttattttaaaacataaaacatattttttacaaaatatatttcttaaaatatttttacttttttaattaaaataacaaaaaaaaatgatttatgtaattgttaaatacacacttaatattatattttgtagagaatttaaaataagtctttgaccttgttatctcaatttttgtctacttgtagtagcacctccacatggccaaaactaatagacacgtgatagaaactattacaaccgagcaggtacatttcgtacagcttccaagtcaagagcaaagatatagatacacaagtattgacaagaccgtagcaagatgactagcaggccagacagcttacagcctgtagaaggccagacagcgtacaacttacaggctacagaaggccgaacaacttatagcctgtaaaagtcggctagcttacagcctacagaaggtcaggcagcttacagcctgtaaaaagttgggcaacttagcatgcaaaagactggatagcttacaacctgcagaatgccggacagtttatggaggaaattacattatatacccactttactttacttgtattaatttttaccttcattttcatattctttaaaatataccagcttttatagatgatgtttctattaaaaaccccttaggttaatgtaaattatatgttagacttaagtagagagtgggttatattgggcaacccacttataaaagttggtatattttaataaaatataatataaaattatttttttgattaatatatatacaaaaaaaaatatttctcaacttatatcctgcacttcgacaacttaaatgggttgtagttttttgcatgggccttctaaaagatctccaacaattcctataaacttggaacaacttaactgctcacaaaaataaaaagggctattttcaaaaatatgggaaaaattattaaggttatgataaatatggcataaaaagtaaatgccactaaatatggcattgtctaaccaatcaaactaaaaatat

SEQ ID NO: 118206 - DNA, 1086 bp, Cannabis sativa
ttttcatagatttgctctacacttttttctttttaacaatttactggtataatacaatggggctaacataaatgtagttcatgagttataacgaaaaatatatgattatggttaataattatgacaaataattccggtaccatacatgagtttagttagctcagttaatcaatcacattaattcttgtactgtaattaactatatataattatcattaactaattattattttaaatataaatgaaatacaatcgaaagagctcatttgcaatagttaccatataatttgaggatttgtttcactaataaaaaaatagacacaagcactaaagggttataatttagaggtaaaaatcctatttttcaaatagaattgttgatcgagttgcctataaatataaatatgttagcaactcttatttacggtacagaaaacattattcatcaatttttcaaaattaaagtcgtggccatgggcaaccctaataataataatgatgataaatttcccatttttccctcatcgaatataaacagattaatatgaaatatcacataatttatttggcgagaaaaggtattcattaattaaactttaaataataaatctcatcatcatttcagattagttttaatagatatacatatcggtggtatataatatatgaatgcatgaatataaataataattaacccgatcattttcagaaataatggagcaatttaatgattattccaactaatcctcggagtatttgtttccatattagaaacaaattttattagttacgtactacaaaatatatattgagtcattgatatatcttaaaatagggcagatgttcataattattgtgtattaataaaataaaattattgatatgatatcaataatgatctacttttaggattagaagcatgatatccctgtcagaacacactcgattattttaatacaaagatgtaagagtatttattggaatctaattttttcccctcaaaagcaggaagagagctaccagagaagataaagcaatttctttttttatttatttatttttgtaaatgcaaaaaaaaaaaaaaaa

SEQ ID NO: 118207 - DNA, 1911 bp, Cannabis sativa
tgtaaagtttgccgtgtcacagtagttttgaaaacatttggtaaaaaaaaatatttttgtaagtttccctaaatatatgttctactctaagaagtagaattggctattgggcctctatctttaatgatagtggactattgttaatgggccaacctataatcattagagtgctgccatgtgcctcaaatacacttaataaaaccgatcattctattatagtcctaattacataatcgatattataccatgcatctagttatccacatgtgctacaatcgactaggggtgttcgcggtgcgggtagtgcggtttttgaccatttttttaaaccaaacctcacatgcgggtttttttttaatttttcaaattgcacccacatcgcgaaagtaaaaaactgcagaaaccgcactgtaaaaaatggtgcggtgcagtgcggtttttgcagtttctgcagtttggactatcaccgataattaaactatcacaaatacaacaaaattcaacacttgtcaaaaataccataaagcttaaaaataaatatgaaaaaaagattaagtttcaataattcaataattagtaggttttgggttggacattcacatattgaacctaaataaatataaaaaatggtatttttataatatgcagtgcggtgcagtgagaatatacatgtattcaacaaccaatggcaatcttttacatgtctatcatacatgaaaataatgaattccactcattaaatacatctttggcttctaacaatccaaacaagaaatgacttcttagtacatacgttcaggtaagccgtgtcattgtagtcattaacatgttatctgtaagtgcgtgttatgatactaatagaggatcacacaattttctcactatatatagaacgttatcaccattaatggagcaataatactcttcaagttctaagagaaagatatgaccgtgatatttgtgacataagtttagtaaattcacaagagagtcaactactcttaacattgaaataaaatattgcagttgtaatatacagtcaatgtcctcgtaacacgccacacactctacctttacaaacgaggaagctctaagtgtccacacaacacctaatcacaaaataactcctcttaccattataccacatgtgtgacagagaaagttgtaggtgttcatgaatacttataaatagattttatcatccatatatctttccaatcgatatcactaaaatcaactactatatgtcacgatattggtttgtcgattgctaacacaaccttggtaccataaagatgacactcatcaagtactcggcatgcttgtaacagatatcacgataagaatgcgtatacttgagtaagttctaggttgccttcaataagcttatatgtgggataatctcaaacttgatcttcgtcattactaatatatatggactttatcacacttttaaactatttaaagattcttaattaaatcaaaacattaatcacaataataattagttaatgtaaattatgagacaatttagtctaccattgatctcatcacaaagaatctaaatatttagaccatttaaggtttatcaatgattcttcatctgacaggtattatcaaataacgacttaatttgtcaccaaaatagattagaatcataatgaccaatgtattatatcattataaatatagcattgctctcactgatctctcatatagtgttgactaacagtaatatttcgaattgaccattttcaaaatattacaataatcactatcttgatgtcctgccttagaattgatttaatccattgaactcgggtgtccatgtctagaggtgttcattggatcacatccaatgtttttaggcctatccagatccgatccaatcatatattggatgttagattt

SEQ ID NO: 118208 - DNA, 1485 bp, Cannabis sativa
ctcacaaattgttttgataaatgatttaaaaaattatatcagtgtggtgttgacaaaacatatatcttctattttcagatttaacaaattattttaataaatagtatagaaaatcgttttttttaacgtcccatatcggtggtgttgagcagtatgccaaagagcaatgggagagcatatgggagtgacaattatcttttttcattgattaatcatattttttcagagtttgagtaaattaattttcaactaacttctggtggcaggtcgatgtatattcgtcccctaaaattgtcttttaatgtgaaaaatatatgcttaattaggcttaaagattatttttgagattctacttagctatattttgagaaacaaaaacaaaatgcgcaaattaattagctgtttggcacctttcaaaaaaaccataattatgttttcttagttacatttatcaaacagtcttataatttactatacatatattgtgtttaatctttacttctttttatatatatgtatatccacttagggctaattggaatcatcaacatatctactcaatcgatcgctagtacatttttttgcattccaacaattaatatatgtcacagaacgtacgtcatcacattttagtatgttgtgtattgctgtatacattgaaattcgtttgctcatttttattttattatctaatcgagatgagtatcttcaccaacccaaacccttcaaatttaactattaattaaaatagagagagagaggagatcagcaatatcttttacaaaatatatacggatcgaattacaaaaatgatggccattatggtaactacaataaccattagaggctagtgtatgtggccataagaaggtgcgtgtgtgttagaggtcctgattcgagttcaaaattatacatagttgtaatatgtagacccttaaataaaaaaaaatggtaactaagtgacagaaataggaacatcaataaaataatgttgagaaaataaacacaataatattgcatatttaattgtgtaaaaatataaagttaattaaattttaaatattttttctatgaaattaatgttatacatttttatgttgaaaatattttgtttagattttattttatttttgtttatagataaaaattgatatttatgtcacaattgaaaaaaaaaaatataagaaaagcattgtttttattaaaagataattatattttgaaaggaatatttttattaaattaatgtgatatatttttgtgttgaaaatattttatttagatttattttgttgttgtttgagaaaaaaaacatatagcatctataaaataaaaggaaaagaaagaaagaaagacaatgtcaaagttgtgatccaaagcattgaagaagtgtcatttttgaagaccattgctgagccaaaattagtgttttgatgtgtatcacaactacaaaaattccctttagaggcagtttttaagcctttt

SEQ ID NO: 118209 - DNA, 1602 bp, Cannabis sativa
agagagagagagagtttcgtgagtgggagtaggcgtgccaaatgggttagagagagagagagagaagagagtaaagctgccggcgtgcatcatcatcatcatcaaagccaccatcacacacacacacacacaccctgcacctgcacatcccactaacattccttgccccctaatcccactccaaaccctgccaaaattcccatccccccaccttttttttcacaattatatactctatattatactcctatattatatctatatcccccataaaccccatataacattatgtataatatcaatatttatatgtatccttcatcaaaatctagggcatgctctctttcacttttgatagtttatatatataaacacatcacacatgcaccattaattagagtacaaattagctgtgtctatagagatatagaccaccaacgtcgaccatatagatcattagatctcctcttcattgccattctctctcttttttttttttttttggttgtgtggtcacctacattgagttcctaaaatctgtataagaaaccacttgagtaaatttctcttctttctttctttctttttctcaattcctatatggtcaagtctactgatctttatgatgattgcaaccccccaaaaaaaatacaatacttgatttccccttgtcttaacattgttgtcctcaacctatgttttaattctctccaaatagaaaattctttgtctcctttggcccaggatatataacacccagaattatatatgtatgtctctgattcaaaattttgtactgtacaactaattttattttttgtccacatctttgattgtttttcttataaggaaaaactttctcctataatatattatttttgtaactacgttgtttgtttttcttctcaactactaggaaaatctaattgatttggattctttcagctaaaaggaaacttttggggtagattaattcctcatatattaatttggaatcttaggggtcatttaaatttccataaaattaagtaattatttgaagagaaagttatagctgtaatccttgctttataattaacttctcatatatattttacaatgtttaacagaacaaaatataataacacaaaacgacaatgaccttttaaagtttcttttagggaaagactttcaaagcttactaattggtgggtgttttatgaattttatgagatcttatataaatatataaaaatatattatatattcttactttaatccgggttttatatatgaggaatatattataattgcgaaatggttggttgataaaatgtcactaccttaaccataattcgaaatttttgtttaaatataagatggtatgtgtttagtgttgtgctagtctggtttgtattttgaaaatttcatggaattaagggttgtgctgtgtgaggtcatggaaatatataagctgtgttgtgtggtgctaataaaaattttattttaagaataattacataaggcaaaaattatatttttacgtttaaagaattttttttttttgatatttttacgatttttcataaaaacaacaaaaaaattacataaagtataacatga

SEQ ID NO: 118210 - DNA, 1738 bp, Cannabis sativa
ataatccaactaatgactctaaatttagtttacatcttgtcagacaactagagagttttaagacttcttctttcttcttcttcaatttcaaatcctttgagtgttcttcacataatgattttaagccttaatgattgagtgcatgcctacccatagcaagttagtcctcaatcatgatgtgtaagactgtgaagaatccaaacaattgaaggagaatcaggcccagatcttgataatactcagtgacaaaaaggagtcaagagttagagagaatggctagcacactagagaagataagaaaaagtttagcttaagtgtgtgtagttggtgtgtttatgaaaaaacgatgcaaagtaagcttagaacacttttagaaatgtaatatgatcaatactaactcaaccaaccttagtttttgagagaaaattgagtttaggtagagaataagataaaactaaccattcttagttgttgttaaaaaaacctaggcatttttgcacccatccaaataaggagcatagagcttttggctatttttcccacttaaaacgtacataattccttgctcattcatccaatttcaaaaattacagttgcgttctcttagttaaatgatgaacaatcttaaaatccaatttaaaaaaattataagtcattttcgaaaaactactttttgcacaagttaaggagctaaactttaaacttataaactctaatgtactatgcaaatcactttaacaagactaaagtaaacttatatcatttgattgtgtttagtcttgatgtagatgagcttcctacctctatttagcatgttttgatccaaagttgatttttttttagagttgacttttgactttgatctttcgaagttctctttttaatagggtcttgaattcttgatttcttgatgaaagttttgctcttatgaattatgaagtagttgatatacttgttgaatctatttttttgattatgtgactttacttaatattaatactttgtgaattgtctggtcaacaaataattagtagcacataataatcaaatatttatttatcattaaaatgagtgattgagttttggtgcaacacataaaaaatcatatacataactattacaaatttttaataaaatataaatttctaaaatcaatacaaaacaactaatttacatataataatcattacacccaaaaaaatgaacattaagaaagtcaaaaactcgcccaaatgaacatcaaagcaatcttaaagttattataatattgtttgaagagtgctcaatattaaatattaaaaattaaaaatatacaaaacaaaacacacattacggaaaaaacatagctcatttttttaaaagaaaaacagccattttcgaacataaaaagagttcaaaactcatccaaataaaataatccaaacaattcacaaacttcttttgtgttgtattgaggttacctaaataaatttaagcctaaaacatccaaatacaacctaatattttattattttactaactatttgtttaaaaaaatgtaaagccattttcggaaaaaaaaaataaaagaaagaaaaaaaaaatcaaaactcatcctaatgaagctccaagtaatcctcaaacttcatttatgtttctcactacaaaaaatcctacttttagtcacaacaaaacttgtgactaaaagtgaaaaaaattgtaactaattataaatcatgattcttatgttgtgactaaa

SEQ ID NO: 118211 - DNA, 891 bp, Cannabis sativa
  modified_base (502)..(508): a, c, t, g, unknown or other
attttgggttcctttaattgagattgttgtttttggtctacactcaactcaataccaaaaagtgttggttcctttaatgaaaaatgatttcattcataaaatagggtgaaaaacaaggcagtaaattgataatatctctatttctatctaataagccgcataagatgttgacccaaatcccaaaatatagtgagctcagtagtgacacaactgtaattgtcaactatacaaacaagtgttaaaacagacaaagaatccagagagagagaaagagaacctaattcagtctgaggttgtcataacagtcagtgagtgttctgatacgccattactcaaccgtttatggctgacttgaagtggtcgtcatcaactgttgaatatatgtttccctccctcacaaggttttcaatggctaacctgttgtccatatcatatcagattgtcagattgagataatgatgttattttaaccaaccaagatgtatagagagagagagagagnnnnnnngagagagagagagagagacttgagcttaatctctggaattttcagttgctgaagcatctgcttcacactagctccctcttcccttgcactacatcgtaattcaatgtaaacagttaagaatacaacacaattgtgatttagcaagaaaagaaagaaaaataccccaaacaaaagtattgatgcaattttaaggtttcagctttaaagcctgacatatagggggttgggagatagaatacaagaaaggcctggaaaaggagcactaatttgagtaattgctcatcaccttccctgacttgtacatctctatgtccaaggacacttgaatatactacccaagtggttatatagcacaaattatctctttgcagagaataatcttg

SEQ ID NO: 118212 - DNA, 1210 bp, Cannabis sativa
aaaaaaaaaaaaaaagtagggtgtaacatatataaaattatgcaaataagtgaggtggaccaaccgtagatttgatctatcagcccatcatagttgactgatgaagcaagtagagcaaatttgataaccgcttttcgacaaatcaaggaaagcttttcaataaacctctcaatcaccttttctttcttttgtttttatttcattgaatcacacaaaatagagtacttacgagagcaaacaaaactacatataaaattattgggtaggactatagtggggatggccaatctttaggtaccagtgactagtgagcatgttttgtggcctttcatttaacattgatggttgagaatggttagtgtgtaggatattactaatttataattttttaaatagttaattttaactttgaaaaatctgacaattaaccaattatagtatattgtaataatattttcacttttatgttaaatattttataaagaatatataacaatacattttaatattacgattgttatttcgatttttgctcatttaaggtggcatgtctacgtggtcaatataagtgtcacgtggtcatacatcttgtcaacaagaaggtcaagtcatctactcaagacttcaaccaatggggagtccaaataatcaaacgggatgatgaatgacgaatcaatcaccttaaggagactggccagccacacctggttggtcctatggccagcatagggcggctagcttctagacaacatagggccagccaacatgcatcctgcaggtgaatgggcgaccaaatattggcctgacaggattttggtgcacaactttacacgtggacagcaagccagactgtgaattgggccttaatagcccacaaaaatataggaaatatctattttaaaggggcattttagtcatttgcattttactaatttaatatgtaaatatcagcttattttacatatttgaagggtttaaattctcctatataaagagccttaaccaaacgctaaaaccctaagtctgaagctaagtgagaagttcaaaacccaaagctctaaatctaatatctcatctcatctctctctctctcacacacacacacccactactcctcttctcatacttgagatttgtcaactctgattcctatattgtaacctttagagagctacttcagatcccttctatagtgatctgagtagtatta

SEQ ID NO: 118213 - DNA, 992 bp, Cannabis sativa
taaaatagtacaaataagaccctgaattgattttttatcaaaataaaatttaattataatctgatctaaaagtgttataacaaaattgttttacattttctgtatttgttcctattagaaattgttttcaagttgattatactaaaaaaaaaagttgtcaaaaattaagctcagggtactatttttattattttagaaaatgcattgtatttttgtcatttaacaaaacacatatgacttttgcaaaacacatataacttttgcaaaacacaagatctaaaatagtatttactcttatttatatgtcattttttttataagtaatttatatgtcatttgaaaaggaaaaaatagcatttatttggaattttatatgataatcttttagtgtattttaggttgcttcaatcaatgagtctttcttcttctctcaaagaaaaaatgacacttcttccacaagggggacccaatcggcgtcatatctaataataaaacaaatattttaaaagaaaatgcgcatccagggaatcgaaccctggtcagtaccgtgggagggtactatgataccactacaccagatgcgcttccctgttacgaagcattttcatattattcatatataaaaataaattaataccttggaaagtatacaacaaattatttttcttcccaatccaatgaaacacaaagataaagtttattttagtgttattcatacaatttgtaatatatgattccaaactttaatcaatttacatcaaataaatttgatgtcaatgacttgattaattccaactgttaataattttttggtgtgatcacaattaggggtattcatccaattcaatctaatccctactatttttcttatagttcattcgatccgcactaagtgcggattttattttttggatccaattcaatccacacaatagctcaaatctaatccaatccaatctacaaaagtgcgtgttagaatttgaggataagat

SEQ ID NO: 118214 - DNA, 1631 bp, Cannabis sativa
  modified_base (1429)..(1433): a, c, t, g, unknown or other
ataaactttttacgtttattttttgttggtttatatattaaaatcaataataaagctattattattttatatatattaataaaaatattaaattttgcatcaaattttgtaattttaaattaaaatacaatactaaaaattggtacaaatatatcacaaaattattactaatgttaaatataacataatttttacatattctatgggtgagttgaaggttaattgtgatgctgctcttttttcaagggagaagagtcatggcttggagtggattgctagaaatcatgctggtttgtgctttgctgctgttgccatcgaccccattgttgctgaagcaatgtcgatgaaggaggcgctgagctgggttaaatctaactgggaagaaggaggcgtcgttgaagagttttgtcctacagcggtggttatggagtcaaactgtcttttattggttaatactatcaatagtaaaagccaagttctttctcctcctagtcttattatttcgggttgtattaatcttatacggtccatttctatttttcatgtttcagttcagtttgttaagcgatctggatcaaaccagcgactaattggttagctcgttctcctggttcatgtcttgatcgtatttccagtagggggtctatcccttctggtttgaaagctattttgttagctgatttactttaatgaaagttacaatctttgtttcaaaaaaaaaaagatgcaaattgacacaacaaataattattactaatgataatttaaaaattgtattaaagtaagtcattaatattaaatgacaataatgtaaataaaatatatgtattaattgtatgctaaatttggagcaatactatattttgtgtcaaatttaatctaacttttagtactcgttaaattttacacaagttttagcacaccataaaaaaaaaagttgcaccacttatttcgtatccattgaatatgctcttacgatgaaacctgaactattagtattatcaaatcatactttcttaattttgtgtccctataattatctatctaatgatattttgaatagataatagaacttagtatagcttatatgcatgtaaaaaaaaatgaaaatgcatagaaattaggattgtgacaagtgattggcttataataataataatagtaccataccatatctcaacatgggctccatttccatggtgaccctttaataaagatcattctgcatgacaaacaagaccatttcatatagagagttgtcacaatttagaagtaaagtaactaaaagaattatggactcttccattttctaattaagccatggaattaaaatgataaacacataaacacgtttagtacgtcgtattgtattgtattatattgtattgttagattgtattgtattctattatattgtattagtattatnnnnnacaatactatatttggtattgacttgtattaatagattatgtaaagttataatatatttcaatacacttgaccccaatacaaactacgggtcaaatctgggtccaagtccgggtccgagtccggggtctaggtttggggttcaggtccgggtttaggttccagtccaagtatgggtcccaggtctgagtttgggtccg

SEQ ID NO: 118215 - DNA, 3280 bp, Cannabis sativa
tttattttctgttaattttaacggaagcgctaacccttccgttaactattgccatcttcaatttaaaacgcataatggattcctcttttctctccctcaaattctaaatcaaaaccattttttgcgatattcttgagatattcttgatcctcatttattgggattaagaacgaagatggatacgatttgaaatcttctaatgtatacgattgagtttagagggaataggccaagagattcagtatataatttatctttctcttttgattaattaatataagattcagtttatgattgtgtatatccatatgtattttgaattgatttgtttgggtgaatataaatgttgatttggagtttcatcatcgactcaatcaaaatgtcgctcgagttcaagactttcagatctggatacttgccgctgaacgacccttctccaaactaaagcaatcgcccgcctaaagaaaccattcttcccgatggctgtgactatgagcactagcttgttgtaatggagttcgccaacgaccccaaaaccactgaagatgaaatggtcaattcttttgtcaaaacccttgctatggttctgggaaggtactacgctaactcttttgttatcattgaatttcgaggacaaataagagagtatttaaatggatttatttttttatgatttttgtgtttcagtgaggaggaggcaatgaaaaagatttactctgtttccacttgtacatatactggttttggtgctttgattttagaggagttttacatcaagcttaaaagtacattgatatttctacattgcgatttattttttttgttattaataacctcattcaaccatttattttttaagagatgttattctggtgataagattttgagttgtgttttgatcttatttttgttgttttcattgactctattggttatcttggtctttcattttatatgatgatttaaagctttgcaatatagactcttttctagaatttatctgatctgttattttggttggatagcacaacctgatgttctttgggttttaccggattcatatcttgacatgtccaacacagattatggaggtgagtttgtcaatgaatttaattttttagagtttattactagcaaccaattatattctgtccatattgacaataaatatttgtgaagatgctctatactaaatttttgaaagcagaagttgataggtaatcaacagatattcattataatatcttaaaccaatatttctttgttataaaagtaattactaatatagtctataatagtatgcataagtgaagtcatcaggaaaatcactatataatgattggtttgcactattacaatatgcaaagtatgtcatgtttgctggacatcattattggtcaattgtttggcaagttaagttttacgtgctatgtcttaatacagagtatttttatcctcttaattggtgattatttagacacgtctctcttaaaatgtgatacagatagcagaagattattctctaaaatgggattgaggaagatgtgaagctagctattttaaacttcagtgggaaaattagcttaattttcttatataccatgttacttcagtttgcagtgtcatcgggtgtctgacctttattaggagttcctcattaacactgggatcaaattaggtacaaatagtaagttgcatttattataatgaatcattagtttttttttacatttattataatgaatcattaggttttttttacaacatttgttttatatcacatatgtatttttttaagattgcatgtcaaaattataccttgtttctttttctattttgcagccagcatgctcaaagttgaaagatgaatttttatcttttggctggttgtgtctggtaatgcatctgatactaaagagctttcttcaaattttaaaaagctatacatatacacctgatattatagtagcatttgactgtatgattggtatgtatgaaacatgatgtattttgttgaatggtctttcttaagaattgtgcttgaggtataattggtttataaactattttttttccctatcattctaaacatgtaattaagagaacctaatgttcactgtttcttctggtttactcttctctttttccataaaaattcttgccatgaatttgatgagtttgggtgcaataattatttaaacaatactattatcaagtaggtgttgagatgattagaagtgatttacttaccgaccgttggacaccttatcttgagcatgaaattactttaagaccatgttctgaagcaggcatcaatggtggtgaggtatcctctttacttttagagttctctgatttttttttttatgaatattctctgatttcataaatgtttcaattatgtgtcatcatagtaacatatatactttatatactttagggaaactacagtagttctagctattttaatttagtatttgatcacttagtaatcagtggcatccatatggtggttctagctacactaggtctagctatatgacatccatatggtggttctaaacatgtattttaaaacaatgaaatatgtgttgatttgaatattagtctatgatagtattcatcaaaattaatttgcctgttagaacaaattttgtgctatggcctcacaaatattgataggggaaatctaaccattttttaatattttattgttggtgccttatgatgtgtgatgtgtgattttaaatgtattgttgtttatttatttatttatcatattagatgtaacacgagagtccaatacatgccatttatttagcacaattattgtggtgcctgttgtacccctttttaatcaacttggttaatggatattgttttataatcttcattatgcaagcaactatctatttccaaaggtgaagattcagatgtagagatttcagtttttgatgtcaattgaataattaactacaagtcttgatttatctataatttcacccttcaaagatttttattctccatgtactacaagagattgcaaaatttgtaaatttggcatgggccaccttcccttagcttgcaaagtattcaagtttagcatgatttccttaattaacaaaaattattttcttgttcaggatgcagtctctcaccaaaattgattgaaggattccaaataaatatatatatatatctataacctatataaaagtgagaatagctttttgggctttcactaattgaattacaaaattagcctttactatatattcaa

SEQ ID NO: 118216 - DNA, 3172 bp, Cannabis sativa
ctctctctctctcttatacacgcccaaagggctctctgcccccctctctctctcacacgcctccaaggcttcatctcactctcattagagatctacctattgactcatactttgtaaacttaacgagagttatatcaaatcccacctatagtgatttaaatagtattatctctaggtatcaatacaactaaaaggggagtaggtcattatctgctatctaagggggtcgaacctctataaaaatccttgtcttatttacttcattgttcttattgtgtaacatgtggcaaacatcagattaatacgaccctgctgtcgattggccactttttgaggtcaacaataccaatatgagtatattgtctataaatactcacattggcaactaggtttcctatctctttcattcatttgtacttaactcttattttgtaaaaaaaaaaaagtgtctttgttttgtagaggagagtgtgttagactctaccacagtttatatatctttgtaatttttttgagtctataaataagtcaacaaagaataagaacaaaagtgcaaactttcaggagaaagtgtttcaagtgttgcctcaggaagaagcatgcactcttcaagcaaatcaaggggagttcgaacacttgaagtttcagtagggttcatttgttaaggtggactagatcaagcttccggcatatactaagagaaagtttatttacgcataagtcaaatactttgtattttttagatcttactaatgaatcttatccctaggtgtggtctcgtagactagtaacaatcagcaagaattattgataccacatataaaaagtttgtgtgtttttatttttctacacttttattctttgtaggttttctggtctgttgttgcaagatcgtggtctatagctacaaaatatatgtttcagtatcaactttattatgctgcatttgattaattgattaattaaataataagttggcaattacaaaatacaaaaaatttaaatttgaaaaagtagaagagagtagatcaaggaattaggaggaaattatcaaagaattccgactaactaaatagaaaaatgtgagagagatgaagctttggtcgttatttgggagcaatcgttgtaatttagagccatgaggaaattcgatgaaaaaaaatgagaagaacttcgtcgccttcaatcaagaagaattataagaaaacagttgaaaaatccaaacgaatcgaaaaaaatggaggagagggttcgccgtttggagcagagtctttggtttcgtttgtcacatattgtttagaatgaatataacatgaataatacacttgtataatgaaggatattttaggtactaaaaaatataaaagaccatttgcttatttatttttaataaatggatattaaccttctttagtatgagatgtagggtcatttgttgtaatttttctaaataaataaaatgatatattgactcaaatcgagtgttaaattgagttaacacttgaagttagctcaagtggttatataaggttatccagtaatgcgtgtgtggggtcatttatgtgtgtaactaaaaaataagagaaatattaaagtgcacctacagtgcctagtacttttgtgaggtgtaatattattattagtgcaactcaatatcaggttttgcttatttactttaataaatactataagaaatcactaactaattataaaacgatacttcaacatggtgataggcactatgagtgctcgtagcaatgctcaaaatataatgtatctttatatattaaaaatgactatctaatagattttgttggtttaatagtatttttaattttttccgttaactttaacaaaagttaagagagttaacaaaggttgttagtttaattagttaaaattattttattcttttcaaataaataagattaatcatatcaggtatttttttttttaacgattttatcgaaagtcaaatagagaggtacaagtttattgctaggctcaacgattggtatttggtgattttgtgatgaagcgattcttcaaagaaattcttggtgactatatatgatcaaataaaccctacaactttctcaaagcatttctttaaagtttccctcttttaggacatggaagcaaccactagcacattcgaaagatgaattaatttttgattgggttctggaatagagaggaaataaagtcatggctatgtccattgctcccagttacgcgccatcaaatacttctgaatttttcaatttgaatgattttcgatatcgatacaccaatttacttcccctatttttatttgttttggatacatgtatgattgaggaggagaatccaaagtagcagggcttagagcaatcgacttttgcaatttccagtaggagattcttcagtgctgcctcccatgttcaaatatttgtttcaaaccatgtaagtttattgttcattagtttttttgttgttcatacaattgatgtgctttttaatttgttatcatgtctacacccactaattttttgaccactcttgaagttacacacatatatgcatgttacatatctcctaaataatatatttatctatattttaatgtgttatatctaaatataagtgtatctttttattttgattgtagcgatactaaataatatagaatttcattcatgagacatatatgtttaattacactacttctgatggatctatacgtatttatgttatcatagctattattaaacttatggattatataataggttaattgctcgcattctgttaacatttagctatttttattcattttatgcaattaactgctatgttggactgtccacgcgtacataggatttatccacgtggatacagttaacacatgacacaatttaatagcccacataattaattattaaaaaattaatttaattaaaaataaatcacaaatatgtaaaagtaaaataaattttacaataaaaaataacaaaaaaaaaacaaattgttttttctttcttttttttttcctcagatctcctctctctaatacctaatctctctctctctctctctaatatttttatctcaccaaacgccgtccactctctctctctctctctcttcttccttaagatttcgaaaaacttagtgattagagtagttccca

SEQ ID NO: 118217 - DNA, 1257 bp, Cannabis sativa
aggcggtgtgggattgcacagcttacccggtatttccccttacggatcacgggactacagactctcgcaataattgtaatctttgtaaatattcataaaacatggaaaattttcaagtttcatatttacaacacatggagaaaggaaacaactgctacaaattgcctttatctttatccaaaacggtcgtgctgactaagttttattgtgatgtgatattgcatcttgctctatgtctcacagtacacactggtaacaactttttgtacttatcttgaaggtagttattttgtaggcgtgttttgcatgcaagatgctaatcgaagtatcttccttgcttttgctatttgagagaggtctttagacagtacttaggattgaatcatttgtgctccttaaaggcaatcctctaacgttgttcatgaactttctgagatgaatcgccttttactcatattccttagtcttttaacatattcacgagtatgtgggttaatgagttacgaactcttaatgacctcgctatctaccctttccagcggcttatcccttcatattttatatttgtcttgtttattctttactttgtgcttcccgagatgaacatttttctgttagttgtttatcttgttggtcttacttaatagtagtggatatttatgactcatctttaattgattaaggagagacttaaatacgtctacaatctgtattttccgaggcaagattcaacatatttatttcttcaatattcaagttgatttgttttccagccttttttacacttgccgtggccatattgctactcgaaatatggggcataacactttgatataatgcttaaactattgagaaatgctaaaagacaccagtggtgcctagcaccctccttgatgtcatatagctattggtgcaattaagtatcgagttctatataacttaagataataatttttaaataataccgctaaccaattataagacgcaacctctattatttttaggtatcgttggagcccaataacaatactctaaagtctaaactattttatacatataatataagttaagggttaaaatctcaagagcatttttattttttaatttttaaagtttactttttgaacatctaccaataaaacttatatttagtacatacattaatacgttagccctgttggttggtcttaattgggctcatgtgtgtggtcttcaaattcatgcagtttattcagattcgttagctttggtgacgac

SEQ ID NO: 118218 - DNA, 1425 bp, Cannabis sativa
tccaattccctgtggttcgacatcacttgcgtgagatactacttgatacgttcacttgcgtaataaacagaaatttcgtaacacacactttagtgaattctgtcttaaatatgaggaatgattgaaatgagtatggtattattggtggccggtttttcttgttcaatttactctagttgatttattcttgtattgatctcttttctttagctttatgcctttttaatgaaattattctttttttccaatataaataaataaactaaccattccaaagataactagaaaaattgtctaattaaacaatcgttcatcaattcaatttgaagagcatgtacagctaattcatatataactatattggttgtccaataaacataaattaggaacactcttaaaatttggataaaaaatttgtcaaatcatctaacaataattcaagatcattgaaataaaattatcttcaagtatcacctaacaatactttttatggcttcattaatattatgtatcttttttcttctcttctctttacttatgttttgttatgggactcaattttgattacttttctattgtaagatgttcatgtcacgtgacaagtacaactttggtacttgtctaactctatctgtaccaaaaatagattcaaccttgtattaatttataatatgcaagaatttatctattcttctttctcttcccaaaataggcattttagatcatcttcaagggtgaactattctaccaaattagcaaattggtatagaatattcacattgttctactctagaaatacagtaaaaagtatttactaaattggtatgatgttagattttgaatctacactaaattgttgcatacaactttttcttcattctattttttttttaatttagtttaaaataacttatgcttatttgctgagaatatacatataaattagtcataattgcctttaaatagcataaaatgcgagattttttaagtaaaatattttttatttcaagttaaatttagtattctttcaaaaaaaaaatagttaaataaatcattaaaattattgcattaaaagtaataaatttacactaaattggtaaaaaaaaagtgtacaccataatagtgcaacctttggaaatggatcacctatttcttatttatgtatggagatcaactatcttggaatattgtgtaagtgattttgttggtccagatgtaatggattagtacaaattcataagtttcttccctttaattttttaacattttattttattgaggattttagtttttaaaagaacacaatcattaaagggtaatattataagggaattttacaaaaatactgcttttggaccaaaactttacatttatactgggacacggcaaaaacaacatttatactgccccagcccaatttcatta

SEQ ID NO: 118219 - DNA, 2429 bp, Cannabis sativa
taaaataaattccaacagttagtatggtaatagcctactcccctttgattgtattaactcgagaacaaagaatacgatattttctttgtcaaagctcttacaatgaaatctctgagtaattctcttagatctctcttagaagcaattctttcgatccctttcatagtgaaactagatcactatttatagggccttaatgcatgtgggaatgtttcccttttgattacaatgtataaactaagaaagaatttttattacataattacaatgcacaaaataggaaattggaataggttgccatactcctctgactcaatcccacaattataggtattgtcttcatgtttgaacttcacgaaatcattcttaagtagtcaagtcctgatgagtagttcaaaatgccaaacttaatcttgctcggataatctacctttcaccctgctcgggtaacaagcaaatgtataacatgaagtctattcgagatattcatctccgcccagatgcaaggagtgtaggacacgtgtcactcgtgtattttgccacatcatagtgcaaaaatgggataacatttgtccccaagtctgggcgagacctttgtggtcgcacgtggacctcactcgagttggatcactttctgaacaggtggcatgtgtttgaagtatctgttgatgatccgatgtgcctctgaccaaggtctcttcaattttcggcttattaatgctgactgacatgtacatcaaaccacgcctaaaattagcacatttcgacggttaccctttaggttattgagtgcacaacgtacactttttttgggggaaatcgaggtatttaaaatttgaaatgattactttgcctcactaatatgcttataaatagggctgaaatccttaattaaccacttttagccattttcatttttgaagaatcagagcacgaaaactttttcttttaaatcctttgaagaattcctaggaaacaccaatcagcgtcatccgagcaactctaaagctacgaacagtgagtaagttcttcatctctttcctcttttatgcttgaatacttgattttgtgggtttctgctgtaaaaaactcgatagtttttgaaattgttctaggaaaaccatagaaaacttaggtttaggaatgtaacatcttgagtatgcttaacaacattgcttgattataactgtgtcttgatttcgattccatgatattcactttcacttacccattcagggcttaggaaaaatcaacctttaattaaaaattttgaaattctggattggaaacctccatatcacgcagaatttttattttttgatcctttgatcggacctggttggtataaccaatctatttttgttcattatcccggccaaatgctcatcttgtgtcctacattttgtagatgaaccctagtgagttttagggaggcgaacatcatatcgatcaagatcttcttcaacttctgtacgagaatcatcctcatctccgtgctagtccatcttcatctagcaataatcttttcaattcaagctttgaagattgggagataagcatcgagcacacacctttcccagaacgtgacgttcagcaccatttttatctcgactagatcgaaggtcaaggctaaggatgtttcatctaggagcttataaaggggtggaggcgatatttaccgtccaactggacatatattgtccgacccaatacgattaatatatttcctgtgggccgtccaaatcctactgttgcaggtacacacgtttccacatttgccgtgatcatcgccagacataccaactaggctccgtccaggaataggatgatggggcaaactaagaaaactgtgcaaaagtcttctctagctgacccacacatagctcgacttgctacaatgtcgagtgcggagcaggcccagcctgctactgaagaagaaggcattgagggggacaccgaagtccaagagatggaggatcagggcaaggtccatcctaatactccttctgaagctgaggaggaaggtgcagctcagaggttgccctttggtggcttcaatgaaattggacagcctgtgtttgaggccggtgaaatcctagaggccagtgaagactatgttactaaggaatacaccaaggtcgttccttagagaagacaaggtgaagtaggagctcagtgagtttctcctctgtccatggtaaccagggaaaaaatgaataattttcagaagctcggttacttaggagatgtcaaatgcttccttccttctccaaaccatctggtggccagtctaagggaggggtaatgcgcttggtcgggcattggaaacaggagatccagtattggaagaaggggcgtgatgctatatccattcagaagttccgcgaggctgagctgaatcttagtgaagttatgaaccaacgagaagt

SEQ ID NO: 118220 - DNA, 2077 bp, Cannabis sativa
  modified_base (364)..(367): a, c, t, g, unknown or other
taatattgtataataagcaggaggtgaagaagcctcttattatatataagatactaaagatttttttttattattttttttttttgtaatttaaatatataacataattaattcgtgtattgtatagtccgcccatgctttagtctcaattgtattgttatttattacccatatttgtctccattattccacgtgtctctcatactcatcataattaatagtcgtaattaataacaagataagatgaatgatagccatgtaatatttaatagagaaatgctaaagggcattcgtggtgcctaacattctcctatgtgttaatattgttattgatccaactaagtatcgggtcctatataatttnnnntaataacttttagggagtattgctagccaatcacaacgagacatgtcgagggtactaagcaccactgatgccttataacaatactctatttaatagcattgttatcgttattatgtattagtatagtgtttaatatttttttataggtaacgtcttataattggttagcaatattttttaaaaattattttattaagttatataaaactcaatacttgggattgattcccattattaaattttggaataggaaaaactatgcgatccatacaaatggagaaaacaaagaaaaaagttctcctccatttttataaggaatatttttctctttccttaacttactctataatagttatatttatgctcttcaaaaatatataaataaaaataattatatgttctaacaatagcaattcagtcaaattaagtcagtccgattaccttttgtgattatgtaaataaaataaaatgattttgatttccatttcggtcaatttagtaaacaacaaaataaaatattgttttcgattattttatattttaacctaatttatttcttctattaattattcggattctaattatagtttagtaaacgtgtcataatagttgtatgatatcaagaagaatgttaaatactaataatattttttaataattctcaatatttaaataagagtaaattagcaaaatcttcgataactttagtttgctaacaaaatttaaattttaacgctaaaactccattatttgccggatagaccaagtgttagggcaaccctttattgccatctcacttaaaatgtaattatgtggtattttcaaaactaaaatatgagttaaaaaattttgtttagtttaaattttttaaaacaaattaaaactaaacaaaacaaaaattagaaggcctcattaaatatttcttcttctctctcacctaaccctaactccctctagcaccacacgaaaagagccaaagccaactcattgtccaaattcaaatattaataaatgaaaaagaaaaaagcttcaaactcaaatagaataatgtacacggaatctactaaaattcaaatattcactctgatataattaatataaaattcttaaagtcttatgtaggcacttcatttaatattatttttctatataaaatgtatatatattttaaattttacattttatatactttaattttaagacaaaaaaaaaaaaaaaacaaaaaactttaaggacagcttagattagtatatgatttagaattgttttatcattttttaaacttataatattggggtcaggtaaattttagcggtaaaactttctaaattattgaactcttaacaaatttaatgtgtcatctctaacatagacggcttatgtacacttttatacaagtgacatgtttatattaatacatataatattattatttcaaaactaaagaaaattataaaataaaaaaaaaattataaattttaaaataattttttattaggtgtaccaatataaacgtctcacgtgtacaagagtgtacacataatcagtgttaatggtaaaaaatagatgatgccttaaatttgttaacaatttaataattttgagagttttactactaaaatttaagattagaaggttaagtgcaagtagaatgatatttgagagggtttaatcgcaaaaaaaaaaaaaaaaaaaaacgattttagagca

SEQ ID NO: 118221 - DNA, 1795 bp, Cannabis sativa
catccaagctttcatcttgagatttgatgaaggccttcattctaacttttcaataaggataattagaatcactgagaaaaagtgcgatagaaatcgaacttccttctgcaaaaaatgacattttacacaaaagcacgcgaaaccattgaaaggaccacactaagagtttagtgtccatctctgtacaaaactttcctaaagaaaatcctgattcgcagcatcagagatagattccgtcgcaacaaatcagaccagaaaagaaaacttgccaaaaatgagtccgatcttgtattgggtcttgatactttccataaatagtgtgtatgatctgatcttatcaagacacaatcgaacttattaaggaaaataataatagtcaaagtttcctttaacaaccaactttctataagagaatttcttatctgacaagaagtttccatacaagaaaaagtccgttgaaaaaaaaaaaatctttcctaagatagaaaagagcaataaaatcgaataataaaggtgataaaatcggattgatagcacaaagaaatctcaccataaataaaaaatattttggcatctaaatttctaaataaggattttacaagattctttaagaatttggcgggtgttgtcccagtttttcttctcagaatcaaacccctcaaccttgcctttcagtttttttattttctatcttcaacaagctcgcctttaaattagctatagttatgggagagtttggtgtctcaaggtttttctttaatctagcacaggtcttgattaatttctctttttctttatccattggaggggcaaatttcatagcatgagcacatcttggggcagtctaaataaatcacaataagcaaaaaaaataagtcgtacaattcattgaataaaaaaataataataaaattaacgaatatataaaaatatatacaaaatgtatttttttcatatgtttagataaagttcgtaccttgattttaaaaatagcagcatcctttaaaatggatacttgcccttttgaaatataaaaattatcatcaagtttacgaacttcttcaagcaatgatttgaaataattctcagcagatttctcgaaaggaaaattcttctaaatacggaatgtcgagatctcatcccatttagtaggtgatttattaggatgagttgtcacttgtgggataccttgatccccgccaaactgagtcgagggtcgagccacaaaaggcaataacacgagttgaggtatctcagaagaaggacgaatatgttgggaagaggcagggattgaattcaaaggtacacttagattagtagcatagataaccgtgtctttggatgaagacccgggcatttgggaagtaggaggcgcaggaacaaagccactaccttcacctacttccaaagcaagggtggcatcttgagaaatattcactaaacaagactcaccaagagaatcttcagtagaaagattaaattaagaggcttgccccgtctcaaaaggttcattagcatcaacggtagatttgacaactttgcttcttgtattttcctttgcctctttttggcagtttctccataagcctgtttaggcagtcgacattttgggcttcaatttcttccatggatagttcaaaaagtttcataataatagttacaataatatgaacttataataaacatatatgggtaatttgcggcataacctccttaagtgttcaggtttttgcaactaacccctaattctaaaatttttgtggtaaaatcttctaaacccaagttctgttagcac

SEQ ID NO: 118222 - DNA, 1051 bp, Cannabis sativa
  modified_base (27)..(45): a, c, t, g, unknown or other
taggatgttaatcaaacatacttggtnnnnnnnnnnnnnnnnnnnaaaataatttccaacaatcaaaaggatagctgttagtagcctatgtccgatatgtgatgctcatgatgaaaccatactccatgcgcttgtcacatgtgcttttgctttggcttgttgggagaaggctggggtgaatacaacaatcactgctggtatggatttcttggattggtgtactagcacatttgactcatcctcctatgaaactcaatgcctagttgttgttctatgttgggaccatttggaaatctcggaacgataaggtgtggaataacaagctgtctaatgtctcttctactgttgcttttgccattacttaccttgatcaatggaaggccactcaaactcctgtggagtcatctcaactagctgctagagatggggccgagcggtggagccccctatgtcaaatggtatcaagattaatgtcgatgccttaatttttgaagacactcaaggctatggttttggtgctgttgctagagacgagttcggctaccttattgagggagtcacacgatgttatccaagagtggttcgacctgagctagcggaggcaattgaattcgtgaagctttaagttggattaaagccaaaggatggcagcaggtgactcttgaagccgactgcttggtagccatacaatctatccaaaatccattcaatatgatctttagttttggttatgttattcaagattgtaaagctttgcttatggacttaataatgttttgatctttttcgttaaacgttcaacaaactaagtagctcatgcttttgcaagagcttctagtttctatcctgatcgtgttttcagtatgggggatgtcctaactgatttgctaccttgtttagtagcagagtttgaagtttaataaagtttctgattactttcttcaaaaaatcagtctcatattctttaactttcaattcaagagattcagtttgataagacaattgtttatttatttttgaaaatgatctattttcagaagtaacctgtatc

SEQ ID NO: 118223 - DNA, 1805 bp, Cannabis sativa
atggcgatatgtatgatttgacttagctgaaacccaaattatatctacaactcattctaatgatctcatttctgctatacgcgtagcctagcttgctagctcttgaattggcccactctttttttaattacttgcttgaaaaatcttctataattaacttaatttattcgatccaattccaaattaataatctcaatactataaacacaacatggattcacgtttcctataatatatgcactcctaataacactccattgattaaattcttacatacatatatgtgtggaaaatcttcaatatttccacaaaccatatatcatcaagtacaaccaaaaactcatttattactcttctcattctatagagtaaagattatatagagatacatcgatctgttatatcttttcaaactatatatagtagcttatataaatatattctttgtatggaaaagccggaagggtatccagaagtggtacttcaagaagaagatgacagaacttggttcccgcctggtgtcaaagacgacatgtcgttattaaaaagtgctactttgggaaaatactatggtcataatagcaataataatgatgatgaagattattattgctactataattttgagtcaaagcttggaatattatccgacccaagattgttagctgtggtggaatactttagggagctttactttcgaaggagggagttgtttaaggaaaccttcccacaatttcaagatcatcacatttttgaggtgttaaaaaactcaggcaccaaattgtggagagtcaaatcgggtaatgatatccaaacccgggttgtcaccctcaagaggagctccagcctcggctcgcctccccggtctcctccagtggggactagaggatttgagccaccacctttgaggaatgagtggatcaaggttaagacaattaacaccggcggtgctgaaactaagtccgacaccgccggtggttcgaaatgattgggccatacctgacttatggaattggaaactaattaatggtttgttttttaatttaatttcttatttttaactatcatatttatctaaattgggatttattcttttaaaaggtgatgagtatataatatattttagttcacatatcatatacatattaagaaaatttacatatattgatttttgtcatttttttataaaaatactttcagacggtattttttatatttttactgtgtttttttataagtttcatactgtaatattctgtgttaagtttttactgttgttctattagtgttttttagttgttctactgttgttttgagttggtgttttataaacacacagtatttttgaaaaaatttccgtatgagtatttttgtaaaaattaactcaaatttcaatatttttttgtaagttttcctatatgttactctatatgctatataatactactcctccttgtttattgtttttgcaagaggattatttaagaaaaagatgttaaattaatttgcaaaatcagttcatgtgttaggtatgttgtgattgaaattaattagtgggagagatgttaattatcaagatcttcttctgtttgtttattatctttgtatattatttaattaatataatgtgcgcgcgtatctacaataataatgttgtatttgctgtttggttaagaaaaaaaaaacgtttaaattataaattcaaatagttagacctcgcggtcgttacacaatatattgttaggtacaaccgaaacatggatagacccaaacccctgatgagcaaacgcccatctagccacatt

SEQ ID NO: 118224 - DNA, 5042 bp, Cannabis sativa
aacaacttttagtttctatttttgtttatttccctttttgggatcataaatgtaaacttgttccatttttagtttattatagaaaaaatcctttttttttaaataaaagctacgtcgtacatgcacatattttttcagagaaatgctaaaagacacctatgatgtctaacacctttctaaagtgtaatatcgttattaatgcaactcaatatcagatctcacttattttactttaataaatatttaaaaaattactaaccaattataagatgacacttcatggtggtgctaaacaccatgagtgcctcatagcaatgttctattttttatgatttcagtttttagttaaaaaccgcctttaaaactcttcaagattctaaaacccaaataccaatcataataataccatctgtttggataaagtttccataacccaatgtcatgcctagcctcaaaagtcaaaacaatgtttccacagaagattctaacagcaaaactccataacggcaggaacagattacccagaataaattgctgtaagcacttcctaaacatgatcacatacttaatttaaatcatattcacaagaaaattgtaaagattaactacctgggagagatccaaataccaaaaatatacacatttcaagaccttgttaataatattggagtagactatattttggtggctccttgtagaagaaatgaggccttgtcacggacctgagaaaagaaatcattatgaaaagataacaaacatccaagaacagacatgaaagataaaacaaacgaagctccataccttcgatgcaaaagtcctcagatcggtgctgcttatttgacaagagcagtttcttagatataagttgtacatttctttcaaaactccattgtcttctaaaagattcttcgacaagagccagttttgagttaaaattaagtacatgtacatcttatatagatcacaccttttgtccttcaaattaattccaataagcaatcttaggatgtcatccgggtgggcagcctgcacagaaggttaaataatcaatctgcaatgctgagttgtcacacgcctcgtaaagtggacaaatacaagctgaaaatgaagggcaagggcacaggaagtgaccttattatcaaagaaaccaataagaatttcaaaagcaactgcacttctaagctgcttactgcgatcgtcaattccagaaatgcattctacaactcttatgcagttcatgtcttttggtactctgtaaaagaaaagaatccacaataacacacaagaaagagagaaggcaccgaaacttaagttatacatatattgagtttttgctgttcttatgaaagaccacaaattgaaatatggccaagctcattcacaagataatcaaagacttcaaattttatcttgggtggtagaaaaagcacgctggagtgtacaaattaattcagcaaatgcaatctcaaatatataaagatgcccctagcatattattaaatatccattgttcatcatgcaaagaacaaattactgaagtttaacatataatatattattgaaattgttgttataaagccaatgtacagcaataaacaaatgtatccatccatagaacaataaatcaatgcagtaagtcatacaaatattttttttctgagaaaagtaacatattagcactattaacctgcatgcaagagattttgcaattttctcacagctggcattccattcctcgtctgtgaagtaaccaataactgcttgtgcacattcatacaaaagcacagacagaccttgaagctggcggtctaaaaagaaacaaatgatgacttcaactaactcttcagcttctgatgttgaaaaaatagaccacttacttctatagagaaccaaaccaaaaaaaaacagtgaaaattctttccaagttttttcggccttcacatgaagcaagtgctaaaacgaatatcatagcagtagtataaacaaggaagaaacaaaatgcaaaaacatggaagcttaaattgtagtaggacttattttaaattcactgcttacctaaattgacaagaagcagtaacaaacttgatccaagatctaatattttgagaaggccccacacaactagattctatgacaaaattacaagaatttgtgagatgtacaataaggggcaaagatgtcacaaatgtagtacactgatgtccagtaaaaatagaaacaaagaataagtcagaaatgcaacatcagctgtaaaccatttcgaggtggcgttggacataaaaataacaattggagccttatgcttatgcatactaccaatctatctatgctacttgcaatcatgcaccaaaaatgtatgcatatgactcgtttgctatgacacatgtgtaccaaaagtgtatcacatgacatgtgctatgagtgtaccaaaaatgtattcatatgacccatatgcacacatgcatgataaacacgcattgaacccttaaaaacagatggaacattatcaatctcactcaactaacacatcagaaaggacacaatatagctacaagtagtttcacggtcgatagaatattgcaaaaaaacttactggcatcagcagctccaatgttagacaagagaaatccatagacttcaagagcttttcttagttcagaatagctaggaaaccgatctattttgataggctgtaaatcaatcttgttagaagaattacaaataattagcattcctttaataaatgatacataataaaaattccccaattcacctcttttttcaatgaaagaatagcagaccagaaatcacatgcggatgttctcaaattctcttttgttgaatataatactgacgacagaaggcaagcgctttagaaaacataacagcactatcaaaaacaaaatgcacaaactaactcacccaaattatacgtccacacagctattgaatcttctacatgaccaccatatgtgagcactaatttcgtaagccagccacccacaagcaatccttcaataaaagagtctcctaacagagcagaggaggaggcagggaaagaagcattagaactactaagaaatgagaatcaacaaaattatgtaaagtaaaataactaaccattctccaaagaaagttcaaccagagaattgagttcactattcatgaaagacttcaaaagaccacaatcttccactggacacagactaggtggcgatttctacaaattcacacatttcaacacaaggaatttttgtccagaatttagctgataccaaaaccttagaatactattaagcaatacagagcaatctcaagcttgtcatctttcaatttaaacctggtctcgaaaaagctgaatgccccattctgaagtctcctcttcaccgctcagttctatcatctgtagaaggttgtttatgttatcaattacaaattatgattcactgcctaaaattaacactaaggtgacatttggttagagctaatgaaatggaatggaaagtcatttatttagttgcattataaagtattggaatgtcattctaatggaatgacttctccataattttggtagaatgactattctattttgaaatggaaagaaaaaatgaaaaaaaaattaatttttttatcaatttttttaagcgttttaaatttgatttcattccaatcctatttctatctccattcccattcctatttttatgttttcattccttccaaccaaacaccacctaagatattacaatagcaaaaatattctacctgtgtgtggcactcatcaacaagtttagacaaagaagcttctttcatatcttgttcttcacgaaaaaatttcttttttggtgccattgctcgtttagattccttctctacatttttgctttgctccttataaaaatcagacacaagttcatccaacccaataatcttcttcctaatagacatcaaatttaaaaaatcagagaaaaaaccacacatttgtgacgagacaacggaagaacatcaaaaactaaacaatgaggccaaaacaacatgaagaattagcaaacacacaatcgagtttgagcgcaatgttaagatcacagcacaaaccgcgccaaaaacatacaatcaaacaacacctacaatgtttacatcctaacaaatccatgtgcttagaatcaattcaatcaaccatggtgcatcatcacaaaaaaattctgacaatcaagtggaaagccctatcaaaccaaatactccattttaagtagcagtgacagtaattaaaccctaaacaacaaaatgagactttgagatagtagacacaccttttcttggggacggcatagggattgatagctatacattcatcattggacgccatttctctctgacctgagtgatcacgctgagacgcgccaaagttccaaagggtttttttttttcgaaaggaaaagtttgtaaagctttgattatatttgtactcacaatttcacccgacatcactatattcaactagggttgcacgggttgggttgggttgggttgagtgggttaaaatttagtttaaatatatttctttttatgagtattgtaagtatataaattattctcacacactcacataattcagatataatttcaaacataatagatctgtgttctttgtaaataaatgtgtaagtttgtggaaaagtttcgacaaaattttgattagagaagaatgaaaactatcgtgaagtgataggggtaaaattagtagaataattgaaagaagagataaacataatagattttgaaagagagggtaaaaattaaaggcattaaattaaaagagttatgtagtgtaatttccttaatttattgccttattctatttataaataactcggtttagggataataaaactaacatctttgacacttcagttagttgatcggtctatgcaaattcctagaggtttcatagaagatgttttgataaaggtagataaattttattttcctgttgattttattgttcttgatactcgttttgttaaagacataagtgctca

SEQ ID NO: 118225 - DNA, 1941 bp, Cannabis sativa
  modified_base (756)..(761): a, c, t, g, unknown or other
  modified_base (1489)..(1492): a, c, t, g, unknown or other
  modified_base (1625)..(1644): a, c, t, g, unknown or other
  modified_base (1686)..(1691): a, c, t, g, unknown or other
aaaaaaaaaaaaaaaaatgtaatatttttgagagcaactaatttgttaaaaataaggaccaacgaacttaagaaaatcttgaacttaataactattattgctattttttaaaattaaaaacttatgtgcataaatattacactctcactccatccctaaactctaattagttgtcatatataactaataactaaatgagtaattctcataatataaatccacgtgaaccacaagttaaaattttcctctctctttctataaacacgagtacatatatacaattatttcataaaaagcacgtgcgggctttttctctttttctttttatgggaatatttttaaccaatctttgggaaaaagttaaacagagaaactgtatgtatggtcacaataacatatgtctttatacatattatggcccttcctatgtcactatcatgtctttgccctaatttttggaagcatatagtacttttctgcattctgcattgcctaataataagattcctttataccaaattatggtccaacttattttacttaaaaataataactgaaaaagaatctagaaagctttctctctcatttcttattgcatatatatgctgtgttagtagtactaattaatcattaattataatatcataccatattaggatgggtagaggtgaggaaggaagactagctagctatccaatcaataaaataaaatagttaagagtaatttatgaagtaaatatttaagtttaatttttnnnnnnaataatacttaagttatatttctgcaatatccgtaagtaccatgtactagccacattgtggtttgaggaatataaacactttgccttattacttttgacaatcttttacttggcaaaagatgaggagacccaagaaaatgcaatatgcgctggtagttctgcgatcatcaagttatgaagttcaatcaacatccgtataatagcggagatgaatgtgagaatcaagttgcaagagtagaccaagatggcaatccctttaaagtcacgtaaaatgcgtttggtagcttggagatgagtgtcatttaacaaaacagaaaatttaattagtaacttttacataatatgatctaaaatgatatttatcctttaaataaagtattatagattatattatgccgtgtactatcgtatatattaaagaatatatatatatatatataatttctatatgaagtgacgaagtacaaatgctataaaatttgtatatatgaagtgagtataattattagaagcaaaaatagtgttcatattataaatttttctataattttatgagggaattattgaaaattatttaataaattaaatcatgccaaattataaatattactcaaaattaatggagaaatgttaaaagggtacaatggtatccgcccccaatattgaattttctatttttattataaaatataggagaattacattatatactattttttttatttttnnnntcaaatttacggtttgggtttttaaagtggttgcagcactaattgcaataaaatttctgtacgattttttgttgcaatttaggtagttgcaataggggctttttatgtagaattctataaaaatgtaaaaaannnnnnnnnnnnnnnnnnnntgtaaaaataaaaaagtccttaaaatataataataataatannnnnnataataataataataatattaatcgtttatgaaaacttcatgataatattaagcaattctcataattagaggtatatgtgccatatagctttgagtttgagccgacattgaacgtaaaaatttaaggatagatttacaaatacacaaaaataacaaaaaaattataaaaatacgattttacggaattttaaacatttttacggttttaatttaatttacagaaaatacggtctttttatattgttatctt

SEQ ID NO: 118226 - DNA, 1649 bp, Cannabis sativa
gcatagcatcacctgcctgttccatgtcagttgaagcagatgaaaaatcgtcctccctattcccagcacgagctctcttcaattgtgacctaacagagctgccaacaaccacctgttggggaaggaaggatggctgtttgaccccagaagccgaagccaaccctttcccacgaaccaacgggtccggttgaccaacttcagcagtatctcccacagtaacagtaggtccactcgaggtaaacatcacctcattagaagccatagtgctcaaagcacgagagaccatatccatagggacagcagtagtagcaaccaccaaagagttggtggaataggaggtgaaagctgaaggacgcaacacatggccagcagaaaaagcattatcaaagttaggattgagaggggtaggaatcataacagaggaactagtataaggactgagaaagtgtggcccagaactgccactaccagttaggaacgaaggaaaattaatgatgttgtccaaaaagtttcgagtgggatgatgaagattaacagcagcatgatcaacaagggtaattgcaggaggatgagggtattggaaaggcatagacttgtcaacaattttctcttttcttctcaaaaggatagtataagggcaaggagggtcagtgtgagtttcatcacatttttgaaggtaaaaatgacaataacgtttggtatgatcaagtttaccacaaaagaagcagaaatcacggagcctctcatatttgaaatctatccatttaacaaattctctacccattcgaatgaaccgaatgttcattccccttctaagaggaagattcacatccaaaagaactctaatccttaagtaaggcccaataccctcttgaacagtatccttatcaacctcaataaggtcaccaacttcagcagcaataaaacgggctaaataatgagacttacacataaacgggatgccatatatttgaacccagaaaggaacataatggaggttatcaggagtgataggaaaagaactttcaggagcagcaaatattgtgatactttgagcaaagtgccacggttgcccctctaaaattctccccttatcaccctcacacccaaacgaaacaagaaacaagccatcgacatgttcagtaacagagacgggaaacctacactgtgatgaccaaataccagacaaagttttcatcaaagatggcctattatagggtctaatggtatgcaatttgagaaggaggctaatggtagtaggagtagaagaagaggaactggcatcataggtgaaaatggtattttcatcagggggaaaaactaatgcaccggaaacattgttgagaaactcgtccatgataatgaacaaaacaaaccagaaaaacacagagaaagacaactcaacccagaaaacaagcaaagaaggaaaaagatgaaaaaaaaaatcatacctcaatcttactatataaaggaaaaaccaaagcccccgtagatgctttctcgaacaatccctggtcacatccctagcctccacctgaagaggcgcaatgatgaaagaggagtagatatcgtcatcaaaagaagcctccgcccccattttccaatctccaagagtgaaatgatggaaatagatatgaacagacagtatt

SEQ ID NO: 118227 - DNA, 2349 bp, Cannabis sativa
caagcgtaaaactgctccaaaagacaccaatagacgagataatgctaactttaaagacccgaaacataggttaattataacctaacaatgacatttgttgtgtaaccccgattctcttgctgatagagtttacaaagccaaatattttccaaaattcaaaattcttttcagttgaacttggcaacaatccaagctttgtttggcgtagcatttggggtgctcaagatgtggtccgtttaggtgcaacacgagttatttgtgatggtacaaacaccagtattcttggttcttcttggctgccaacacctaataacaggttcattacttttaatcatcctgggttgcaaaatcaaactgtaagttccttgtttcagttggataatcgcagctgggatgtggatattgtgaatgacctgttttcagttcaagaagccaatttaattcttggtattccgttgaatagcattgttggccccatttttggtcttgaatagctgaccacaaaggcaatttctctatgtgaagtgcatactctctgctgtaacgtcaaaaatcagtcacaccagagccaaataattctggtttttggcgcaacctttggcaccttacgataccacccaaagtgtctaacttttggtggcgtgtcatcttcggttccttccccacctgcgtcaatcttgttacaaaatatgtgtcaatttcagctcaatacccagtctgcaacttacatgttgaaactgcagtgcatgctcttctcacttgtgattttgccaaagcttgctggtttgtttttgggtgcccgattacaattgcttcaccatcaacctttggcagctagtttgagcttctgcagaatactagtgatacaaaccaggtatatcgagttgcaacactatgttcgacaatatggaaagctcgaaacaaggttgtttggaacaagcgaaaatccaccattaatgatgttatagccacaagttctattactcttgaccattagcgaaaagttcaagaagataaagccgttcttttatcactatctttcaaaaacagtgatgatgtggttgagctttagacaaaacacgataagaaccacatcaagattaatgtagatgctgcactatttcatcaagacaactcgtatggttttggtatagtagcgagagataatttgggtaagctcattgaggccaaaacatgtcaccatgctggttcttaccctgttgaggttgtggaagctttggggatcaaagaagctctaagttggatcaagagcaaaaactggcataatgtagagcttgaatctgacagtctgctgtttgtccaaacaatccgaagtaatcaaaggatgtcttctacttttggtttgattatttaggattggcgttcttttttgtcttctctatatgatgtaagattacgttttattaggcgatcagtaaatcgagttgctcatgctattgctaggcatgctcgatttatctctggttgtagcatttttgagtaggatgtttgggccgatttgagggatatcttgtattcagaatgtttttaattcaatgaagttgacatttcatcaaaaaaaaaaaattgattatattcaaagtcaattattggttcaattgacataatcttttaaatatggtcaatatttttcgttactaattttatttaattcggttgtccaaattacatatcccaattttatgaattttgaattcaaatttgattatttgattacatataaatgagaatcgtttggtcaaattgataaaattttattaattaaattttattttagggtactaaatatgtacaattttaaaatataaaatactaaataaatattattgaaaacacaaggtacaaaatatgttttccgagaaaacacaagtactatatgagtatattccctatattattgttcttttgttttcaataaatttttctataaaaatatagctcaaaataatctaaactcccagcttcaccagatttcttcttttacgtgttaaggtggcgtttggtaacattttgcttttaaattttttaatcaaaaaaataaaagtaaaattttttatttttaaaattttgattttgaaaaacaaaaatgtgttttataaatacttttgtttttaattttaaaaaacaaaaaataaaagtgtgttctataaatttcatttttatttttatttttattttcatttattgattttatttaagtcgtgtccggagtctagtccgaggtcgggaccgggggcaggcccaagtctgggtcggggtcgggtttggtttcgaaggtctaagttggggttggactctaaaatattgattaaaaaaactgtttaaaaa

SEQ ID NO: 118228 - DNA, 1112 bp, Cannabis sativa
aacttagttaccaaatttagggtcattttgcatctcaacccttatttaaattttatttttggtattataaaatattattttatttttttgaaaaagtacacaaaagttatgtaactacaataaatatcattacgaaaaaaaattatgcttaaaatatttaaattgtatcaatatttaagatatttgtactagatatagagcataaaattaacatagacgctttctaatatatatataaaaatttagtgtagtggtacatttaatatatattttttatttttaagatatcaaagttttcaatatgtatttattggagttttttaaaaagtaatttaaagtgtcaaagattcgaacattgacgtttgaaccttgaggggagatattgaaatttttttcactatactaaaaattgcatacattaaaaattagttacatgaatgtatattaaaatttaagtaagtctataatatatttttttaaagagatatttcggtagatctatctgtttcaacattcaagatagttttttaatttatgttttcatgatcgagtacgttgtagtttcttaagactacttataaattttcagaaaattatgaatagtttacaatgttaaaaataatgtttaaatattttgttgcatgcatgagcacgactgttttttcttatacatatgataaacaacatgttaaaccttattttttgtaaagtaaactattcataatttttaaaatttttataagtaatctcaaataactacatcctatataatcatgaaaaaaatattaaattgagaaactttattatattgaaacagatcaacagtctactaaaatacaattttaagagattgtactacatattttcctaaaatatttgcccccgttgacaaaattttatgggttcgccactgtattaggcttgtcttatttagggaaacttacaaaaatactgtttttttaccaaatgttttcaaaaatactgggacacgacaaactttacatttttactattcaaacccatttttatttcttttatactgcccaggcccaatatatttacttttatactgtaaatagtaacaaaatacaaatggcacctctccttcgtgg

SEQ ID NO: 118229 - DNA, 1134 bp, Cannabis sativa
  modified_base (46)..(60): a, c, t, g, unknown or other
gcatttttatttttcaagaacaaattttttaaaaacaaaaattttnnnnnnnnnnnnnnnttaaaaaattaaaaaaaaatattaccaaacggcactaaaattaatgatttcttgatttctattaatgatttattttaattgtagcaatattaggttaaaccatttcagtacacacagagggataaaaccgtcaaagcagaagtctacgacgacgacttatgtttaacttttttattataattttcattaaaaaaaataaaatagtatttttattaattgaaaaatatatatatttattaattagattagatagagtttgcatgtgctgacacccgatttgacgccaccaacgtgtccacccaacgcagagctcgaagcaaaaacgacaatagcaaagtgggccccactcaccaccatctaacgccacgtgttaatccaagccacgcccccccaaaaactgtttggtgagatttaacggcacaacgtgttccgtatttattcttacttcacttcacgttacgacgccgttaaaacccctgtcgtggcgttaggtagcaaccaagtgtgggggccgaagacgactccaacggatctgctgacggcgaccgttaactcccctctcgtccacgtgtaccgttgcatatgaagaggaaactaacacagccgtctcggaagccattaagattgttccacgtggacgactttagaagctttgagaaactaataagggacacctcattacctttgcgctgtcttgtgggaccacttgggtcttggttgtttcgtgggaaagtacaaaaatgtgggaccaggcctcgactgtgtggactttgatgaactccagatgtgaatttaatttgtacacgtcatcaaaaattgtcatctccttatgtgagaaagaggcccaaattgggaatattgggctttgggcttgtatacgttgggccccactggatgggctcttagaaaaatatcatattattttcgatgatccatttcaaagctttttttttaatagatataatagaaacttacaaaaatattgaaatttagagtaatttttacaaaaatactgttacacggaaaagtttacaaaaatactgtgtttttatagtagaacacaaaacagaacaa

SEQ ID NO: 118230 - DNA, 1779 bp, Cannabis sativa
ttattaccttattaattttttttagttcccatcaatgggtattacccattaagaagtgttatatatatatatatatatgttttaaagaaagtcattacattaattaaaaattatttattataagagaacatattaatcgtagacaaatatttgtttatatctaaacctctacatgattagtaatagatttcattaattcatgagatgcactatttgtggaacggaaactagcataataagaactaccattaactgcaaataataatgaaattacatcatcaataattagtctaaaaataatattgaaatcaggacaattgacccaactacaaactattgaagaatcacattcaaccctagaaataaaaaaagtctaattggttaacctaaaaagaagacccaatctcaaagctaacaactcacccacatcaacccaatacccacactccacctcgacagcccaagacgctcaaaccacaccctccccatctcggagtaccccaccaagaccggtgaagcccctacttggcatcaccgtcgcatttgtgctcaacaaaaaacaaccctgcactggtgaaacccatctcaactgatgcacccccttcactgcatctccaccccacccacaccccgtcgttgcaactcttagaactccagtaacgagttaccaactagcacctcaagcatctccacccttgaatccttccaagcaaacaacacagaattgcgttcgaactaaaaccaccaccaaatcatcgaaatgagctcaaatttcaccatcgaaagttcctccatcactaccaccagcaactccagaaatgggcccccagaccgccgtcttagcttcccccaaacctccaatcgattccacatcaaaatacgcgcagggcagaagactagagcatgcttcgacgactccactgattcaccacatcttgaacatccaagaagtttagtctcaaatagaaagactaaacttggggagtacttacaaacaacagctcacaaggtcgttaatgcatcgaggttccccaacctccagacattctaacatagaagacttacggctcttggctagcctgcatagtagacttcgctaataactcatcaacctcaactgtagacacttcttccacaatcacattacattttttatttttaccatcacttaatacttcctcatcatacttatgtttaccacctagaacaaccttaggtgtattttgatgtcgatattaaccttcttactatatattggttttgagcatgcgtcataatttgatgggataatttaggactaaggggagtagctaaagtagacttatttcgggctaaatatcttttggaataaataagtgatatctacatcgtacattgacgtgtcatgctttatagactttccttttccaataataataaaagaacataaattattttattactatttcgtatattacttggttcacatgttactttcatgatcatatgtttgatatataagttctgttaatttattatcatattattattcatgattatagtatcgtatacataataaaaagtaatcatgaatatacggtataaaatatttcgtatatttcatgtgcctacgagctgcctccatggctctctgccccatggatgtgcctgctccccgactaggtcttggggcccaaagtccgttctctcctcactggagggtcatccatcatggactgcccagtcggcgcaggccttggaggaggaagaggaagagattgttgggaatattttaccagg

SEQ ID NO: 118231 - DNA, 1553 bp, Cannabis sativa
  modified_base (1514)..(1514): a, c, t, g, unknown or other
ttttttttttaaaaaaaagaataatttattattacagcaacaacactacacccaaaaatagaatttcacaccacgtaagacacatcctcaaaaaagctcttttgccaaaaacataacgtgacaatgaataatattttggtcacaagtttgactgaacttgatacttgacagtgttataaacaaataaatatatattatttattaaggaacataaaaaaaaattaaggcaaattcacaagtaattgtaggagcatagaggtaacgtgtggtcacagtctagcagaccacaccattttaaaaataacaaatgttatattagatgtaaaattaaacacaaatgatgattgatgaccgcactttatttttaaaataacaaaagataaatgagcgtgagtgtgttcctataccttttgtaaatttaatgataaaattttgattattttttttaatgtataaaatatctcttcatgtttgaaaaaaaaacaaaaaatccatacacagtgctgaaaagcacgagatttgagctgtgcatcaaagagccagaatatcagttcgtatttgattctctggtgcaccagaggagtactatattgaactctcttcacgtacatacaaaatgacaatgcttatccctcattcttgtcgtacgcctagctttatgtatattgatttaattttaacggctgtgattgattgcagaacgcggtggagcagccgtccaaatattttggaggatgggcaggagcgtacacgatcaacgccttcattgttgggtgggtcctagtggttgggtttggattcggtgggtgggcgagcatgacaaacttcatacaccaaattgacacatttggcctattcaccaagtgttaccagtgccttcctccacctagtgctgcagcccctccgctactcaactccacggtgggggcgccaccacctcatcaccaccctctccctcaccatcaccgactttgatttcctccatcaaatccatacatcacatctgccacgtcacttcttctctcgctctctctctagccagactcatcatcagtcaaaatgttatggtgctaaactccatatatgtctttggccaacaaattacactttattattattatcatcatcattattattttctctttgtactagcttaggttgtcttcatttttgttatgaaatcccatgtggacaaaaaaaatgtatcaaatattacacccaaaaaaagaaaaaaagaactccttagttttgttgctaatatccaattaatgctttcttgagattgtactgattttctgtagaataatagcaatttagatgtttatcgcctcgtcttatttagatgttttgacttttagaataagggatatcatcagtaatattatctcaacaatatattctgttacacataatcttagaacttaaatttttatcgttgaaaaagttcagttaaatgttaaagtagattgtttaaggactcgtttggaatggcgtattaggtcgtattgtattgnattatattgaattgtattttatgcaatatttttatgtaa

SEQ ID NO: 118232 - DNA, 1416 bp, Cannabis sativa
attcccattccattttcacttagtaaccaaacgccaccttagtgtttagtactatcacatgacataatattgatatttaatattaatattgtataatttaatttaataaattaatcaatattatataaatttgttaagtatttataggataacaatcttgatagcactctttattactattacttaacaataatattgatataattattgtgacatagaagtttttttaaaatttaataatatctaataatatttcaataaatgatctatgttattattagtgtgagttaataattgtaactaactatatgttaatacaaataaagttatattgggaattaacatatattagggattatttcaaaaatgacaaaaaattttatatttttacagatttttttttaataaaaatacaaagtattgttttaaaatcaaaattattgtgttattacgagaaaataatataaaaataacatttttctaaaatatattttaaaaataacaaaaaatttatatttttacaaattttttaacgaaaatacacaaagtgttatttttttgttattttgaaattaaagttgttatcgtgttgttgttacgagaaaacaatgtgaaaacaattatgttataaaaaagtacatgaaaaacttgtaaaaaaacaacagatcagtccataaaattgtaaaaaagtaaataaaaaatggttaaaaaatttaaaagaaaatcagattttaagtatcttatgtaaatttctattaaatatttttagtatatacatggtattggacacatctatagtcccatttctcacatatgcttatagtcttgggcagttaggattttgtggggggtagcgtgagcatgggcaggtgggaagcacgtacttttctcgggcccctctcaaacattttataagcaaaggattcaatacaatgtgtgtgtgtgtgttttttttttgttggtataaggaaaagagccatatcaagatacacatgtctttaataaaaaagattaattgactatgtgtaagtttgaaatttgggaattagtatggtaggaattgggtattttacttatagataggtgtactatttataactattgatctaattaaatagttcaaattaaattttgaaaactacaatttaaataatatattttttatttataattaattttaaatcctatttattatgttcaagtaataacaaaaattacaaaattaactctaaacttaatttttattttatttacttatttaattttatgactaactaaaagttttattttgtctatttaattttcaatatataagataatatttattttttgggacattattccatatactatttttttaacttctttttttcaaattttttgtatgaatttctaaagtggtttctccggtggttt

SEQ ID NO: 118233 - DNA, 1238 bp, Cannabis sativa
aatttaattttatagtcagaattttttttaatttaaatatttaaaaggacttttatttttatcgaattgattgatcaattaaataaattgtttgttttaatatatttgatgtgcttgctttcacaaacctagaaagaaaaatatatagacatttattaatatataattttgattataatatataattgaataattttgtaccattttaataaattagatattttaaaattttaaattttatgttatcattttattattttaaatatttacaatactttatttattcataaatatctaaattgaaaaaaaaaaaatattcaaactcgccgcacaaaggacggctacattacctagttttaaatatttttatatatttacaaaaaatacaatcttttgctatctttatatatatttttttatgaataagaatcattgtattactcacttttaaatttacaacaatcaattacaaccaaacaaatatagaattacatcacaaatcaactaaagttctactaaattttttctttacaaattttagagaactaatccctatcattagtttacacttttttaggcataactaaagtaattctaagttgtatctcttattctattctctgtacagtgtttaaagtgtgccaaagcttttaattccaaaatacatcattccaaactctccaaatatgataaaataaagcggcaaggatgatgttttttcgaatcttactcagcctcttcggtttatcaatccaacgaattaattgactcaaatccacggctttcgagttccattccatccaccttttaacctccgtcaaacacttcttcttgctatattggcaaagaaaaaataaatgaccgatattctcattcacatcttcacacaataggcaagtttgatccaccaaaggttcaaatttcgcaattaggtctttggttttaagttggtgtagaaaagccaaccaaagtataataccatacttcggaatagacaatctgtcctacacagcagcaacccatttcaccttctctgtttgctgaaataacaggccatgccctgttttgatgttgtaattctaggctttgaattgttttagcccaatctctgctttaaatgcttccttcatagctactaatctcttccaagctacaatcagttagtagctggtactgttggaaattattttaccaggatctatttactatcatgaatgttggattaacaacctaatatg

SEQ ID NO: 118234 - DNA, 1472 bp, Cannabis sativa
  modified_base (1430)..(1430): a, c, t, g, unknown or other
atggggtatcttaattagtgtacgagtagaagagaagttttgatatacctcttatttgttttggtatccagttttttaattttttttttttttaagactacctataaatttttagaaaattctatataaattacattgctcatgaaattaagttttaaacatttacgggtataataaaaataatcgattttgtaatcaaaatatttaagtcatcaaattcaatttttactttttttttggctaaaaatttcttttctaattttttttttcaaccaatgataatcttagcccatatatgatattaaagtgaaagatttttcaaattagaaaaaaaaaaaattaaacataaaaatttaatttttttttttttaaattttacccatccattcatgggtatatgtgtattatttgtaattaaatatataattaagaaaatttattttaatatattcttaagagtctgttttggtatttaaaaaaactttttagccaaatatattttattaattatgtatattatatttatttgtgattatttgtaaatttttagaaaattatgaatatttaacggttaaaaattaagtttaaacatttacttactacgagtataagaaaaaatcgttacgtgtacaacttaaacaatttaaaagtaattctaaataattataatgtacacaattttttatatatttgataagtaactatttgaatcttattttttacacggtaaattatttgattttttttttaaaaaaaaaaaaatttatagatgattttaaatagttatgacataaaggattataaaaaaaaaattataatgaactacaaaaaaattctagaaataggtaaatgatccatgaacattcttttatagaaaaattaagaaacaaaattagtggaacaatttttagaaccattcaccacacacgtgcggtggaccagataatctcttttgtaatgatttaagtcaagtcaggtgcaatagagcaatataaagctatagcatttactatttaattagcacgtgctttaattaaacttcatcctgaatgattgtttgttcttatatatacttaaaggaaagaaacaaaaagattaaacttcaatagattaattgttatatgagaattgatattttgtattgaccaacataatttgattaacgatttttatagttatattatttattaaattaaaacttataaaatttaatattaataatatgtactaataaaaaaaatattaaattatgttgtttatttcttttcaaatgatctttactattcactatcaatagtgtatttctttctaatacattggtacatacactttatatgaagtatcactactatctcgagagtttttattactcgttgaggccaactccttttttagaagcacactatgttagactatatatatagtgcatntaatatagcatatacaaatgatatgaaatgcggaaaataaac

SEQ ID NO: 118235 - DNA, 2223 bp, Cannabis sativa
gagtgtttgcttcgtgctccatcgctcgtattactgactattccttttaaaatagtattcctcagagtgactgtacggagggaattgaacagattactgatcaagttcaacacatatccatggacacaagggaagtatttgtactgttggtcgtcaagacctcaggtgaagtacctacaccaagcacctcgttcatcacagaaatattttcgagtgtggagtgaactggcattggattagatgatcaaaaatacatacgaaaagaattaaggataccttgataggcatcaagaggaaaaaaaatcctttttcttacatattatatttaatttatgtaatcatgttgagatcttggggattatggttcatattagattcatttaagatatttttataaaacctaaaatatggtttctactctgatatggaccataaaaaccaataaattggatttggaatatcagatggattctctttagtgccctctttagtgtcctctttagtttccttctaaatagatccatcttcttcggtgtcttcatcagaaaggtcaacctcaccagtggtgtcacccatttcggtcacacaagatggttcaatattaggctcaatttcaattctccttgtggcgaatcttgccatgtgaaggttgctaactagtttggcttgagttgtctgcatagtttgggctatggcaggtaacatatttggtgacagagtaactataatatcaatcttagcaaaaataatctttgatccatgcctactctcttcaactccaaaatatgtctgttgtacgcctcactacctaccaacgctcgatatagatgaggggtgaaattcagatccaccactagaactcttatctcaagacaagcgaggggaagtcaaagataactcagagaaatcttcaaataaaagttgaacaaggtctttttctacccggtagtcatctcctcagtagacgccatggtacatctacaaaaaagaaagaacatgaaggtgagtacaccgaacaatgctagtaggttatacatgatggacacacctacttgtacgacaatgaaaaataataaaaaaaaagagagaaatagattgaatattggagctcctaaggggctatttggtatgcggtaatgagagaagtgagaatgagaatctaaaagtttcctatgtttggttaggtttttaatattttaatgttggctaagtgaaattggttggctttagtttggcgggcaaggaaaacccaatgaaaatgtagttttcactttccaatgctattggcaaacacaaacttttgcattttaaaattgttttttatttttttttttatttttttttatatatgaatactaaaaatatttaaaagatgaagtattttccttattttttttatatattttattttataaaatatattatcaatttgtatataaatttactctttataattatttattattgttaagttttttaataaaattatatgaaaaataataaataaaaattattttgaacacttagaaagaaaaaaaaattaaattattagtattttataaaaaaataattattattgtaaaaaaaagttgtcacattccattctaataataattattattattagtatttatcattaccttcatgactctccaagtagtattaaacctattcccatgaaataaaaactgcataccagacgatccctaagagttttaaaaagctttttttttttttgaagaaaagcgtgcatatattaaaacaaaagcaattagacctctcggtcattacaaaatatagtattgggcatcgaggaaattggcacagagccaaatctctgatgggaaaaagcaaacttagccacattatgggccatataattacattgtctactaacatattgaaaactacagccaataaagtaggaggagaagtttttacaaaatgagacgtagttagcaagctcccagcgagactccatccaattaagagcgttgatcaccaccctcgaatcactctccacaataagaaactcgacaccacgagctttagcctcctcaagagccaaagagcaagttgtcgcttccccacagagaacattaaaaaattccagcttcgaagtagccacccagatcaccttgccaacatgatcccttgcaaccacaacagcaaacatacaatccaaccccattctgatgtcgcagttgagcttcaaccaatctt

SEQ ID NO: 118236 - DNA, 1093 bp, Cannabis sativa
ctttaatatacctgagaattcttttgcacacattccagtgattaacagtgggggctttaaggtattgactgagtttgttgactgaataggcaagatcgggtcttgtaagagttaaatattgcaaggctcctatggtgcttctgtaaagttctggtttttcaaacattggactgtcatttagagctaatttgttggccaaaatcatgggggtagaacattctttggcatcttcaaagtgagttctatccaataagtcagctgcatacttggattgggtgagatataaactagaactatttctgtaagcttcaaatctgaggaagtagctgactgatccaagagatttgagagcagacttgttgttgaggccttgattaaactggagatggctgctggatttgcacttgtgatcaagagatcatcgacataaaccagaactagtaataaagacccttgctaatgttgaaaaaatagagatgtatctgagatagaagcttgaaatccccaactaatgagagtagctttgagagtatcaaaccaggcccttggtgcttgctttaagccatagagtgatttagttaattgacaaacataatctggtttgtcaggatcttcataacccgggggttgttgcatatatactttttcttgtaactctccatttaaaaaagcgttgttcacatcaatttgttgtatatcccaatcataggtgacagccaatgtaaataccaatcgaatagtagcagcctttattacagggctaaatgtagttgtgaaatccaagcctggtgcttgttcaaaacccctcaccactaaccttgctttgaacttatcaagagaaccatctttattgtacttcaccctatatacccatttgttggaaagaatgttcatatctgatgtaggcctaacaagaacccaagttttagagcactattttctgtatccattgccttcttccaatgaggcaaactcaaggcttgttttactgtttttggttcttcatataacttttgtttggaggctgttacatgataaacctgttgggttttatgccctaaataaaactcattacaatcagattagttatcaa

SEQ ID NO: 118237 - DNA, 3915 bp, Cannabis sativa
  modified_base (3879)..(3888): a, c, t, g, unknown or other
gagagagagagagagagttattaggcttaggcttagagcttagagcttagaggctagtatcaagcttaaaatgaacttaggtttctaggttagagttaaggcctttatataggaagcctaaaaccgtaatatataacttgaaacccatgatatttgcataattaattaattaattacaaaagaccaaaatgtccttaaacatatatagtattcagctattctattaggcttttagggcctaatttgcagcccaaactagattgcacacctgtggaattacatagagaaccatgcatgcctttccctggccggctagacttctgtaggaagcaggctggccaaccatggtgttgtccagaggctggccgatcatagggccgtccatgggtggccatctagcttttgtgaggaagctggtctgtcatttgatgcctgtttgagtgtcggggttcccatttgctaaggtattgacttggccttctcattggtgagccgtactgtcacgtggcattaattttgtgcatgtaagcactgccacgtaaggaggaaaaaattggaatgatagattttgtgatcgaaaatagatcctcatttcgatagaccaaaaatcatagttttttctatgaaaaattagaagaggtaaagaagagtggttggagttgaaattcatgatctcaaattatgcccaacgatgatcaaacagagctctgataccaataatgattgagaattaatgtgtattagtttttgaataagtggatatgaaggaataagtttttagtggtttttgtgataaagtagtgaagtagtaatattgatgagtagttgttgatttagtatatgagaatagtttggcttagaaaaaagaattgtttgtaaaaagtagtaagcttttattgatagtttgtagctgtttttttggtttggatgttggttacaatttagaatccttgttggctatttatatagttgccagctttcaagcttttgtgctagaattgtttgctctagatccttctagtttaaggaatttttccatacaattctacatatttcttaagcatatataacaagaaaattctagactaaagttttttagaaatgcatgtgtattttattatgtttttcataagtatagaaaactctgaagtattctaccgttatctaaaaaaattagagtaagtttttctacaaatgtatagaatattctagattaaattgagtattgtagaaatatataataatttgtaagatgatatatgaatatgattattattaatatttatatagaaatgtgtagcaatttcttagatgatatatgaatattattattttatcatttatatatttgaatataaataaaaatttgcccgctacttaaaaatagttggcctgctgttatgaattgaattgcgacttaaactcattgctgcaacatccaatcttgatcttatttttgttataattattgagcattaaataacagctgtaaagatattcctaagacttataggatattcaaataaaccgacaaaaattacttcgaaactactttaatattagtaaatgttagaaatgatctttatgaacattactccatgttaagggtatatggttgttagcatagttagtgacagttataaccgttagtttgttatcatgaatctgttacagttagttatccttgctgtaactaattctctttctcttctagcttgtaatcagtcactatataaatcatgtacgatcattgcctattgaataagattgctctttgtttcaacaatcttcctttgttctcctttcaacttttctttctctttctttttgtctttacctctgttcttcttcttgctctattttcttattctgagtttgatcatggccaagagattcaacatggtattagatccttttcctccactgtctgcaaacatggcgagcacaagagtcggtaacaatggcaatcagactaattccaacaccagcagacagcagaaccaacaaaatggagcctctattttcaatcgatcgagaaacaattcagatgaacccaatcctgtgtacttcaatcataacatgtccattagattaaatgatcacaattttcttttgtggaaacaacatgtgcttgctgtaattcgtggaaatagactgatcaagtacattcaagattgagctccaccgcctcaattcttgagtgatgcagatcaagcttccaacacatttaatccagaatttctagattgggaggttcagcatcaattaatggtgtcttggttgctatcatcatgactgaaagtctccttacacgcatggttgggtgtcatacaacacgatagatctggcatgctcttgaaaaacacttcacctagcaagtttcctccaacatcttggagtttcgaacgaagttgcagaagcttcgtaaaggatcaatgtccctaaatgactatcttctaaaagttaaacagtatgtcgatcttcttgtgtctgttggagaagttttgagtgccagagatcacattgctacaatcttcaaaggctcacccagtgagtatgacacttttattatctcctctaacactcgaatagaagaatactctgttgcagaaattgaagctctcttgcttgctttcgagtctcgaatagagaagactgatcctgatcaagactctaatctcaatgtcaatcttgccatgattgactctgatcaagtctctaaagctaacgttgcctaccagaactatcctaatcaaaataacagattccccagctataatcgaactccttcccctttatccacacctcgtggaggtggccgtggattcatgaatcgtggagcttcaacaggctgcaactatggattgtatcctggtactaatggcagtggtggtactggttctaatagaggaggaggcagattccccacatcatccaatcgtgtccagtgtcagctttgccacaagcttggacacactgtgattgactacttttacaggtttgataaaagctttacaggggtttttcaaggctctaatcgcccatcactcaagccaatcttgcacaaacttctagtttaggttctagaaatattgtcataactgacactctcatttccccaactactggtgcatcatctattctgttgctcccattgaaaatcaacatgctgttgctactcaaactcccatgatcaactctcataatatgaaaactcgtgaaaagttaggcattcaaaaaccaaaaggtttacacggccttcaaaattccaaagacagtgaatgatgcattagaaattgagcagtgtaatcaagctacgtctgatgaaatgcttgctttaattcgaaatgctacttacacattggttcctttacctcctggtagagaacctataggttgcaaatgggtgtttcgacacaaagaaaactcagatggcactcacaacaagttcaaagcacgtcttgttgcaaaaggctttcatcaacagccagggcttgactttacaaagacgtttagtcctgttgtcaaaccagtcaccattcgcattgttatcactttagcattgtctcatggctggtgcattaaacaacttgatgtcaacaacgcgtttttaaacggtgatcttaaagaagaagtgtacatggtacaacctcctagctttgaagtaccatcatcacctccttttgtgtgtaaacttcacaaagcattatatgggctcaagcaggctcctagagcctggttcgataacttgcaacactgtctactgcaattggggttctttccttccaagtctaatcattctctattcatccaacatacttctgttgggaatattttaccaggatctagatttgctaacaagtatgttgaattaacatnnnnnnnnnnaattctctaaaacaatgaaataaatac

SEQ ID NO: 118238 - DNA, 2029 bp, Cannabis sativa
attctcaattttttatttatttattagtaaatttaataaattaaattaaaaaaaaaaaaaaaaaaaaaaattgaacaaaccccaaatttttttttttttttttttttgagagagaacaaacctctattaacactctatattaaaacagtaatagcagctgtatttaataaataataaccaacctctttttacatatacatatataatttttgaaagattttttttatataacacccaatatatattaatgcagtatgtatatattctcactcttttcaaaaatatagagaaagcaatgcttccaattaattatataaactctattagttatttatttaatattattatttatatctttttttagaagcttcattctttattatctatttttttattcgtattaatttattatttattttaagaaaataattaatagaaatgtcatgtaataaaactaataataataataataataataatactaagcttttttctgtattttaacacctataaaataattcaacatactatttttcctatcttcaaatttattgttttttaatcatcccacttaatcaattttttattttttttgttggaatcacatgtcatttttccaatttatcaattaggttcgatgatttagaaaaaaaatttaaaaaaaattaaaaaatatgtataaagctaattaacatcaatattaattgtagaattcaaaagtttataaaaaaaaatgattgatgtgtgaataaagaggtatcatgtagatggtagttattaagttcactaagaataattcatttctttagttaatgtagaaacatgaaaggattaaaaaaatatagaaatatctacggtggagatattggttttgtgattatggtagagataattttttagtcataaaattgagaaattatatagtaatagtgaaacttagctagtgtatttttacaccttttttttgtttttatactgtcttcttcttctttcttttttctagaaaactaaattcaataattattttattttatttttttaatagatttcattttactttttagtacacttaattaataattttttactttttaattttttagtatgttactgtcaaaaaatatttattttagtaaatttgttgaggattaactttttctaaagattattttatctttttcagatttattttctttataaaatttaataagtataataattcataataaaatataaattaatatgtatacattaacatatatttaaataagcatataatcaaataattcatattaaaataaatgagtaatttgcccattagtttgtcgcactaaagtgtactaaaaataataattatatactagtttatccaagcttgtgaacaatgggagctatcttgagggttgggtctgagaattaaggagaaagatcttaagggttggatttgtacatttgagaggaagaagaagcttttagtgaggttgtgtctttgtattaaatgagaaagaagatgatgtaatgaagaaagagaagaaaaagttatttttttttattttttatttttgtaatgcgttaaaaaaattattaattttttattatctttagttttttttataattaaagtcatatgtctaaattttttgatatattagggggattttgttgtaaatattaataatttgaatgcaaaaaaaagttaattgctaaaagaaccttatttaataactaattgtaaaaattaattagtaattataattaaattaaatttaactttttaaaaaattaatgttaattggtattttataaggaaataaaatataatagtaaataaatggtagtttcaggttataggtaatatattaattttttttattaattctttaattaatcatattcattcaatagtaatccagttgtcaaaattagtgtaaccatcatagttacatatttaatgtaaccattgaatagtcacccatattataacatatattaccacattttaatctacatattattatattaaataata

SEQ ID NO: 118239 - DNA, 2657 bp, Cannabis sativa
cctttctcttgttcaatcaagatgttctaaccaaccgtaagaccagtataagaacaaatatataaacactagaacctagatgaacaactaggttctcacaaaaagacccctctctcaacaaataagaaaatgcaaaaatgaaaactagaagagataatttgaatggttgctctctaggatctatttatagatcatagaaatcctagagatagccacaaagtcgaatctatagctgtacaaaacttttctaaagaaaatcctgatttgcagcattagagacaggttctgctgcagaaaaccagaccagaaaaggaaacttaccaaaaacgtgtctgatcatgtatttggtcttgatacctgccaaaaacagtgtgtttgatttggtcttatcaagacacaatcgaacttaataagaaaaataagaatagtcaaagtttccataaagaacaaactttctataagagaatttcttctcttacaagaagtttccaaacaaagaaaaggtcttctgaaatagaatctttcctatgatagaaaataacaataaaaacaactaaataaggtgagaaaatcggttttataaaagccaacaaatcacaccataaataaaaaatattttagcatttaaattgccaaaaaaaagactttacatccattttaaccaatatgagaattctattctttttatatgtttatttatcgttttatgaatttcatattttaggatattagattacaatatatataatcaaacatatttactagtgaattaagatcctggtaaaataaattccaacacatcatacaaacctccaatttcaatcataatccaattggtcaacctccaaatctttgtataaaatctcgcacattttctctaaggttgtgtcaattttaaccattaatggcatactatttatttgcttttaaaaatccaattgaaacccttaacacccaagacattatcataaagtacaagcacaaatacaattaaacatgtagtttaatacaaaacataagatagttaagaaagttatctatggaaaacttgtaatttaatacaaaacatatggaaaactatcaagaaacaatcgaagaacaatagtaaaactatcgagaaattgtacaacacattatttccagcacaacatcgagaaataatcgaacattatcgaaaaaatatcaaaaactatttagataattgaacaatcgtgaaaccatcaataaactatcgaaattggtcatccttgaccttcaaagactacattgggggaccatcgaaaaataatggagaacatatcgaaaatatgacgaagcaacagaaaaatttagaaaaccagatttatcgagtttaaagataaaacatacaaaaacaaccaacaacatacagatacagatctaatgtaaacaaatcatttacttctaaaatataataccaatcataatttttttatagaaaaataaagacttacccattacattgggtggcacggtccaaccttcgatagtggttttggttgtgggacgatgccgaccttgcgatggttgattgacgacagcaacggtccggggatggtgatggtgttatttggtgttggtttagtttggttaaggagaaacaaaagagtgaacctgtcgagagagaagagaaagtgagaaagagttagtagggggattgattatgagaagagtgaaaataagtataaagggaaaacataagtatagattggtatagtgttatacaagggttgttattgggtagtctttcaagcctaataaataaaatttcaccatacatattaaatggacgatgattcagagtgataatgataggtgtgattgcatggcttaattaataatctctcaatagttaatacttatgttatgggtgactcactaattgacttgtatagtgtttttgccatccttttaataaatattttggtcccctttcaatatatatatatatataattatatgtatatttatatatatatagtcttattatatgatctaaaatcaccatcaaccaaaaaaaaataataattatataattaggtgggggtaagaatatcaatttaatgctagtgtaatgttttttttaataactttatttaatgttcaaccgtttaatattaatgagaccttacttattttatactacaatatatcaaattaattttaaaataactaattagttacgatatttatcatctatatattattatatttcgtcagtgtaacaattagcttgtcataaaagaaaaatcacttagaaatttttttatttataaaaaatagaaaaattaatattataagttttattgattatttaataagtgttaaaaacatattctatatagttaaaatatatataaaaaaaaatgaatttatattttataggaacatcaattttatactgcaatgttacagtaagtttaaaattatcaattattaacactattcatcatatccaatatattattatatttcaataagttataattgaggctaactcaagttgtcataggaggatgcgtgtgtgttaaaggtcctggctcgagtcccaaattatgtaatgtaatatataaacgcttaaataaaaaaaaatagggaaattatcacatatactattttttttaacttttttttaattt

SEQ ID NO: 118240 - DNA, 2079 bp, Cannabis sativa
gctcaaggtcttatttttaccattttagaaaatacatagtccattttgtcatttaacaaaatacagtgtccaatctgtaagttttgcaaaacacagggttatttaccctaaaaaaaattcctacttttacttatagtggatgatatataattaattttaggtgtgtacaaatgatacttatatactactctgaactcaaatatatatatatatataagagatacgatacactgacataacattttaaaatctctaaataacaatattagttaaaaataacctatctatctatctatctatatgtatatataaagctaaagtatgaggcggtgacagactctgttattatcagtatagacttcattattgtcttaaacataacacatatataaagcctagatcttaaatcgttgagtcaggttggtttgattttacatctaacttcttatattttttttgaagagatttacatgaataattaataatattaaaatttgatacaattttattacttagttattatcaaataaaatacataatttatttcacatatataatttttaattttttaaaaaaaatttactagtttaataatgataacagtgaccataaatagagtattgagtcaattaatcttagattaagaataaaaattaattataattaatatacttattaattatgattttacaaaatatatttataataatctttgcctatatataagctccaattacttaagtataggttaaaaaatgaaaaaagaacaattaaaaaaaatgtaagtaaagagatcttataataataacagagcttgattaatttaacatggattcggtcccttcatttagtttctatgtagaggttgaattccctttctttggctcgtgaagtttttggtcaaagatacgatcagacattgagagctaagcccgacaagattgctggtccacgtttaaatagagagagagagagggtcgcacgaagaatctagttcagtcgcactactctcttttattatgagtttttaatctcaataattcacattaagcatctattttgttaggacatatatacataaatagttttttatgtgcatgtgaataaaatctgaagagctatacatgagaatatattgacttaaacaatgtacctacttagatcaaatcatgttcttcaacattttatacaatatgttaaataatttcccatatactgtagttttcttttaatttgtacaatccattgtttaattatttatcttcccactacttgacaattgggctttaaaagcagtttttaaaagttttcacgtcgattttagtaaaatttgctaccgacgttgttccagccaatgttttcaaggaaaatattaattgacgctgtaaaataaccctataccgtcagttattgtaactcaatgcaatcggttattatgaaataaccgacaacataagggggagaattgaactttcatattagaataatgtttctatggcgtcgattatttttaaataatcgacgctgaagagtttaataacgtcaatttttataaataattgacgcggtaggatgttcagatttttaaatatttttgttttatttaaattaaatatttttaattatttttaacatatttttcttttattttttattagttaatttatttaaattaaatattaatttcatataattaaaaattaaattattcatataactaaatgtatatacatatatatatatatacattattctaaaaaaaactatcacacaaatattttaaaattaatcaaagtatttacaagttattatttaactaaacatagaaaaataaagggaaaaaagcttataagttatctaatgaaacatagagaaatatgagaaaaaattcttatacaattcaacattattgcaagtcttcgtgaatgcaaataatttttctatccactgtcatgtcgatgtaacagtaacaatttactttttgcatcatatgtcttcttatcctccaactgtaaaaaatatatatatatatatatatatttttattagtatatattagaatgtttttttttttttttt

SEQ ID NO: 118241 - DNA, 2465 bp, Cannabis sativa
gcttattctctctatcacatgagatttgctaactccattctcatattataatcttaagagagctacttcaggttccacaacacttatgatctgtgtagtattatctctggtatcaatacaaccaaaagaggagtaagtcattacccactaactaagggggccgaacctctataaatctcatgtcttatttatttttatgttcttattgtgtaaccgtgacaaacattagtaataaatacgactacgtcgttagttggccaaattcgaagtcaataatttagtgttttcattgagagcgagttgttaatttatctgataaaacaccatggttaacataaagagaactctgactacaacttttgcctcatcggggtcttcctcaagaccttgtggtgggctgatcctgatgtccgtgttccagccacaactgggatctccacgaactcaacggatgtggccaaccctaccatcttggtaggcatcacaaacttggccaccacgattggtcaggtggacactaccaatccgattggccttaatgaccaacctttgccactgagggaagaccctccactggcgttgaacccaacgaatgtagccaatcctaccatcttgacaggcaccacaaatctaaccaccacgactagtcaggtggacactatcaactcagttgatcttaatgaccaacctctacagccgagggaggaccctccattggcgcctcgtactgaaggaatgaccaacgtggagcaacccccgagcactatgacgggatctagtccccggtattatgctagtgagacagagcgaggaattggcaagccagcgattggcgagccccacgtagacttgggagaagatctcgagctagctagacttaaagaggccgtctgtcaagtcggccaaactgaagaaccacacgctgttggctgcgatgtattcgcacaacagagacgtaaatttttgagatggatgatgaccaagagtacatcctcctatctcaccaggcagagttggaccgccgtaataaagaagttggcgactttataagataatttaattagagaactgctggaagaggtcaggatctcattagagattctctctaagggagattaatcgaaagatcaaggatggtctacaaacaaacagtccaaccaggttctttagaaccaagaaaagccttccttagcccgaaggaggaaaagtcttgccacgaagatttggtggcgagaacagccagactctggtaaccagcagcctggggggccggctagggattactggcacaataatacccatgtttggccaacctatggccgaccaacagggtgaattcctgtctggaggatccgagagtgagtaatgcaaagcctattctttaactggctaagcctcagaatgggtagaaacacctaagacaacaacttgagaagttagaccaatcacttcagatacttggatccacctaactctagcaattggtgtgatctaccccctgtcaacgcacaagctgcaccagccagtcaaggaagaatgggcggccaggccctaccgagcatagggctggccggccaaagccagctgccaggcatagggtggctggccttaagcataccttctcccagggtatggtaggcataccttctcccgccccttaaaatcctgggtttttcaacccaggtgccgcagctcgctttgggtgtgctgcggcccgccttgaggtttctggacagtttgagttttgaatcttatttcatgcataactttttgatcgaaactccaatttgggtattccatatatcgttggaaagctcgttccaagctctatatatttattgtattttgaatgcaaattatataattatgttgaagtggatttagggattaaccctatttgtgaatcctagaaattgtgactaggattaccggcacttgattagaagcacccggggatttagaatccccacatactcggtacatcatgtaagacagtggttagcacatagagttaatcacagtggcgctaatgtttaatatcatagttatgattaaatgagaaccgggattagggttcttaccctaaagtgagaggttatatggcctaggattattaccgtagtgattaatgattttagatattatcccatgatatatattgagtaaagaattatgaatttaaggtataattaggttaaactcggtaattagaactgagataaactgttctaaggccttaatgtaattagacgtgtgagcgtaacacgtgggtctatgccacatagacataaataggcgtgtgagcgtaacacgcaggtctatgtcaaatagacaatggcattaatatatgtgtaaagaccgcttagtttaatttagaaattagcagatatttaaggtttgattatgaaaattatttatagatattcaaataattatttatgttgttatttttgaattctgaatgc

SEQ ID NO: 118242 - DNA, 1160 bp, Cannabis sativa
aaaaataataatttataattaattttattgtgaataaacttatttgttttaatggtagcttgattgcttgtgccatactagatcatttaattgaagaaactgttaagactttcttttagattggtggattataattatactctatgagcattatctctctttttttttttgggacggaatttacgagtattatctctttgtattggattttgtgcagttgacttattattaaaaggccacatgagtacctttttaacatttttctcttctattacctttcaaaagagaaatcaatttttaatttatttagcctaaataattaatccgcacttaccataatttactataatattttttctgaaaaaaaaaagtttatgcattaataaaatcgttataaaaaaaagggcaaaattagaataataatggagtgtgcagaacacagatcatttacattaaaatgatcaaattgaagttattaaacaacataatgacaaatcaaggaaaggtcgtaaacaacaacacattcatatgtgctgatctgatccactttaatggactgtactgcgccaacgcaacacatcttttgtcatattgtttttacactgatgtatttcatatcactagaaagagagaatggtatttattaatgatttcatttttgtaaattaaaacaaataaattaattgggtacgtagtgtgatggttgttttagtggttggttatttctaatcaggtagagaaacctacctttctgtcatggcaggaaagggtctatacatgagacactacttaagtagcaggaaactatcgatttgtgtcccgcttattgctaaagatccttatctatcaatatgtattaattaggctacccaagaacatgaaccatgatatgtcaaaacctacacttatctatatatatagtactgtcaggaaaccattatataaatacaaaaactaatgggcactcttaagttgtccgacaccataagaagtggtctactatgtataatttaatatcgggtttcacatatttttatttgataaataatataaaaaaccgttaacaattcataatgcactatacgttaatataagggtaaatagcggtataagtacccaaagttttaagtttataagcggcataaatctaatgtttattt

SEQ ID NO: 118243 - DNA, 2784 bp, Cannabis sativa
  modified_base (541)..(547): a, c, t, g, unknown or other
  modified_base (1365)..(1369): a, c, t, g, unknown or other
  modified_base (1610)..(1610): a, c, t, g, unknown or other
  modified_base (2193)..(2198): a, c, t, g, unknown or other
  modified_base (2261)..(2267): a, c, t, g, unknown or other
gagagagagagagagagaagaatacttgaatggaaatagtgtgaattgtgatattgaactcaaccttaaaaaaaagatagagaaaaagaaagaatgggaaagaaatatggcatttctgaaagtttaggtttctgaatgaaagagagagagagagaaaaataattaattagaggaggtaagaataaattagcaatctatttaaataataattattatttaatttaataatattattaaaaaaaaaataattttatgaataatctagtacattctacatattaactatttatatacactcatcaatttattaccattagattaaatatctatggttataaaaatatgcctattataagaacaaaactaaggtgcaccataaacatgtcttatatatataaagagtgttactgtaaatctcttattacaattttttagtcaacttccatacttgaaaatacatactggaatatttttttaaattttttttttcacggcagtgtttgttatacttacaacatcattcctataaatttttaaaaannnnnnnatagtttacagtgctgaaaatacgtttgaaattttttgaacgcgggtggtaaattgaaatatcaagaattctattttcagcattgtaaactattcagaatttttgaaacatttataaagatgatactgtaactataacgaataccgctatgaaaaaaaaatatttcgacataattttttagtcaacctctatgtctgaaattatctatatatatataattagcactcatcatatatatatatatatattagattaaaactacgtggaaaatacaaataatttattttattttagttcttatatataatttggttttgaatgatataacaaacaatcatatataatttaatttattttttctaatttgattgaattttttactataaagtaattaagtttagaaagattaacattatttattagaatatgtaaaatattaagacactagttattataaaaataatatagaatatagaataaataaaaaaaaataagagaagagagaaaataaagagaaaaacataataagagagtgaatgagatctttctcagttatttattctaatacggtaaacttatatttattaaaaaatatgactaaaagaatgaaaaactaaatctatgtaataaagaaaaatacaatcaaacattaatggttacaattaacttagtgatttagatatctatatataatatttcataacactctcccttgcatgttataataactaaaatattaaattattattttttattatgctagtctaaatatgacgtggaaatattagattgcaaagaatatattattattattattnnnnntattattattattatatttgatcttgttagaaatcgataagagattgtattagttttaaaatagaagcttaaaagtattagtaaattaaaagcccaacataaaatatagtgagaatttgagttaaagtaaataggaaacttataaaaatattggaatttgagttaacttttataaaaatactgtcacacaaaagttttcaaaattactttgtttctataaaataccagtagaacacaaaanaatacaactcaaaacaacagtagaacaattaaaaaataccagtagaacactagtaaaaacttaacacagtatactgcagtataaaacttataaaaaaacacagtaaaaaagtaaaaaataccgcctaacattatttttataaaaaaatggcaaaaattaatataccatctaaattttctaagtaaatagatatatgagtataaatggtatatatagtataatgtcttgggccatgcaaattcggccaagacattgatggacaagcccatgcattataagtattattatcatttaattaagtgataatgaatgatatatggcataattgtatcattttatggtgaaagtaaaaattatagtggtggatgtggtgtaaggtgactaagtggaatgaatgcaattttttttagaataattacataagacactattttttgtaaaatatttatatttttatgtctaaagaatgttttttttttttttacatttttacggctttccaaaaaataacacgaaaaccacataaaatcaacaagaaaattacataaaagtaacatcaaaataacatcaaaataacaacaannnnnnacatacatataacaaaaaatcaacaacaaattaacaaaattacaacataaaaagaccgtattnnnnnnnaataaaataaaaaaatcgtaaaaatatttaaaattccgtaaaaccgtattttttgtaattattttgttatttttatgtttttgtgaaataatctcttctttttttatatattaattaggttaatgtttatagacatggacatgcatgtggcagtgagcggggtaaatgatgggatagaaaggagagattctagctgagaagtcactacgtggatgtctatgagagataggctcatattatgaaagagtattattattggataccagtgttagagatattattgcaatggaagaaaatcaagatattacaactctattgcaatataatacaaaggaccaaacaatgcatagtatacaatatatatatacactatatatattatatataaaaaaaggtagaagaagatatatatatatatgtacacacttactcataggcggacccacattgtagcgagggggggcagtcgccccccctgaaaaaaaaaatcgagaaaaaaatgtatatgtattttaat

SEQ ID NO: 118244 - DNA, 1351 bp, Cannabis sativa
accaataaaatttaatgtaagcccaaataaaaatctaacaagtgagaccttggaggcttgtgtgtactcgctgaggaccatataactgagagtggctagggcacactccatttgttttattaagtgtcattaatgtcgcagttattattatttattaattattatgtaagtccaaactaagtttaaatatgaaatattttatgtttataaataaaaaggacataacagtttttccgcattttaacgcttgtaagtaaatattactattctttttatttaaaattgaattatttattattaaaaatttatatgataataaaatttttacaataaaaacaaaacaataaaatttttacaataaaaacaaaacaataaaatttttaaataataagcaaatatgtatgtacgtgttattacaataattcaatccaatctgttgtagtaattttgtctatgcccaatttgtggttataatgcttagatgacttcccatgtccttatttggtctagctcctagttgtattgagttgaaaaaagttggccattgatgatagatgtgagcatttaagaaggatcaaatagtgtgcacgtgtatagtttaatattttcacatttctcattaaatcgagtttgtaaaagcgaaagccaattattaacaatatctcttgattctttattttcggagtctaattctttgggatctttttttttattctacatccgtacgtaagcattcaatttaaaatttagtcatatctatcttaatttccttaaaaaagttaatatcaacttacgtagggatcatataaacataacttaaaagattttcttcttttcttataaggaagaggttgcaatttggattcttcctctctaatatctaaataaattattgtaagagtagagtttgtgtacataaataatgtgcataaatatggaaaatatataacttgtgttcactccagaaatttgatttggaaatctgattatcagtttcgttaggtgggttatagttttgtataaaataaaaaaagaaaattgatagtagaagggggatacgtatggggcagttggactttattagcttgataataacggcacagctaagcttattaaattcggcgcaactgccactgtcccattttgttgagtattttatgggtacttggtgtaaaatttaccttaaatttgactcaaaaaataatttaatgttacattttattattgtgctttaatatattaaggataaaattaatttttcttttaatgaaaaagtcaataaattttttaaatttttggataattttttagtaaatgtattaaaaacgattttatgtaaaattattttttt

SEQ ID NO: 118245 - DNA, 1765 bp, Cannabis sativa
actcctatccatcaccctttggatgtcaatttcatgatagaattgaaaaatatacttgttacctcctaactccttcacatacatgcccataccaggcttccaaagcacaaccataaggttctgcattgccatgaaatcaattggcgtatccgtcaagaaacgtcccacaatactccattgagtatcaacctccgcttcggcaataaggggcccctcataactgactgcatgctcttcctcctccttcagagggataatcgacacacgctccaaattaaggtccaccggagaagacgatgaagccatggccgaaaaaacaaacacgaacccaaaaaatgacccagaaacgtgctactgcgttgactgccacgacgagggagcactcttctgcgttgactgcaaccaacaaaacaaatagtttttgactgccacaaccctggactgatcacacaccaacaaaacactgacaaccttggacagtaagacacgaagacaaccgaactattaatctgactaccacaacctaggactgatcgtagaccaacgaacactgacaaactcgaagacaactggaccccatgaagacaatctccaactgggaaaaataaccacgaaagaagaaaacaaccctggagatcaaacggcaaaacctagtcgcacaccacatcccagtcacaccccaggaaagccaaaaccagagaccaaacggcaggccagtcgcaccctagcaactaccgcaccccaggaagacagtcgcaccctggaataaataacgacagaaccaaaaccctagactctcaaactagaagcaaactcaacccagaaaaacaagaaacgaacacaaataaaaaacaatcacaccatgtcacaacagacaaaacttgcagttggtggacatcattgattggcgacgccgaccgacgagttgaggccgagaaaatgagagaaacatgacgctgattcgctcctgtagggttttcacgagagaacattcaagacttttctatcttttcttttctagtaagaaaatactttatagtatgcgtatataatatgatacaaattaaaaaatataaaaaaacagtgactgctaccaaatatatttgatagtataagaatcaaaagcatttccctaaaaaaattagaaaaaatatacttcttttgattattataattattattattgtttgagttattaaaaagataattggaatatgctttatctttatttcaaggacattgcaatattggccttatcttttaaataaaaagttttttttttctttattttctttttctctttctttattgtctttatggttgtgaatcctttttttttttatgccaatcaaatataccttacgtggtaatagagctacctttaatgaaatacacaactgatattttatatatcatatattttacttaacgatccaaaaaaacaaagtagtacactaagcataattcgtcttttgtaaattgatttaccaaagcccttacctaaagatattttgtcgcattgaaaaaatatttggagttaaaccaacaacagtagctcataatgttttttaacttaccgaatgtaaatatcaaattttgaaatacttaccaaacgtagctcataatcatggtttattctacgatatataagatatagctccaaccgttttatactttttagagtgaatggaaattatgtagggtttttttcataaatatacaacaaaaataaaataattataaaaaatgtgcaaaaaaaaattat

SEQ ID NO: 118246 - DNA, 941 bp, Cannabis sativa
ccccccccaatccccctgcatgaagggatcatgttctattaataggatagatccgggtatgagtgaacccaaactcggtattatttagaggtgttaactaggcccactgatggggtaaaatacaatatacattgacttttaggccaattaggtgaggcctaatcatgagataattgtcatctgtacggctcgggaacgattatgttgccacgtgttgcaagctactatgtgggtactgagaatgttatagaacatggtgttgtacaaaaaagtggttgccttatggtggttcacgcactccctaggcctgacgtaggggacaatcccctgacatggtggaactccgtgtctggagagcgccccttaggatgatctcctgaggcttctgtctcatcaattgcccgtatctggattaccccatgagggtatctgaatacacctgaatgtgcccttcgccttctgaacaaagtagcttttataggaccaaagtggtctggccttgtcatgtctgtaagtttggtttaccttcagatttgtagtcgttgcttgactccataggtgactcattgacttgatttgatttcggaatgggcatgctttgacaaatattgggctttgaaaaatgcacatatcattaatatgaaaacacggataatatataacacaagataatatttttttttaattttttatgtattaaattatatatttttattgtattaaatttataatcgtaataattattatgatataaaattttatgtaaactaatatttaataattttttttttgaataaaaatgtaaacttcattactttaaatcatccaaaatcaaagaataaattacaaaaggtaaagtaaaactattaaacgtacgatcaacctcaagaagagaggatcgcgccaaacaatgcgctaccctattagcagatcgcttcaca

SEQ ID NO: 118247 - DNA, 2797 bp, Cannabis sativa
ttgatatttagcaagatataatcttttgttcgaaatctttgagagataattcttgatcttgggaggtgtgtaataaatgggaaacttttcatggcttccgaatattcgcaaattacttcttccaaatacagagtttaatatcgttaggatataaaccatgctagatgggatcccacctggacgagtcgttcattcttcatccggaaggattggctgtcttcagaccttgcccagttactccgtttgggcctaaagtatttgtcatggaaattccacgtctccccttctagaaacacagattacagttagtaaacaatttaagagaatgaaaaaaacatgaaaaataaaataatgagataaaaaattaaaagaaggatacattatagaaaaaatgctattaagaatttttgtcccctaaaccatgacctatgtatttttagtcctctgaatttttcaatcccataaaaatggtcgccaaactattcacaatgtttgaaatttgtcattctatcaggttttttctcacgttgcaagcaaaatattgatatggttgtttagacaattgtcacgtaagcaccatgtcagcgccacataatttaaaactttttaatttagttttacatgattttttttaatcattaattgatttttattttaatggtctcttaaagatacaaattttagtttttaaaatttttaactatatacatagcgctgacataacaattatctaaacaatcacatcattattttgttttctaaacaaaacttaacaaaaggaccactttataacattgtgaatagtttggagactaattttaattgaccggaaaataaatggcataatgatacataggtcaacattgtgaatagtttggagactaattttaattgacgggaaaatagatggcataataatacataggtcatagtttgggggacaaatcttaattaaattgtcaaaaaaaaaaaaaattgtgctaaatttatggaataaaagaaaagaagtatttttcaatttttattaagtaaaacagtttatatttatttatccaaaaaaatagtttatatttattataaaagaaattaaaaaaataattcatactggtacataatatctattatagaagaaaaaagttactatattttaataaatttaattatctaaaatcaacaaacaaacaagtaaatataattatacattttaattatcttagaaaaaacataatttaatagttttaaaaaataaacaaaatcactcattttaattacgattaataaaaactaaatgaaagtataattattactatctttaacataatttagaaaattacaaatatcactcagttttttttaaaaaaaaagtgtaaaagagattcttctcgctcttctaaaaagtaacacaagcatccataaagaagttaagctgattatattaggaagctaaggactttttaaacttctacaaacaagttgcaaaatcggtttgtaccaggtcaaattacagcttcaatgtcatacatggaacctcctagtagcaggaagctagaaggtcaatgttaatggagagcagtgtctaccaggaaagagagatcaagtttgggagctttggttcgaaactctataggagaggtcatagcagtatttgcgaagagttgcccaaggatgatgtctctgaaaactgcagaggcttcgactttgttacatgcactaacttggtgcaaggatcatcgaattgaagtgcaccaagtaaaagttaattgtttgaacttagttcgagatattcaagttaatgtcacagtcctatttgagtggtgcgattgtggatttcgtgcatgaggtgttatcttctttttccattgtttttctgtcccacgttcattttttctaatttaaccgtttatatactaaacaatgcataatctgagactcgaaccgaggacttacaatacacacatctttctatggccacttgagggtgatttcctatcccacgtccataggtcaggaatacagccgctcataacattgctcaattcttagtcggataagataacacttgaatttagaatggaaatgatctctccccttgtaattttgttcaagggtctcttctccctaaaataaacacaagcatccataaatggtcaaaaatcttttttcgtataacgaaggaaagaaaaggtcaaaatcatgtataagcatttaattattttttattttttggtgagaagtaaaagcctttcaattgtttgatcaatttggtagcgggataagtgtgttcccaatgccaatcggcctcacgcccgcacgcgtttggtcttcttacacaaacgacgactgaagcaagaaaaaaaaaaaacaatgactgctgtacagtcatatttgatttttgaaagagcttgttattcagatttacaaacactcctttaatttctcatattttcattttcacacgtaatttaaaacatattgtgacaatttagtcctttcattgcacaatatgagaattgtaagaataatacaaaaacaataaagaaaaaaccgttgaatgtggctgagactaatgaaatgtgttagatacaccgtgtaaatcctatgctaagaataaatttacttttgtattgtcattttcaaatatttacaacttaggtgttgtttgttactatataatgtaattgaataaaaattataattgaaatactaattaagtgcggatcttaagttgaaatgggtcataagcaaaaaaaaaaaaaattgtttagccccttattataaagataaatagtatttttaa

SEQ ID NO: 118248 - DNA, 980 bp, Cannabis sativa
  modified_base (65)..(67): a, c, t, g, unknown or other
agcaaatatttttgaattgtacattgcttgatctacgtgtccttgtttggttggtccacgtatannnggcaaaatcaggggcaacagtaacatatttagattataatttgacatattattagaataaaattttaacaaaataaactatattttacatttctatcagtcatttgtatttctattccaaatgctctaactaattacttaccattaatatgcttcataaggattttattggttattgtcctacaataatgttttaaccaaaagcataattttgcgcatattagtttgcccaaattgggtactgtgacttatgtaaaaagaaaaaaaattgggtactgtgactttttttgttaacaattatgttttcgtttgtgcttggagtgcatgtaaattcatttgattaaggcaattatttcaaatattgtatttattttaatctttagcgttcgtttgaaagtttagtgattacgaacattattcatagaattataaataaataataaaataataataagagtttttttttttttttgacataaataataagagtatttaattagatgaggtttgagcggttcttatcgaaagccataatactttcgtaattatatattatttcaaaaacactatttgaaacgaaaaggaaaaaccaaatcaaaccctacactctttcaaaaaaaaaaaaaaaaatcaaacctacacagttcggtaattccgttttcagaatttggcgaataggcatggcattataaatgagtttgaccaaattttggcattattttgtgaaataaaattgcatgttaacctttaatttgttattagttcttaactaatggttgtgacattcattttaacatcaggatgcgtttgaaagtaattatattttaaaatgcaaggtgtgtttggatatgaggtggtaattacatatgaattcctaatattttgtttagcaaaatagttagtaattacgtagg

SEQ ID NO: 118249 - DNA, 2575 bp, Cannabis sativa
ctctctctctctctccttctctctgtatgaaaaagaaaaaaaaatcattttcttctgcaagactgatgcctaaagcaccaccactctccgtagtttacaatttttttgacgagctgattgttgctcgagcgtccacatcgatcttcttcagtgggtaggtcttcaaatctcacttttttattattttcttgaatctaccattgatgactttaagctttttcaaggttgttaaattttttaattctcacgttgtagtttagtctttttttcctttgtaatcgacttgataactttaggacgtataatgtatgactttctgataaaaaagatagagtcttgaactccactttgattcttgactctttgagtctcgaagatcataaagaacactatttaaattttagaaaagtaggattttgatttgtttgagcttctggctggcatatagggtctatttgtgaccttggccggttcacggtctttacccgtgactctggccggtacatgactttggacagaaaacctagtcggtacacagttttgaatcacaacttttatcagtacttggttcctcataagaactttgttatgttttcagagcccatccctatccagtacttggttcctacaggaactctatatagaatgtcataggtagaacctatctcagccaattagtggcctaattggtagtacctcatggatttggctaggtaatagtttggatatcactctataggaaaagttacacaaagagataggcctaaagccatcaaattagatgcacctttctcttttgagataagaacaataaaggcccaattgagggaatcggaaaactcccttgaggtgaagaattggacagcagtacctaccacctcactttccatgatctcctaatgagcacggtaaaattgacatggcataccaccaagtattggcgctttaagttgtcctatagaccacacaactcttctaatttcctttcaagacaataagaatgagtctatcattcatactctcataaaacagacagcattatcaactcttttagctcccagtaaaactcgacctaaataattgaaatacatgtttgaacaaatttgaaaaatagtcaccaacctcgtagtgaccagaaattcaattctctctatctttagatacaattcctataaagttcttctttctctgagtgatagtagaagaatgtaaaaaatgagtccccatctcacaaccatgtttctcgggattttttacgtcaaatagtacattttctagagaatgcctcttccatctcaagaagagtatctacctctaattgaacattctttaggaagggaggtctcttttgaacatcaaggaggaatttatcaagaagcggcaacttttctttgcaaaatccaaaatgggtttcgttccaatggcttagcttttttctagtgtgatcaaatttcgccaccaatcaaatacttttggctcctctcacaatgatattccaagccccaaattacctccttggatgaaggatcctgagtccatgcatctaagaatctaaacggtgtatgaaatttttctttaccaaagaacaagtccaagataataggtgcatgatcaaaagacccctgcttttagaataagaaccatccacttttgggcacaaaccactctatccaacccttctttaatcaaatctatgaagacacgcctatttgactaagtaaatttttttccccacaattccaagatcaacacccataatgatgagcagaaagtcattgagaacactataggcagtctgagaaagtctagcccctccatatttctccacctatcctaaaaatgagttgagatcaccaataaggtatctaatttttagagcgcgccaccatctctagccctaattcttcccaaaaggaagctcataaactcctcatcgaagaagcatacacaaagtaactaagccaaggggggcattcaaaacattcaaaaatttggaaacaataacagaagaactagagctcaagatatcaatactaatcccagctctccaacatagacataatccccctacaaagccaatagcatccatagagacaacattaaagtagcctaattatctcttgagattacccatgtgagaagcaaaaattttagtttcaatcaagaataatacatcatgattttccattacaatcaacccccgtaaggccttcactctctaggcatttcccaagcctcgataataccaagaaagaaatttcatgagaggaaagtccaagtaaaagggaaggcaccactagactaccagagaaaaaacaaacataggcccatagtagagcgagagcaaaccacacaagaaacaaactaagataaggggaacttacagaggaacaaacaaatatacacccttagataacttgataggtccaaagagaatagagaaaaaaccctatctataaattgttagactataatatagtgtatgtaatatagcatatacaaacgatatgaaatgcggaaaaacaactgtaatcatatctataatatatgcaatgaaaggatcaatatacctcca

SEQ ID NO: 118250 - DNA, 1516 bp, Cannabis sativa
agtatttagtaaagcaagaaaacaaatacattttgtttttttaacaataatcactttcactgaaaaataattaaaggtgagcacatcatacataaacggtgaaaattatctaactaaattagtttatcattcacgctaagtacatgtataaaaatttttagcagccataaaataaggatgcatcagaaaaattagatagtaaattataaatatcgttgaataaggtatctaagttattacaaaatgagagacgcttgaagaaaataaagataagctaaacagttagatttcctagtaacgaacaggagtctcaacttcaacgaccaatccaatgctctcattattcagtgctacaactttgatttcaacctaattgtgaactaattcccataagagtccaatcttgtgttaccatcaattctcttgcgttcacttgaattattgtaaaactccctacaatatcaataaaatttataatgagttattagaaaaaaaaaaattgatttttttttataatatttaccttaaaaatattaaataaaatttaaaagaaaaaaacgtatctgatatgaatgactcaaaatgtgatgaagagatgtccattagtcaccaaacataaacaaaatatacaataacataacatagtataacgtgatataccacattactaacaatacaacaccaaagaatcactactataaatatcacatgtagctctgacaatgaggttatcacgacactctgaagggagatgaggagcaaatgggccaaaatctaaggccactcacttagctcaattttttttttcaagatttttgccttttaaactttgacatgtaccaaatcatgtcatctgaactttttagacggttaaaaatgcctctcgaactatttaaattgttagatttaaggatttttatccaacttcgctcaattttgctaacgtggagattgtccatctaccaagtcgtgccctcctaactttgatatctaccatattgtgtctcaaaacttttacatgtactaaatcatacgtcttgaactttcatccacgttagactttcgttggtaaaattagtcaaaagtctttaaatcctacaatcttaatagttctttttaacaaaaaaaaaaaaataataatctcaatagtttgaggaaattttttaacgacctgaaaaagttcgggagacataatttggtacatgtcaaagttcagaaggtaaaattttaattaacctttatacatttattttactgaaaatatacaatttctttcttaaaaaaagctcaatttataattttttattagagctctcaaaatagttgagacgcccttaacatactactgcatagacattccgacaagaatatgaagaggctacatgttgtgtctcattctctgcagcttcttattttagattttcagcaatggagaaggtgttgggcaatgttgttgttaggctaaaattagtctaagtttcgggtcgtattttcggttagttttcactctttgttt

SEQ ID NO: 118251 - DNA, 1675 bp, Cannabis sativa
attattgtttgcagaatagagtgcttgcacctgtgattattagctatagcctataggagcatgaatgtgagctttttgtttaccttcaatgtctggtcttgaatgttcgagtcaggctagcttagttattttatttctatggccatcctggtatagaaacaatacctgtcaacatacttatgttagtgatattacggaaaataatgtaatttaaacatatgaaagaatcaaactcagagagagtcaaggtgaaaagtggattattactttttgcttgagaaaggaaatgaactttatattgcataaatttgatattgttcatctgttctgtattacttgtttcctattttaataaatcgatgcttactgttactcttgatggtgcatcattttaggtaccccttacacccaacaatcctacaaagtaagtgaatcttttccatacaagtggataaataagaagtggaaagaaggtttccatgtcacatccatgacaaccgctggcaaccgatggggtttggtcatgtccaggaatgctggatattctgatcaggtaaagactagttataatcagctccctaaattgctagaaatattatttagaagttccaacatttttcccggttgttctaattgatttcgaactactaggttgtggagctcgactttctgtacccaagtgaaggtatacacagacgatgggaaaatggttacagaataacatcaatggctgccactgctgatcaagcagccttcattttgagcataccgaaacgtaaattaatggatgaaactcaagaaactctgcgtacctctgctttccctagcagccatgtcaaggtaaggaaaactttcaaactctggtaaattaacgaaacatcaatcgccttatcgtgtacctcaaaatattttctttgtgcaggaaaaatgggcgaaaaatctctacattgcatcgatttgttacggacgaacggtttgctagtcgttgtcgatcgaagaatgtaacattaagatttatagccagccaaattttgagagctattatttgggatggaagaaaaggcgaaataccacacacttgttatgaaaatataccaatgtaaaaatgaacaagagagtgggaattggcattgaaatttgaatatggagagaaagaaagagagagagagagcctttgaaccaaagctgagtttcagtcagtgacttggaaatttcaaccaaattgtgctttttaacttattattacccaaaaaaaaatgttctttttattttgttccatccaaaaaaaagaacccgttttaatcaaaaaagttatatcattccttagatttgaaaagggaaacattaaaaaatgtacccgagtgaaactattgagaaatattaaaaataatatgtgaattaatattattatgttatggtaagtgaaactgaaaatggtgcatgtggtaaaatgtatttatttttgttgagattttttttttaaaaaaaaaaatagaaatttttaataagattttctttgttttttttaatccttgagatttatagttttagtctattaaaaatgataacaattaaggtttttttttattattagtttttaataaaatgttaagttcctacgaatagttttgatattcttttaatcccatatattattttttttttttttaatttt

SEQ ID NO: 118252 - DNA, 970 bp, Cannabis sativa
ccatatccaactccaacatcattgcccactttaagcttttgctccctctcacttaaagatcccttagcccttggttgtgtttgcatattttctaacaaagttttgaatatgtgatattctgttctccaatgttccaattttttacagaaacacttgatattagtctattttgacttaccattgttattcttctcttaattcttatgctccttgcaataaccattatgtttagaagcataatcttttttattcttgaaatttcatcttcctttgttggaaatgagttgagaaacatagtgagcagattaattcttctatctttttagcttgctttcctcagctacgtactaagaagttaggtcactgacactccattgtattgtaggttgtcttggtaaggctaaaagaggtaggaagtgcatgaagaccacgataaataatgtaagaatcagaaagagaaatattatgatattttaaattggattgaacgtttataattttcagaataaaatctcacactccttttgatgcatcatctttaatggttgtcatttctaatttttaggaatagatctctttaaggaaataaaaatgtttaggaatagatctataggttgttcttcatagcaacgggactaagataatttgacttttccattgtgcatgaagatttctctaggcaacagtgctggtatcagtacgatcagtaggttgttctttttgtatgcataagatcaagtcaactacgcctagagtaaatttcacatcacgtttccatttctaatagttggagcattcagaatttgaatggaaacgtttattgtttttcataaaaaggaggctgaaaactcaaaaattaaaacatgatcaagctatatgagcaatacaattagaaaatataatagagtccactattagaatattttatttatggaaattattttctaattaaggaaatgattttctattt

SEQ ID NO: 118253 - DNA, 3887 bp, Cannabis sativa
cgaaaaaaaaaagaatcaatgtgtagattatagttttttttttttttcaagcagaagacgtaagactaagaattccatttttttcaatattagagctacttcgggatttatgttgttgacctttatggatgcatacttcggctacaatcaaataaaaatgcatgtggctaacaaggagcatactagtttctagactgacaaaagaaactattgctataaggtcatgcatttggtttgaagaatgtcggagccacatatcaacaaatggtgaacaagatgttctaaaatgtcctgggtgaaaacatggaggtttatgtcgatgacatgttggtaaagtcgaagacatttgaaagttattatcaagatctaaaagaggcctttgccatcatccgggagtacgaaatgaaattaaacttaaagaagtgcaccttcggagtttctttagggaaatttctaggttttatagtcaactcttaaagaatcaaagcgaacccggagaaaatcaaagcctttatagatatgccttcacccaggaaacataaggatgttcaaaaattgacaagaagaatagcagcacttagtggattcatttccaaatccatagacaagtgcatacccttcttcaatgtacttcgaggaaataacaagtttaagtggacactagaatgcgagacagccttccagtaactaaaagatatttagtgaaggcccttatactatccaaaccagttgacggagaaccgttgttttggtacctagcagtgtctattcatgccctaagcgccacactcgtgcgagaagaaaaaaaaagtaccacttccagtatattatgtaagcaagagactgttgggcatagagtctaaatatccaatgcttcaaaagctttcctactgcctactaattgcttcctagaagttaagactatacttttaggcccacgctattaagatactaaccaaccaccccctttgtcaagtgttacaaaaattggagtcatcagggagactcctaaaatgggtaatagaattgagtcagttcgacatacaataccaactcagaatttcaattaaaggtcaggctctagctaacttcatagtagaatgcactgggataaatgatgaccctaaaacttcgaccccggaaagagaagtttggaggatatatgttgatggatcatcaaatgagaaaggtgttggtgccaggatcatactaatatccccacaacacctccagcatcagagtgcacttcattttgaattcgaggcctccaacaacaaagatgagcacgaagccatgattgctggtttactattagcaaatgaagttggtgctaagtacatcgaactctacagtgactcacagcttatggtcaatcaggtggctggagagtactagacaaaaggagagaagatggccagttacgtagccaaaacttgagaactgttgcaacacttcaaaacattactctataaagcaaatctctagggacaagaatgcttttgttgatatgctggaaaagttaacaacatacccagaaatagaaaaatacagactcgtcctcattgcacatttgataactccaagcacggaaggactgggggtctttgccattgaccattcaacctcctggatagtaccaatagtccagtacccagaaataggtacactcctagaaaacaaagttgcctcaaggaaagtctggtaccaggcccctagatatgtaatcatggatggaaggttataccaaagagggttactgatgtcgtaccttcgatgcatagctaggaaagaaataagcattgtcatgcataaattccacgaaggattttgtggagatcacacatccggacccaacctttctaaaaagatcattcgtcaaggttacttttagcctaccatgaaaaaggattacattgaatatgtccgcatatgtgaacagtgccaacgttattcaaaagttcctagggctctgccaatagaaataaccctcatgagtagtccttggcctattggagtttggggaatagatttagtgggatcacttccaaccggcaagggaggagtcaaattttctattgtcgttgttgagtactttactaagtgggtggaagccgagctcatgaatatagtaacttccaagaaggccctggacttcgatatcaaaaatatagtgtgcagatatggactttcactcaaatagtgtctaacaacagaaaacagtttgatagtgaccagttcatcaatttttgtgtcaagcacggaataatcaaaagcttttctgctgtggctagacctcaagcacacagataggttgaagccatcaataaaatccagaagactactttaaaaaagatgcttcaggcttgtaaagcacactagccgaaagaactttccagggtttttcgagcctacagaacaaccgagagaaacagaccacactccatattccatgacctatggatgtgaggtcgtaataccaatcgaatccattgtgtctacacataggagggatacatgtgacccaactcgaaatcatgatctactctaagaatccttatatttaattgaggaactctgaaaacaatcacaggtgcaactccagatgtaccaaaacaaaattgccaggaattttaactcaaagatcaagagtagaaaatttaaattggtgaccttgttttgagaagagttttccctgcttcgcaggaggccagagtgggggtcttaggtccaaattgggaaggcccgtatgaagtaactaacaaaattgaagatggaacttatcacatgaagagactagatggaacaagaattccaagagcctggaacgttgaccacctatagcaatactatcagtaaactgggggtggtcaagttcctttttaatttttgctttgcctttttattaatttctatgtacaccttaggacaataaccatttaaataaaaagaagattttcgttttatatttggtctttaaaagctctatcatataacaagtgatcaaaattctcgactattaatcactccatgcaaaatatttatattctctttctactagaaaatagctaagttaaatgctcaaatataagagtatgaagctctacttgaaatcagagcctcaagaaactgaaagtaagccactgccttattatatttgaagattatttaaaacttaatcaaatgtgagaaaagggaatatgacttaaaaattagagcctcagggaaccaaaagtaagttatcgctttagcttatttggaattaaaatggctaacctaggttaacttaaaataaaagttcaggcctaatggttaattcacgttaacgataccacaacattcaggttacttaaatagattgatttaggtcaattaaagagctgaatttgaagaaaccctggagataagttatgaatgtcaagaaaggataaattctcataaaattaattagttcagattaattaattattcagaatttcaaataaacccttctacaaaagcattttttcacaaaacatatatatttaagtctaagtatctagtcgaaaaaattaaaggttcaggcctttggaaccagaacctcatgaggctggaagcacagaagacttagtaatttctacgatataaaatgcaatatctaatgagttagcaagtggtaccaagtactaagaaagccccgcgacaagggtataaattgtctctgtacattcaaaaaggggaacccttgttctccaaataaaacaaaaataaagtaaggacaagtttagagcagttaaggctgagcagagtcgtctagtgttggagtgataactttatggtatagagttatttcttatgcttttaaactgaaattattgtgaggagagtagtgaaaatgtgtttggttgctt

SEQ ID NO: 118254 - DNA, 2715 bp, Cannabis sativa
  modified_base (2529)..(2543): a, c, t, g, unknown or other
tgactaattaaataaatgaaaatattcatattgggaaagagggaggaagaaaaaaagttggatgtttcatttttatggtaaaagtttgcaaaatgtgatttttttttcaaagaaattattttatgagaaaaattcaatatggaaaaggcagttattttttccatatttttattttttgaatttttctcataaattgatttttttgaaaaaaaaaatccatatattttttttatgtataaactattttttttttgaaattaaactatgtgtacactaattgaaaattcataaattgtgtgatttttatctctttaaaaaatgttattgcaataattattgaaattgctaagtttttgtgtaggtttttatttccccatgaaacgaaaagaaggaattatttccaatacgtaaaaataaaaaatatataaataaaaatacagttgtacgtaatttttttttatagaaaatacagttttttttttgttgttaattttttgttatttgaatgatatttttctgttacttttatgtagtttttgtgttgtttttataaaaaaattgtaaaaatataaaaaagaaatctgtaagtataaaaatttaatttttttggtaaaaaattgtgttttatttaattattaaaaaaaatatattaaaaagtcaatattttgctatttgtttgacaatttttgatattacactattgagtagtttaatttgtaactgatgatgttgaatattaagaaaatgtatatatatatattttttttcaaaattttgattatttgtttatgatttttaacataaacacagagattacagatactaagaacagggaatctagttctagttgatggcttgaacaatataaagtggcaaagtttcaattttccaactgatgttatgctttggggacagagacttaatgttgcaactaggttaacttctttcccaagcaactcaacttcattttactctttggaaattaagaacaacaagattggactctatctaaattctggtgactcaagctactcatattgggaattcaagccttccatgaatagaaacttaactttcatggcattgagttcaaaggggttagagttgttcaatgatcaaggtaagaaaatcgctcaaataaggtctcgaaaatatgatccccccttaagatttttggcattgggaaacaaaacaggtaacttaggtctttatttttactctccaagcaaagctcaatttgaggcctcttttcaagccctaaataccacttgtgatcttccttcggcttgcaagccttatggaatttgcacattttcgaatgcttgctcttgcattcggcttttgaaggaggaggaagaagaaggggttggctcgggttgtggtgagggatttcgaggagggttttgtggtggtggtgttggtgggaaaaatgaggttgatatggttgaattagaggatgttaagagtgtgttaagagattatgatcatgattatagaagaggtaataatgttagtaaaacacaatgccttgagatgtgtttggatgattgtaaatgtgttggtgcatctttttactcacaagcttgttttttgtacaaattagtaggaggacttaaacaagtggatagagggagtggaatgagttttttggttaaagttcctaagggaagcactacaagtggtactcatggaaaatccaatgttaaaaagtgggttgtgattttggttggtgttgttgatgggatgattattttgcttgtttttggaggggtttcttattatttgattagaaagaaaaggaatagccatggtgacactcctcataattgataacaatatgagatttcattttttgaaatataaaccattttcttcctcttttgtaaaaatatacaactttttttttttgttttacattaatacatgagtttgtgtatttagattggttttggcttcattagtttgtttcaattgcaaatcgagacacgagttttctctttttttttaggaaaagatgaatatttttttccactttgaagttggattatatatgcttatcattttctggttttttgtttctattatgaatatgatcataaatttttcaacaaaatactctcaatttacttggaaagtgtggaggcatgcattccatgttttttggtatgattttttctcacatgaatttggtcctttattttttgttcttcctttcatgtataaataaattgtcaatccctatataaagcacctaaaattaaaaagctaattaaaatttttgtctcctaaattttgccatgtactaaatcatgcttcttaaacttttaaggccgctaattttttttactgaattattaagattgtatttaagaacttttgttcaattgtagtaagaaaaatttcacatgaatcaaagttcagaagatatgatgtacatatcaaagtttaaagagtacgatttgattaatatcaaagtctaatgagcataatttagtacatggataattactgaattagtaaaattgaatnnnnnnnnnnnnnnntccttaaattcaacaatctcaatatttcagaaagaatttttaacggctaaaaaaattcaggagacataatttggtacatgtacaaaattcaagtaaaaatcctaattaaccaaattaaaataactatatatttatacatataattatgccatgttgagaatcatggggttcc

SEQ ID NO: 118255 - DNA, 1041 bp, Cannabis sativa
atattaatatgtttgttaactaactacttttttttgtttgacttaattaaaggtttaattttttaataaataaaaattcaattaacgtgttaaatatagattggtttaacacagtataaaccactattttttaacaggagatcttgattcatatgccaaataagcttgaaccctatctattgccatagaagttgttctggtttagcaccttgatgtcgactcatcacaacgcgggataaagaggtcattcagtcaaattttattacatgtggcaaatagaataatgatgacttaaattattgtataattaatttaaaaaactaatttaaatgtttataatttaatttcacttaatctttttaattattaattaatttttagtttaataattctttaaaagtacacattttattttattcttatttttaactacacaagtgactctaatgtagtaatattatacttctacatcgtcattttatttttcacttgtgacaaaacttgattgtttatccaaaaatttccttggagccttacatcccagacaggacagtgttatatgcatgttgggggttgcctacctaggtagaagcttaaatcccgcaaagtcgtttctaagctccatccttcaacaatccaaacaaacagttcaacaactacaataaaatacgtgaaagacatgccataatgtggtcccaagctccgaaaccaagtctggacaaaacactacttgggaggtgcccaagtaagcatcaacacccaggttgacataatgtcatcttgagcacacgaaaactaagatttaggctctcgggaacttctttagactacgattcatcaaattgacttgagaaattaacttaagttgttagacccttttatttttggcactttatttaacttaaataatattaccaatttaccatatttaaattaattgaaaaataaaatggtcaaaataactagaaatttttacatcaaaaatataaaatgataactttattacctaaataccagtacacggtaaactaaacatttata

SEQ ID NO: 118256 - DNA, 4278 bp, Cannabis sativa
acatgagatataattgcaaaaaaaaaaataaaaaaaggtacactaggaagataatcacttatgaatcaaacacaaaactaatattaatgaaaacggtataaatataagggtaactttcattattttgaaagtcacgttatttgtgtaattgagatgcattttaaggctctgaatgtaaatttcccaaaaaaaaatgtgttatgtcattacatggcattgatgctatcctctttataaaaaaaaaaaaaagaaataagaaattaaaattaaataagtaatgtaataatatttataattataaataatatattaaatagtaatgtgtgaaatcataattacagcattcttaaaggtgctatactattactattaggtggcgtttcgtagggaggaatggaaatatatgtatagaaatgataatatatataagaataggaatggaatagaatggaataaaatttaacatgcataattgataaaaaaaatcattaatttttttcttatcatgcattggaatgatctttccttccatttcaaaatagaatagtcattctatcaaaatggtggaaagactattctattggaatgacattccaaaactataatatgcaaccaaacaaaagaatggaatgaaaattatttcctttcctttccattccattccatttcattactttcaaccaaacgccttagtgtttttacaattaagagttcaaaaataatgtggaagagatataaaataaaatattatatttttagatgatatgtagatttttaacatcttcgaataatgctataattggagatgctctaagttccctatcactagggaagcttttttgaccattaattttagattatgtgatcgttaaaatataaggggtatactcttacaatagcactacttgtatacaatcaaaaccttatacacattataataataatatttaattatatatttattttaaaaaaattatattaataattaaaaaaattgttaatttaattaatttttaaaataaattattattatttttttaaaagttaaattacattattttaatatgatatttatttttaaaaaataattttactttcaaatttcactatcaactctttttttttataataatagttaactataacaaagttaattacttaagtattttcaccacaaatttatttagatacataattctactataattatcttttaaattaatctatttttttaattttttatcaagaaatataatttctattaatcaaactgggttaattatatccacaaggggattctccttcaaaagaaaaacttataactcttttacatttttaagaataattttatctatgctagataactttctttcttgtacaagattaagctacttttaaaactctcttatatgccactatctatacaactcgaattcatacaattttttttccttatttatacagaaattttagtttaattaaatatcataaattacacctgctaatagatttttagaaatatataatataatttttatgacacattttagtatatatatacatggatcattttttaatggatattactcatgaatggttactaacaaatttaactacaaatattaattttaaaaatattaaatcatcaaattttgatctaataaggaataataaaagagaaatttatattttatttttaaaattatatatatgcttttttaaatatatacttttttcaataaaaaaataaaataacaaaacccattaatttaaagtttttttttttaattgacttatgacctctacatttgcccaatctgtaaattgacgtatggcctctacatagcatgaggtactactcactaaattgaacaacactattgccagaaatttggtcttcaatgaacaacactatccaggaaattctcacaccaataaccgaactcaggtacactctgaacataccactagttttattcctactgcaaccttttcaacttctaatactagtgttatttatgtggttccaactggtgtttctgagacacatactctcccaatacaacctgacataatcacaaatacttatcctcggatcccaccaccaatgtctcaaccaacccatccgtcaaatcccaaacagtttcctaactccttcctccaactctgtccccaccagcctcttaactaggtgaaacagatccccaacctgtctcccagccaccttcccaggaccaaaatcaaccaaataccaacccagatgatactgttcctgttcaatctatacctacttccctcaattctagtctcattaacccacccaatgtctcagaaaatacttagtccaccaacactgctcacaggtctcatcttatgataactagatccaagaatggcattgttaagccaaaagcttatttggcaactaaacatccatttctagaatctctattaccatgtgaaccaagatcatttcaagttgcatttaaagatccaaactagtttaactcaatgcacagtgagttctatgctttaacaaaggctagtacttggactcttgtaccttaccaacagggtatgcacattattggcaataaatgggttcatcgaattaagctaaatattgatagttctttagataaattcaagtccaggcttgttgctaagggctatcgacaagctcctggcatcgcttatgaggaaacgttttcccatgttgttaaactagtcacagttaggactgtcctaactcttgttgtcactgaaaactggatggtaactcaagtggatgtgattaatgcattcttaaatgacacattaacagaaacagtgttcatgcaacgaccaccagggtttattgatcaatcaaagccagaccatgtttattttcttcataaagctctttatggtctaaaacaagctcctagagcttggaatgacaagctcagaacctgtttacttcaatggggttttcattcctccaaatttgatacctcattatttgttcatggtactgaaagtaatctacttatacttctggtatatgtagatgatattttggtaacaggaccaaataaatctctcgttactaaattggtcactgattttaacaaagaattctcactcaaggatttgggtgaagtacattactttctgggagtcgaaatacatcgagattatcaaggcatgttcctgtccccaaacaaagtatatcacaaatctcttactcaaggttcacatggaaggtgccaaaatttgttctactcctttgagtagcacctccaaactgtctctcaataatgggaattgtttgaagacccaaccttatacagaagtacaatcagggctcttcaatatctcaccctgaccagacttgatgttgcttttgcaatcaacaaattaagtcaatttttgaaagctccaactatctcacattgggaagcctacaaatgattgctaaaaaatctcaaaggaaccatttcagagggtttgctaatcaaaccagcaccatcattgacactagcaagctactctaatactgactgggccagttgcattgatgacagacgattaactggggattacctagtttatttaggtgaaaatctaattagctggtctgctaaaaagcaacaggtggttgctagatctagcattgaaaatgagtttcgtgcactggcaaacacaactgctgaattaaagtggattgtctatttgctatctgaactgaatatcactctttctcaatgccctgttatttgggtcgacaaccagagtgctacagcagttgcagtaaatcccgttttttatactcgatcaaagcatattgagatcgatttacattttgtaagggatcaaatcatggccaaacaactatcagtacgttttgttcctagtgttgatcaagtggatgatctacttacaaagcctttgtccaaggaccgaattgtctaccttaagtccaaactcaaaatggctaataccccttttcatttgagagggaatgtaaacagtattaaccaacttttgttattttcgatttagttagtttatagttaattctgttatggtagttaaggtagcttttcattcagtttgttatcactgtactctgtatataaaaggcttagggccagtttggcacaattgtgctgtgaaaaaaaagcagatgtagctgtactgtaagaaaaaacagctgtagcaaaactgtagaaaaaagctcagctgagtgtttggtaaattataaatttcaaagtactgtgagttgttaagatctat

SEQ ID NO: 118257 - DNA, 2607 bp, Cannabis sativa
agaaacagatggtggttcctgatgctgggagaagaattgaggcactaaaggccaacaacaataataagattgttaatgttaagcctaagcccatagaggtgattgatctatcctcagacacagaggaagtcaagaagaagccggagaagcctttgaacaacatgaaaaaagaagtagaagttgggggaggggcctccttaagaaagaaagcaccaacacttacttcagttcttactgctagaagcaaggtatatctggttgtatacgttgattatatatagtagttttgggaaagccaaattatgaattctgcatgtgatcaatagtttgttctatgttctaatttgacttctaagttctaatttgttcttatttataggcgcagatagttgacatagatgcagcagatgtagacaacgagctggctgcggttgaatatattgaagatatgtacaagttctataagctagtcgaggtagtcatttttgtgttagttttgctgttctttcatgtcttcaagtgtagtcattgttatttcatccctttgtcttcaacatttactaatctcaaactttttgttccattaatgaacagaatgagaaccggcctcatgactacatagattcacagccagagatcaatgaacagatgagagctatactagtggattggttggtggaagttcataccaagtttgaactctctcctgagactttttacttgactatcaatataattgatcggttcctggcggtaaaaacaatatcaaggagagaattgcagttggtgggcataagtgccatgttaacagcctcaaaatatgaagaaatttgggctcccgaggtaaggataagaaaaggttcattcatccctttgaagaatactgcaagaaaagttcatatgtctgaaacatcatccttgctttatttatgtacaggtcaacgatttcgtatgtctgtcagacagagcttacactcatgagcagatattaagaatggagaagatcattctaggcaagttagagtggaccttaactgttccaacaccatatgttttcctggttcgtttcatcaaggcatctttccctggtgacaagcaagttagtagtcaatctctctattctcattaatttttctctgaaatctcattgaacattttctcatctaacaaagctttatgtttttttcagttggagcacatggtttactttctagctgagctaggtatgatgcattacgcaacaataatgtattgcccttcaatgatagctgcctcggcagtgtatgctgctagatgcaccctcaacgtgggtccagtttggaatgacacactaaagctacacactggttttgcagagacacagctcatgtaaaatgccctcattttatttttattatttatgattattattttaccaaactctggattttaatatatatatatttttttggtcctgcagagactgtgctaaacatttaagcaacttgcattcaatggctgagaaagctaagcttcggggtatatacaggaagtatatgtcttcagaaagagggtcagttgctctgctgacaccggctaaggctctcttgccatctctgtgaatttgaggataacttcatgatgccaccgcagcatcatctatatgaatttgttttggaggataagaatttacttatgtgagacaacttcatcaatatgaattcactgtcctttttttctcttcattgtgttacaagaaactatactttgtattttttttttttaactattttaaaaaagttcaattttaccatgaatacactgtccttacaaaaaaagattacaaacaaaaactctataaccatcaaattcttcacacactaagaattgaactttctaaaaaaacattctttaaaccttcaaactcgtgctaggggcgtataagattttaacaaaaacgtatttcatgatccaaacaaatggcaaagttcaaacaaataaacaacctattacgtgggtgtaattttatttagacatacgagaaagaaatttaaaatgttggaaactattacgaaggcgtagcaatctggaacttctaagccccattcaagatgttaattctcattttatttctcatttaaataataataaaaagaaaaaaaaatcattaatacaaattaatttaaaaataataatttttttgacaaattaaaaattataattttaatttataaaaattttcaaattaaattaaattaagaagctgaaattactaataaaattaattagttaataattttaaatttaatttcaaatcccgattaattcttaaactaaaattttttaagaaaaaactattattgtcatcatatctttacttgtagtcgtcattatattcgaaatcattatcatcatcaccgtatcgaaatttgaccaaatgttatcaaaatctatagaataaaaagaaattaataaaactttcatttattgttgctaccacactacattatcacatatacaatgttattttttttttttttaactaaatcacactaaacatagttgttgaccgaggttttcggcaactagtaaaatatgattataataatgagctgtaagaaagcgaga

SEQ ID NO: 118258 - DNA, 1083 bp, Cannabis sativa
  modified_base (822)..(829): a, c, t, g, unknown or other
tctctctctccattaacatataagtttcttattttatttcttgttcagttattcttcttcatcttcttcttcatttttttctttagtttttgaatttttcagtttcaaaaaaaaaaaaaagaaatagcaattgtaaatttacatttttcatcaaggattagctaaattgattctgactacactaattccctattcgactagtagtgtaggggcataacttgtcgatggacctcttcacctaaagatgactttgctgcatcttttttggttaagaggagatcacttcacgtgcacattgtaaagtgaatcttcactgtgaaaagacttattttgaagacaactgctttattggtagtatcgtcttagatgcacccccttccagtacctttgtaggagcactggattaagttttagtcatagtatgccaacttgtatgtttcgggttctagtgcttcagtggagacatagaaaccttcccaagaaggtttgagtactcctgctattgcatcttttgtgttcaagtatactcgtcgtaacaccaagtctctacatataaatttcctatctttaaacttggagtaatagttccttacgactctttgttgatacacgacctttcggagctcaaatcttttccttgtttcttcaattccatcaagagactcagccaacagtttatgattggtgtgttggtcatatgctattctttgatgagatggcggggtgagctctacaggcatcatagcttcatatctgtaagtcagggcaaaaggattattcccgtggtcgcggccaaggccgtggcagaattcaaggtggtcnnnnnnnnaatccaccacaagctccttcggattaggagcagaggtttgcggagatgcaagatcgtatccgccaacaagatgaagaaattatgagattaaggcggcagggtcttcttgtcgtgcctccataacaagctcaggccgttgtagttccagcagtgctcgcagatcaacctgttgctaggaaccgtatggagccgttatacgagaggtttcgtaagcaagcacctccagtatttttgggaggtccagatgtgatgaa

SEQ ID NO: 118259 - DNA, 1749 bp, Cannabis sativa
  modified_base (1370)..(1371): a, c, t, g, unknown or other
tttagaaaatatagggtccattttgtcatttaacaaaacacaaggtccaatctgtaacttttgcaaaacacagggtccaaaatggtattgtactaataaagtgaagagttattttcaacagattatttaatttttaaatgtgtatataatttattttttcaatagacaattaactaaatatataataattatcttttaattgaaaggtgtaaatccatttattatatttatgtataaaacaaactatgagagttttagaagattaagagacgtgaatttttatgtggtttaagtgttaactaatcttagttcatgagttaatgtattcgagatattgtatgagcacagtgtttttgcttaagaactaaaaagagaaattcttttacaatgaaggtgattacctatttatacacaagagtcatcacccatgagctttattagcaacaactcataagtaatttattatgcttagccctctaatagggtaatttatatgtgactagaattcctaaccttcgacctaattggggtggtaggtgaagctaatgtgatttatcctttgatgaagtgacaaaagcataaacaagtagctacttttgttactagaaaggtggatgccaaagtaatgggtgtgagtatcctaatgtttatactcgttttctaaaggtaaagatgtcacctttacacaaagtacggaggggatatgctacaatgtccatcaaatttaggcaagcattttaagcacgcttcacgtccacatatcaagtaagactttcgagactaactacctctgggttttccctagggcttgacaatatctagaggtcgatgcatttttcccaggcctctttggatcctagacacccttccagttgtcttttaaggctactagtatgattagaggtgttcatccaattcaatctgtactattttgttcacagtacattcgatcggcactaagtgtggatttcatattttaaatccaatctaatccacatatcaactcaaatccaatccaatcgcaaaagtgcgaattggatcggttattttggattggttactttttaatattaaattatttaatacctattaaaaaatatattttttttttcacataactaataacaaaataaaataaattattgttgttttatgtctccaacaataatttaaataaataaaacaaaaaatgaaaaaaaaaattaaagcaagaagaaaaaattatatgtataaagagatgttgaattttgtttaaaattatattttacttgtaaatataaatattatatatttgatctactatattttaaaatatatttgtatcatatgtattaaaattttaaattattattttttacattaaaatattnnttgtatatataatttttttttaaaattataaatatgtgtggattgaattggatcagttacttttatatgacaataacatccaatccgcataagtgcgaattttagattttccaatttgatccaatctgtacaaatatagatattcgcactttgaagattagattgaatcgtacagattaaattaaattgggtattttgtaaacacctctaattacaccgagagcatctccctaggactatgataacattcataatttggtaaatttattttatctttattgttttgttctttttttatatatatttttttaacacaactattttttttttatatatatatctttatatattaaaagtgtctatctaacggcatttctt

SEQ ID NO: 118260 - DNA, 1607 bp, Cannabis sativa
aaaaaaaagtgaaaaaaggaaaaaaaaaaaaaaaagacgacgaagaagaaaagagagttaggatttatgtgaacattatatcttttaacttattcaatagaaaaaattcatatttattacaaaattcacatcacaaatgtcaatttttatattatatcgatcacttattcggtacaaatatttagcaacctaaaaatattgtgcaaagccagaattagttccctagttacttataaatcaactcgttacattaaaaaatatactcaattagaagttaatgtattgcactatgatattaaaaaaatactacgaattcaaaataaattagatatctacctattacattcctaaaataaactaaaacaatatactaacatatacactgatatacataaaatcaacttgtactactaggaactaattacctaatttatctttttatgatgttgattagactcattttgtaggtggtagcatttcctattttggagcaattatgtttgagttcacttgattgtgtagagatgatttggcaagatcaagttcaagaaatttcatacatgcagaatttaaaagatataaatgttgagaagtgtcacgagttaaagtatcttttttcttctgttgtggcaagaagtttggctcaacttaaaactctaaaggtagagaactgtgagaatatgcaagagattattaaagaagcaggaaatgaagaaggaagctcgatggagactatttgtttccctaaactagagcaccttaatctttcttctctttcaaacgtcaaaactttcagtggtggaaagcatttggcaatcgaatgtccatccttgaagatattggaaataaaggaatgcccaaaactgaagacattccacaaaagttttattataaaattataaaattatattttaacaattttaattataaaattataatattcaaattatatttaaattttattattattttaacttatttataattacaaattcacatcttattattattaataataataaattataaaattttttaatatgtcgtatcatacttttcgagcttgtggtgtgtcatgctttttgggctagtttattcgtggatatatatggtgccttttgtgcttctcgttccctatcgtgcttaaggacatatttttgtgtcgtgtcgtgccaatttatagtatcatgacatgtcgtgcccaagcttatattttttcgtacctaatcatgttcgtacctttcgaactcgtgccggttatttagagcactagccatgccatgtataatataattaaaacaaaaactcggttttccacactagccgtgccagttatttcaaaatatcatatacctattaataaaagatacatggccatgttgctcttcattagggatgggcataaatcgatgcaatccaatgagaatcgaccgatctaattacaaccgactgccaaacattggatatccaattacgatcggctcggattggatgttcttattaaatatctaattggatcagattggatggtggatgaggtgtccaaaaatccaatacatccaacatccaatcgaactaattactatttttatttagtttgaatgagt

SEQ ID NO: 118261 - DNA, 1126 bp, Cannabis sativa
  modified_base (216)..(222): a, c, t, g, unknown or other
  modified_base (1094)..(1101): a, c, t, g, unknown or other
tgtgtaagactgtgaagaatccagcacttgaaggagaatcaggttcagatcttgataatactctgctatagaaaggaataagggttagagatctgagtaagaggagacatattattttgctgccaccaatgtaaggttacttaaactttataagtgtttatttacactattttagaaaattcatatttagggtgttaataaacatacttgttagtnnnnnnngatcctgataaaatatattccaacaattgtaatattcaggactttctgttaagatcttttgacaatctgaatagtgataaacttcctcttctatttggtatttgttggatggtgtggaatcaaagaaataatgttgtcttcaataagcctgccctaactgttgtagatgtggaacattttgtaattgatcttttgcagaaatacagggatgttcaaaaccaaggctttcaacagaatccagtgagtccttctctctctgaggtgatgttcgtcagcaagagtttggcacagctagattaccttctcttgggatgtttaagttgaaagtgactgcttcccttgatgtccaagctttgtaaataagtgttggagctatcgtcattgacagtaatggggctattgtagcagatttatgttctcattttgtaggtgcatcaactcccatctatgctgaagccaaggccttacaggcaaccctctcttggtgtgtagttgtgcatttcccaatagaagcgacaaaattagactgtcaagttttagttaacaagatcaagcataaatggaaggacagatcttccttttcggatcttgttcaattggtgaaaaactctttatctttatttcctaatgtttccttaaaccacatttcaaggaatgataatgtatcaacacataacctagctaggaattaagcttaaatagagagatgatttagaatggtatttcctaatcggttattgtaactgtaacttggatttgactgatgtaccaataaaaatttgtgacagtcagtagtctcgtaatccataaggggagataacgggtaagctgtgcaatcccacaccgcttgggaaaggtcaagtgggatgatnnnnnnnntgtgtaggtatgggactacacagtt

SEQ ID NO: 118262 - DNA, 1384 bp, Cannabis sativa
  modified_base (1314)..(1314): a, c, t, g, unknown or other
cgtatattgataccgctatcgataaccaagagaaaaaggttatgtcaaagtgggaatgctcttagtctattcatcaattatttgggaattggaatatggatgacaatcccaccaccttgtatggaattacgatttccattcttaatatgtgtatgtacttaaattataaacattacacactcataatctcttatcaaaaatatttgagtgcatattcaacatgttattttatatataattagagctcacaatttgtgtatttgtgtcttgtgaattttattatgcttatatgaacacaacacgattatataatacttcataaaaggtaaacaaaacatgatacataggactatgtttatttagttattcacaatttagtaacaagaattaaaaagatgggtttttttggatgattagaataaaatagcaataataaaaagtaaaagaaaacaggtttaaagatagactacgatatgagaatttagttaaaggttattttcctcccttaataattattcctaatttttattaaagattgtaattttcagtttccaattaaactattaatctcgcaaataacgctaaagcagtcaattattctaatctccctattgtatgtaatcaaggcgaagcgctcaataatttgttagtttctttcttgaatgttaatttctagtttccataatagatagagtctcacatttaatgtaagcccttatttataaaagtatataattatggcacttgggatagggcctcaagggatattcagttttgtgccgatggataatgacacacacttgacttgccacattggtatagtgtgacactttattttttataaaaattttattatatttaatttgagaaacgtatttagttattcagtcgtatcaattttatgagacacgttcaacaataaacgtatttgtttatataatgcgattgaaacacatcattttcataccgaaaaacaagcacaattttcactagcgaaaaattccatttgtaatatcatatttaaggatgtattcgactatttgctacaatgtagtggtaatctgatacagtgtacaatgattggattgttttatcctgaagacgaccaacaatttctggctggcacattcctgaacaattctgcgaacgtcttaaaaagaatgacctagtttgcgagtcaatctaaaaaatttattcgataatatcgttcctcttttattttcagtaacaacgtatcgcacctacgtatgtaaaaaataaacaaataaattcaaatttgtcattttaacatggtaaataccattttggaccctntgttttgcaaaagttactgattggaccccatgttttgttaaatgacaaaatggaccctgtattttttaaa

SEQ ID NO: 118263 - DNA, 1483 bp, Cannabis sativa
atttttaggtaataccaacctcacatgctggcctaattagggcaacatgggaccaaatccaatgttatttaattatttatgggtaacaagtttagtcatccctagattaggtttaatcaatgtgtaactttaattattttttctttccaaatagaacattgcctttttggctcttctctttagttaaattattaagaatatattctattttttcaagtcatttggggtaagatttacgtctttcaatgaataaagaatcaaaataatattatatttatgagtcttctctctctctctcaaggtttatccaaaaccaggagaagtcatgcacatcacttactatttttatttttattttttacttacacgtcacaataataacgtttgtttatttcttttaaccaaaaagaaaggtagttctattatggtttactaaagcaaatgaaataattaagaaagatctctcatctatatggattatcatagatatatatagaaagttgaagctcttaggcttaactttaattattagctttgtaaattcagagagaaaataagaatagttagttgtaattctcattgaatgaaatgacaaagagtattttatagagctaagttcagtatacacacgataggagcagtagtgattctgttataaaaacaaaatcatgttgctttaacaataaagatgccacttgtataaataacactaacaacttaactatccttctaacatctaatagctctccttaaggtaggtggagtgtaaagttctttaacaccaggatcggctctgaacatagatgggctaggcccgtgcttaaagcccaccccaactcaaggtccaaaaacagtcatataaagaaaaaaaattaaataagtcacagtcatccttcactcccaaccggcccagctaaacattaaatggagtggtgcaactccaactcacactacaaaacgtgtgggtgcaatgcaagcaaagaaaataaaattatatacaaaaaaaattacatatacaacagggaaatttcttaaaactgtcttagacccaatttttttcaaggtcgaccttctttgacactcttcttggagatggtgtccttgaaagaagctggaaacaatgctttggtaaagatatcgacgaatgttgagtgtacaaccaaaccctaaatatgtattgtcataaacatgcattaatgtattaaaagaataaatactaaagattatattatatggatagtaaaattcaatttgtgctagggttaataccctaaagtttatatatgagcatgtaccgaatgaattaagtaaatgtatgtcaagagttatgtgtacaagatataactgggttaggcttgataaatatcatcaggatgaactactatgagaacttaatgtatggatgttatattatttattaaataatataatgtttaagattaaaattgtgatctattatacataatataattgggaattatat

SEQ ID NO: 118264 - DNA, 810 bp, Cannabis sativa
aaaacattcattaacgagaaatttcagctagagctttttgcaaggcaatggactaacttgtttgcagatcgttttacaaaacgtaaaataacattactaatagaggaaagcaacacacgacaatcatgaactaacaaaccaaactaagaaggaaaagtaagacaactagagatagcttgaacacacacgaggctgtctgtttcaagaataacacgaggccacatatgctctttaacccaactcaaagcctccttaatacccacaatctctgcaaggctgaatttttccaccagcaaaatcgcgtgctacagcacccattgcaaaatgctcctcttgttgaaaattgctccatcaacattaccttcagagaatttactattcatgttaccttcaaagaggtagaaaagaaattacttttaaaacaaaaatattgtaaaaataaacaaaaaaaaattctaatatatcattccctctttgcgattgagtgaggaaaaaagaaatatttcctacgattgaaatgttcctccactcatatcgaaatttttgaaaaataaaaattctaaaaaacaatataaaatatatcaccaacctcctttgaatttaagggagaaagaaaaaaaagtttctaattgacattttcaatcccaatttcagcgattgagggaagaagaagaaagaattctaccattaaaattttctaattatggaatctatagtgactagtgttgggttgtctgccctaaataaaattcaatttaatataatcagatttactaattaataaaagatcggaaatcattttatgttgca

SEQ ID NO: 118265 - DNA, 2740 bp, Cannabis sativa
  modified_base (2688)..(2705): a, c, t, g, unknown or other
ataatattttttatttttataattttatttaatttcaaaatgaattttgaaaataatttttaaataataatattaagtgtaccaaagtgtatacataagaattcatagtgatactaaaccgaatgacaccttaaatttgctaccagttcagtaggttggaggattttatcttcaaaacttgagcttagagggttaaatacaagtgaagcaaccgttgggagggtttagccgccaaaaactctttttttaaataatttgttgatctagcactaaacattaatctagtttttttttttttttgaagtaattgtaacaagaggaaaagaagcaaacaaacaacgacataaatacacaacaaggaggagaaattaaatcctctaaatccttatcctgccttaatgcatccctagacaaggctagacaaggctgagttgtccttccaagagctctcaagctttgagaccaattgtaagcaatctgatttaatggagccaaggggaagcttaattgtaacgcaccaattaagggcttctaggaggacttgagcttcagcaaagaggggtgttgagacgccccatttagaaatggaaagccctacaatcgtttggttttttccagttcataattgaagccccgaatcttattctaagctgcttaaaatcaagggcagcatcaacatttagcttgtattgaccatgctggagagaatgtgttgctggagcactgtagttctgatccgaggcaatgatatctagagagctaatctggaaagtaatagtttgggctgcttgataatcctgcaataaacgataaacatagtctttcacatcaataagattgttagtattgcggttgaaaagagcattgttcctcctgttccaaatctgccaagttaaactaagaagcaaagtgatattgtcattattaagatgatctaaacatattaagtaatattctttgatgtcacaattatggttttcagtgtaaaacgttttgagtgaagattgttttcacatagacttgcccctgggacagtgaagaagggcatgggtgacagactcgactttgcttttacaagctgggcagtaagggttagtaagagatttattttgaaaaaggttcaggcttcaaagaaggatgtggttaaaagctttctaggtgaaatgtttatttttgggagggttttggtgttccagacagttttgcaccaatgcttaaaacaattagggttggatggtgttggcaatgtcgacatggggttggagttggctaagtggtaggtagaattgactgtgaagattctagagtgatgatgtccctagatgaggttatccttcacggatggatcaatgggaatcttaagaatctcctaaacttgataatgaggcagaaattgtagaagttttgaaaaatcccaggtactattattatcaatgaaaaaagatacattgtggaaaattggattaaaatcattcaaaaaagaaagggagtgcaaacttggaatccagttagggtcgagcaaagagatggacctgccatttcccactttccaaaaaggcctttcttgagaagttccctccaccacaagaggcttctccaggtatacgaggggcagtgacctttaggagtaataaggaagtcattgtttttgaagtatctggctttaaggagaaagtgaatcatagtagagggactggtcaagattctccaagcttgtttggtaattaaagcttgattgtgttttgcaagggatttgaagccaagaccctgaaaaaatttatagtacagagggtagaccaatttttccaatgtatcttattcttgttactgcaagatccccactagaaacctagaaatgagtctctacatggtttgacatgtggctccggggagtttaaaacaggacatagcaaaggataggatagcttggacaacaaccttaataagggtttctttgcctgctctagaaaagaatttatcattccaaacattcattttagaagcaactttctggacaagataatggaaatgagagttgttcattctacctgtgcagtggggaacactaagatattttctcacaaagcccacacaacctagacctaaagaattttcaaaaaaaaaaaaaatagcttcattgttagtattaggggagaacatgatggaggatttggccacgttcacagtttgcccagttgctttgtgataagaaccaacaatgtccttaatggcattgttagaactcttagtgacaggggtgaataagatactgtcatcaacaaagaggagatgggagatgataggagcattcctacatagtttgagctcaacaaagttattgcaatgctccttgacacagatggaagcagagagaccctcaaccactaataagaaaatgtaaggtgatagaggatcaccttgcctgattcccctagtaggagtagtgctctcagagagggtaccattaacagagatgtgataactaacagaggagatgcatttcataatcagagagacgaaggttggtgggaaaccaacatgggtgaggatggctttaacaaagctccattctactttgtcaaaagccttctccatatcaagtttgagggcatcccaatcttgtttgcctttcttcctataatggatggcattaattgttggaatatgttttactaggatctagatttnnnnnnnnnnnnnnnnnnttaacatcctaatatgaatttataaaataatgaaa

SEQ ID NO: 118266 - DNA, 1424 bp, Cannabis sativa
gaaaccaactttatgacatgtacacattttataaatgtccgcatactattagagtacaattgtcaaatgatataacttggcctaaatactataaatgagcatttcatcataagtactataaggtcaaagggttacgtattttattatccatctcataacacgagaattgtgtaattaaggatatttcacttgatcagtggaagtgatcgatctaggaatctagtttcaagaaaagatcatttattttctcaaacttccaccccaagtattagattaattatgtttcacaacaacccttaaggttaatggttattgagaattcataactaatcattaataattcacaagtcattgataaaattctaatacgtcatgttattttgtaattgcttacaatttctaaacaacatatatgttgcactattcactctttaagagagtttgttggttcatccttaagatgacttattagaaagaaagaaaaaaagatcaatggtcactacaagaaatgtgacttttatctcagtgcattattgcgcttgcaaaagcacattaaacgcatcggtaaaattttactggtgcataacttttattagcgcataattgttaccagtgcataacttttatcgatgcataaacttttactgacgcataattgccctggtttttattgattacattatgtatgataagattttaactacaatattgatttgagacacaaattaaaactttggaatgcaaagaattaaaattgtattacaaaatgccataaatgaatagataaatttcttaaggaacaatgaaatttatctttagtaaagttacttattggggtagaggacattaatcataggtttttcaccaataaatactcattaggaaacataatgaaatataaggatataaaataagattcattgttaagaagtttatttttaaattaagcatcaataacaaatgagatttacattctcacttgtctttataaaaaattctattgtagtaaccttgacatttgttgtttgtttcaattcataaactaattctaaatagtgaactaaaggagaatgtatacaaacaactataataattttcatataatagtggtaagcatataaaagcttaagaagtctacctatatattaaaatagacatatcacaaattatattttcattatgtcatattttctttttagtttagaaagaacattatgaaattaattatataccagaaggtccatgaagtaatatttgttttatatagataatatgttacttgcaagtgataataaagtttcctatataaggcgaataattcacatttcaaattattattttaagataaataatgtgatatataattttaattaattagagtgtatctacaacatctctaattaaataaaattatgtattattca

SEQ ID NO: 118267 - DNA, 4623 bp, Cannabis sativa
ccaacacagagtagcaattaaacactttctctccaccgactggtttttaaaaactgctgcagaccagtccacaaaacactcaccagtagccacggtagtacctattcccactctttcccaaacttgttgcaccaccttacaagaaacgagacaatgcaatatagtttcaggatttgtattgcagattggacactgctgacttacatccacacgtttcgtaactaattgcgttagagttgggagacactttacaccagcacgccacaccagatttttgactttcggaggaacttttaacgcccataaacatttccaaaatgctgacacatttgcattatttccatcccttcctttattcaattgtaataactggtatgcactactaaccgtatattctccactgctctctttataccagcagagatgatctctggatgcactaatttgaattggtattctaagaattaattccttatctctttcaacaaagggatcatttaatatatccatatcccactctctaccttccacacttaaaatattagccacagtagcttgctggagagctgggtggtcagaggttatatatgggttaatcggatcatgcagccatggttctcccaagatttttatatcagttacgtcgcctatacaccagcgggccccttgtttcactaactcttgagcctcccatacactacgccacacaaagctaggattatgacccaactccgcattaagaaaactccccctaggaaaatatcttgctttgaaaatgcgagaagccaatgagtttggtcttgataaaaacctccagccttgcttacctagtaaagccacattaaaatctctgaaattacgaaaacccattcccccattgtgtttctggtcacacatacggtcccatgacatccaagaaatccctttcgatttgccattagagcctttccaccagaattttgctaacaaactctcaatgtctctgctgatttcccaaggcagtaaaaatacactcatgacatagctaggaagagattgagccaccgatttgatcaacaattccttcccagccctggacagaatttttgaatcccatccttgaagtttttttcgaacctgatctcttaaatatcccagcactgctgtcttatttctccccatggtactaggcaaacctaagtacatactcctatcatcagcttgattcatttgaagatattgattaattcttcttttacaatcttcagtagtattggtactgtagaaaatggaagacttgctagaattaattctttgccccgaagccaattcaaacttgtgaaggagctcacgaacacgagtagcctcttggatagatgctttacaatacaaatagctgtcatctgcaaacagcatatgtgatattctcggagcaccattagccaccttacaaccatgaatccacgctctttcttcatatctcttgattaaagatgagaagccttccgcacaaatgataaaaatgtagggggacaaaggatccccctgtctgattcctcgagtcggcaaaattggccccatttctcttccaccatgagtcaccatataccttgctgaagaaacacatctcatcaacaatcgaatccatctttcaccgaaaccaagctttattaaaattgcctccaaaaaaggccattcaacacggtcatatgctttactcatgtccaatttaagtgccatatatccttcctttcccaaccttttcctcttgagataatgtagaacctcaaaggaaactaagatgttatccgagatgagacgacccggaatgaacgcactttgagtctccgaaacaattacatccatatggtgcttcattctattagccaaaactttagtaatagtcttgtataaaacattacataatgctataggcctaaggtcactcatactttctggcactttcttctttgggattagcaccacattcgcctcactacaaccctcttcaaactgccccgtgttgaaaaaacgttgaacaaacgccactacatctctgttaacaatattccagcatttttgaaaaaatgcagaagtcattccgtcaggcccaggacttttatctggatgcatatcaaaaatggccatcttgacttcctcctcttgaatcggctccatatcttttttatgaattttaaattgtgttttggataataattacttaattagtttattgaataataattaatgtgtaatattttaattcttatgtagtttaatatttttgtatattaaaaattttattataaactttaattttctattaggagattctctaccccgtccctgcccccaataggggattccccgtcccatacctgatgagaaataagcagggatagagattaaaattcttaacggggatggggatggggggatcactccccaccaattctccgccccgtgtgcatccctaggcacattggacatattttgtattgttcaggagttttataagtttggatttcttaattatgttaattttgtaaattttacctaattactaaaaaaaaaatagaaatattaattattatttatacaaaatcgtatataaaatatatgaaaatttataaggggttatttcagtagattcttatttgtttcggcatttaggagagctttagtctattttttttatctataatcatatacgctgtagttatttatgattacatgtgaactttaaaaaaaatggaatagcttaccataccaaaaataaagtttaaagaattggtaattacacgtacaagaagaattagtcacgtgtgtaataaaataatttaatcttattttggatattgtaaaaactattaaaaatcttctaaaaattaaagatagccttagataattacatcgtatacgatcatgaaaatatagattaaaaagttctcttaaatgtcgaaatagatagtgagtctatcgaaatacccctttaagatagtgtactatagactttcgcaaaaataagtatcacatcgacaatccgacttttgcatcttcttcgtcttcatcaaaaataggaagataggttcttttggggaagaaataacctttcatggatgagatccagcatccatgttgacacctggggctagcccagcgcccagattgaaattttgtcaatctgggccattttcaatgatattttatgagaactcttccgaccatcttttttgttttcagaaaatattgagattcaactattttatgggaccaaatggaacttccagagagctaaaattgggacccaacacccaagttgactttttatcaacctggggtgtttctaatcaagttcaccaaaaagtgtttagggaattttttttttttgtcattagaaataataaagatttaagcatactcggggagaaaacaacaaacccgagtccctggaaacagagcccagtgcccaagttgacaatcaacttgagacactaccttcaattgctcaaatgtcaaatttgattagaccaattaatctggaatggtaaaaaacaggataggttacctcatcctcaagttcaagaaccttagaggtatcagggaagatcctgggagctcaggaatagggtacccagtgcacaggttgacaaatggcttggtacgctgggttctgcttatccgattctaattttgtttcgatcgtccatctagtttttcacaataactatgatctatgaagtcagagaagtcaaaatcacaacttcgtatttctcattttcaacatgggaaactcatttggaatcaagagtttcgagtctcttattttcgcagaataggaacatcttcgagaattggtgaccatatttgcgagaacagagaaacagactaagtgatgtcaaaatatcacctaggcatattaaagtacatctaatagatgtttttacacctacccaacatccaggttgacgtcatatgtcgacctgggcgctgggtcatgaactttcttcagtaaagcagtcataactcactcaatattgatccaattgacgtgattaaacttgtgtttcaaacttaattcaatgctctatcaagtcatgcctcacactttaatcgtaattttgaagctatcatcataaaattttacctccaagggagttacaaaaataagctccgagttacccgcagcgggacttgccggcctccgaaaaatagctatcaccaccaagagctaattttcactgttataatatccaatttcttttttttttttctatttttgtggtcctccttcacctataaaaggagagttttcttaactcatttttaagttcaaaaaactacctacaaggtcagagtttctctctttaatttctctctttaaaaattggaacttagccaaaattctataaatctttgaccaaaacaattaataaaaaaaatacaatttgaatcaataaaataaaatctataataacataatagaagatttgatcaccacaatcaaattatcatagacaaacataattatcaaagattgtatctattaaaagttagtcccacattgttaatgtgtggaaataaattgtgatatataagataaatgggctattcctccaattatcaattagttttaagataaaa

SEQ ID NO: 118268 - DNA, 1369 bp, Cannabis sativa
agtaatgaaattaaatttgtttctttattgatttgaatagaaaagattacattaaaataaagttttatttagggcacaaagcccaacaagaagaagcttatcttgcaagaggaagaaatccaattaaaaagaggatcatcaaggaacagccagtcaccatcaacaacaaaacaactctccaacaatttacatcaacacttaattaccactttaagcttaaagatcttggccctctgcgttttttcctaggccttgaaattgcacgtttcaacaaaagaatctcagtcactcaaagaccattcactctacaacttttacaagaatttggacatcttggaacaaaactagcttccacaccaatggagcctaatgctaaactcaacgagattggatccttgctcactaatcctacccaatatcgcagcctcatagggaagctcatctatctcactatcaccagacttgacatttcatttggtgtcaataaactaagccagtacatataagcaccacgggaacctcacctacacgcagccaactgcatcatacaatacttaaaaggcactccaagacaatgattatttttctatgccacaacttttgaatcatttaatcttcaagctttcgcagatgcggattggggagcatgtttagacacaagacgttcaatatcaagatactgcatctttcttggacaatcactcatctcctagaaatccaaaaagtagtaaatggtgtcacgatcatcagctgaagccaaatacagagccatggccaatgcaacatgtgaattaacttggctccattcaatcctttgagattttagcatcaacataagacttctctcgactttgttttgtgataacaatgctgccctccacatatcaaagaatccagtatatcatgaacgcactaaacatgtggaaattgattgtacctaattcgagaaaaaatcaacaatggcatcatcaaaaccaatcacattccatcaaaatccaacattgtagacatcctcaccaagtcactcttccctgctcagtttcatgaactcgttgctaagatgagtgtcaaaaatctttacacttcatcttgaaaggggctcttaaaatgttatttttgttatttgcttggttattatttttgttaaattgttgtataaattatgcctcccctatataaggacgtgagctagctattgtaatttccaatcaaagataatgaaaagagttttcattctctctctgttttcccactaacatggtatcagtgcaagaaaataaacaaaagactattcgacccaaaaaaaaaagtcgatcgaagtaaaaccaaaaaaaaaaaaaggccaccaaaaattcaaaaaaaaaaaaaa

SEQ ID NO: 118269 - DNA, 2074 bp, Cannabis sativa
  modified_base (1745)..(1764): a, c, t, g, unknown or other
tttaagatgaggattaactcctaaaatgatacacacaacaattgcgttccagttagcagcttcttcctagacttcttcaatatcgacctggggcactttaatcccatccttcgtaatgggtgctatgtatgacaatttagcatcaaggtttagggttttacctgcatcaaatcgcttcctctgctattgtgatttagtaacgaagtcctcgtgttcaacttcatctgcccaattcgatgtctcccttgttacctcgctgccatcgcatacttcttttctagcctcttgatcaatctttggaacgcatcctgactgtaaagcttgagcaataagttctaggccttccgaatctagcacctcttcttggatctcatcttggattgaagggggttcctccacattcagcttgaccacaggctttcgaatcaccctttccttcttcaccatggaagagagaagatgagaactcacgccttaattatttttattcttctctataattttgtttactattaattatgttgttttataacattttattgaatcattagattaataatatatttttacaagaatatattttatttaatttatcataatcattcatatattattatatatttgtatgattaaaagtaactatatatattgttattgttcggttgtattttgttaaagttaaattttgttagttatgaaaaaagtttgttgtggtaaattaaagatttattgcctatcccaaaaattctaatgaagatttgaagatcttgttgatgagataagtttttctattccttttgatcaaatcaatttagatttattaatttgtcatgtatattttagtttgttagactcttatttttgctataatatttttgtaggatctcttacaatcattcaagtaggagtagttgcttattgtttggtctacatttacgctttaagattgattgtaatttgacaatgaactttgctttctttatgctttacatcgatgtatgatcattaaatgatttcacaagtttacttatcaatttttctcgtattttttttttaagaaaatacattatttaattaaaaaaaattaagtatatgtatatattgtacttaacatcaactaattaaacttaattaaaaaaaaactagttatacgtgcattgcacataacatcaatctagtaaacatatataaatgatttgacacaaggatttaaaggtgttgtttcattaaaatagaaagaaagagcaagtataccaaaaagaatagagcggagctcaagagagtccataaaaagaagcttagaagatggagagaatgagtgaaacacacgaagagataaggggataacgtcatgtgaaccaaatagaagagggactgaagagtgagtcgtatcgattcccgtctataaataaaagacctcaacatacaaatgggaggtaaattcatgatcacactaaccctgtcgaaaactctatcaaagtgcttctccgagagaacacatctcacaattctgaatgccaattgaggagagaataaccaccaatttaagaggaatagagcaatgaagtagagataatttttaataaggataatctaatgtaaataatctgagtccaattacaacaaatagcatcaacaattacattcaaataatttaaattgatttgttttttttttttttttgagagagtaaattgatttgttttatatagcaatatgtatggtaattattattattattattnnnnnnnnnnnnnnnnnnnntattattattattattatattggtaaatggatcagttgtattgcctaaaaaaggattacaattaaaatataagacccctatctacaattaaaaatgaataattatctattaaaaaaaccgactaattacaactcaaaaatttctataaaatcaatatttatcatttacaccaatccctttcaacctttatattaaattctattattaacatcaaatatctataactatataaaaatgagaatgtaggtttggacttcctacattaaattacaaaaatatccttattatttgggcttcttacattaaatta

SEQ ID NO: 118270 - DNA, 2073 bp, Cannabis sativa
  modified_base (1857)..(1860): a, c, t, g, unknown or other
  modified_base (1910)..(1946): a, c, t, g, unknown or other
  modified_base (2010)..(2024): a, c, t, g, unknown or other
aatcggattttctttttccttagtttaattattattcctggtcgtgtttgcttgtttaattagtttacttttattgttatctctagttgtttgtgtattaaatattgtgtggttagttttgtgttagtcatgttatttggtaatttttattttgtgttaaattgtaactgagaagtatattttatttattttagcttggtttagcgtagcactcaatgacgaaaaaatatccatttccctccatctgtgtatgtcttgatttttgtgagttgcaaatgccaagtttaagtgctattgggtccaaatgctggtctaggagtagttcattcaataaatgtgtacttttactatcccactgtttgttttaaatttttacaatgactaacaccttgagagagtttaagcttctagaattggttggtgtaacccttgaggcaaaatcctagctagttttacaacttagagatgatctaggccatccttggacgattgagcatttcaagctaacccgagcataatcaattgtcaatagtcaccctagttgagccgaattgcctattttttttttcttagcacccatcaaagtttaatatacccccatacacataatttttatcattcataacccaaacttaattgctaaaatgtatcaaggacaaatcaaattattgaggtagggaagtgagaatataaattagtaaaacgtggttaaacaaagttacattagagataatgatgtgatgtgagctgaggtggtgggagttgattcaatgtaaatataaagccctcttttgctatatatatgcataaaaatatagatgctacaactactgtcactgttaaaaaaaaatataataataatagtagtagcagtatgtaaatgaaagggagagaaaaaggcaaatttaaatgtaagtttggggtgtaccaccccttactcatgagaacaaagtggcattttctctctttatctagttggtttgataaatatatgtatatatatagcaagagagttggagctggatttagtgatcattgtggtttgagaatgcatttttgggtgagtgcttgagagaaagagaaagagtccttgataaattgagattgttaggttataagccataaaagtattactattcatcctacccgaacctaagcctcacattacaaacctagtaaagtcattttgatctaaggtgtaaagctagactacattaatggagagggttgcactaattcaacttatggaagcaaactttttaaacttgtggatcgagggtagtcattatagaaattcaaggtgttggtgggaagtatttgcacactctattgattgaatcattattggtaagtattatggacataaatagcatacaaaactcgattgaaatacacaggttcaaggcatattcactaccatcattacacttccattccatctaactctgagagcattttcttcgctaaactaagtttgaatgagcagtattttctctgttgcaagtattttattgttgctgccattttttgttttttgtcgttttattcttttaggttttcattgaggacgaacaatattctaagtttggggtgaaataactctatggtatagagttacttttagggcctttaaactgaaattatcatgaaaagagtaatgaaagtgtgtttgtttgattaactttgattagttttatcttcaatttctatttagtaagctagcttctaagtcttgtagaaattactatttttagttgtgttcatttaattgaatgttgtttgtttgctgttaggaaagaagaataaaactactagggaaaaggaaaggatgcaaagactgttgggaatattttaccnnnntctagatttactaacaagtatgctccattaacatcctaaatatgaattcnnnnnnnnnnnnnnnnnnnnnnnnnnnnnnnnnnnnnaaccttacattgattgcaacagaatatgagaactccttccgttcaagatctctagcctttgatnnnnnnnnnnnnnnnagcattatcaagatctaaacttggatctctttctctccttcgggtttgg

SEQ ID NO: 118271 - DNA, 2101 bp, Cannabis sativa
  modified_base (2054)..(2056): a, c, t, g, unknown or other
ctggaactatcttcatggacaggacgatgtgtcgcgttgggcggaggaggagctatgtctcctgtgacagcagaggccggaggaatgatcggagggttaggaggaacagcaggtattgaggatgaagtattcggcaatggagtttggccggaattcctagaaccagttgcgcgagttcttgccatggcagcgatcgtgagagagattgttttaagcgactgataccatattaggaaagaatgaactgaattgtattgattgacccaaaaacagggtatttatgcaacaatattatccagaaaataagggaaaagaaaacagaaataacagaacctaacaaacttcctaatactgtttataacagaaaataactgtgagatatttaggcctttaatacacctcaatgagagccaaacaagctgaacaaacagaaaccaagccagaaaccaaacaagcagaacaaacagaaaccaagccagaaaccaaacagaaactcatttgtttataggtttgatctttctaattattggtatattttggatatctatattatattatataaattctaaagattttggacgctgactttgtcgcgagaaataatctcacacagtcatggtaagttctactatgataatattttcatccatggtgtggctctctagaaagcttgtctgatctctacttccgatttgggttaccaatggtgcaggaggcaattcaaatcaccgtgaagagtcggaaatacgagccgattgaaattattaatagtttttatgaccatgcgtgattttagccgttatattgagagtttattagcttaaattatgtatttttatttatagtatatatatattattttatatttcttttaaattaatgtcatttatttatgttttaatattataattttatattaattacatactgatatataaagttattaataattatcataagaagtggacttttttttgaataattattattgtttttcataattttcatattttataaatcttattctgaattcatattattataattatatatataataattattatttattgtcattttctttttgattgatatgattattagaagtttcattcatttttctcatttggttttacgtaattaataatttgcattatatatataaatttttttagttctatggttcattttgattttgtattaccagtttgctttattttttgacttttgtaaagttaaattggttagtcttgttttcaatttgttatttcgatttgttatttgattagattaatttataactgtttaatcttattcagtttttgatgtattaaaaaagttttatcaaaaatttaattttataatgatgctttttgaagaatatgtttctaacaccctactaaattaggcgtattatcgagatttcttaatgttgtccactcctttactaatcaaagagtttataaaaaaatgtggataatttaaaattttcgtgattaacctttaaacttaactaattaaaactttatataatccgagattccgtctttaaaatttacaactgtataacaaaatatttaattacagaagttgtcacctagcgagtacaaaaaaagcctgctgccccaaagatcgaacactcttggtctaactgccccgatatgtacaatcttcattagctcgagctcactgttgtttagcctttgtcttatccttacctacacatgtaaatattatctatgagtcaccacacacagtaagaaaagtataatcataacataaacataaactgaattataactaggcgcccatacacccaattataatcctatctcgcgtcccacgcgtaccgagtctagaacattcatacgacagtactattgaccataatatcagcctatacttgatactctagtcgtactgatgtgatagagtcaatatgtattatgccaaacatatatccgtcggtattcagcgtaactttatgtacactaatactactattgacttcgcttttagctaacgacactgagtctttttgataagcgataaannntatgtcgtaatgagaatatatataggaaagcaataataagacaca

SEQ ID NO: 118272 - DNA, 1784 bp, Cannabis sativa
aagtatcttaataaagcacaagcacaaagctacataatatattctgtagcttataccaaccgaaaactctaaagttaaacacaatataactcattatatataaataagtttcaacttaccataaaacatataattaactagtacgaatccattgaaagattcacaatctctcatgcaacataactagcccttacattttcatcaattaaaaataaaaaggaaaaaacactactagtgcatagaaagttacataatctctcatgcaacattttcattaattaaacataaaaaagaaaaaacactactatttcatagaaagatacataatctctcatacaacctaactagtccttacattttcactaattaaacataaaaagaaaaaacactactagtgcattgaaatctctcatgcaaacaggaatgaaaaaacattacataatagatgatagatgaaatcacattcaatccttacatatatatatatataatattataggtcacttgactgatataaattcataaaacatgatcactacatttttttagcaattatctccaacagtttatccacctttgcaagtttctttctctgctttgaacatatgcaactccaggtctctcactttgaattggtactccaggagcttatcaactgagttcaatttcatatcctctatcaactcattcatcatcatgcaatctgagcattcgtggtcatcatcttgtggttgcttctcttttggattcttattagcaccaaagttattttcttgatccatatctaagaagagaaagataaattgatgtgaaaaatagatgtggagttgtgatgcccatcaatcaataagccactacttatagtgtgttcatgttattattatttgttattaaggttggtgagaataataaatgcagtgtgtgaagaaaatttcacacccattgcaacaattgctacgtattcaatttttgcatggcaagtttgggaaaaatttagttggtaagaatattaagtgataagactactattgcgatagcaactatatatgaaaattaaaaagaatgagacaagagagagcattaaaatgcattggagccaataaaacctacaaaaaggtagcctttgtaatatggaatttgtactcttgacgtgtgtacgtgatttgaagcatgaaagaggaagtttttttgttttgtttttttttttgggctggaaagatcagaaatttttattaaaacaccctctaagtgaagacaataccaatgcatatagcaaaaaaaaaaagtgttatgccatctgtgaaagatgggacaagtcatgatattttgggacaaaaataaattaaaagttgccgctatgtaatgtgctatgtaagtttttctgaaagtcttaataaaatatattgatgctcagattagtgtgcaaaatatgtgttgtcactttttacttactaaaagaaaaaaaaagtctataataggttatgaagatataggattattactaaattaatatgagattatcacttaggttagcatgtatagtatcagagaacatccaagattaaaaaaatcttaaaaattaaccaataaatttatttttcttttgatgcattttttaaatttactttttactagattatattaattttattaagatataattttataaacattatttaatcggagcctaagattgttcccaaataccccataattatgtgaggtgtacatgatttacaaattattgcgacgatcgactagatatatataactccatagtcggt

SEQ ID NO: 118273 - DNA, 2067 bp, Cannabis sativa
  modified_base (892)..(896): a, c, t, g, unknown or other
ggactgtataaatgtttaatgggccggcccatagtatttttgtaattttttttccttttttttttctgtttttttccctattaaagaaatttaattttttattttatgataaaataataaaaaaaaattaaaaaaaaaaagagaatataataaggattttatttttttgaatggtaaatcaacactttattaactattaattttagttatgaaacgaggcaataagtcagttgaaatattcttcaaattgaaacgacaatttgaatataatatagaggctcttataaggaatgagttaccatatttgctgatcgttttacaaaatgaatcgaaacacttcttaaagaactaattaaagttctacaatcattaaccacttgaccaaacataaaaatcataaaaatagaactacgaatggcttacatcacagagagacaatctgtttcaagtatcacatgtggccactgacgctcctttatccaactcaatacttctcatattcccattgcttcgacaacttcaggagaaactgatccttgaagtagccttgtgcaacattcaatcaaaagtcctcttgcatcatttttaagcatttttatttggtattttaaaattcacttaaattataaaaaactattaaattttgtcaaaaataaatacattattatcaaatattctttaaagtagagatgttgtaaaggacacaattaagattagagtaatttgcggcataaccttcttaagtggctaggtttttgcaactaaaccccaattctaaaattttggtggtaaaaccccctaaactcaagttttgttaacagttaaccctttccatctatttttagctgttaactgccatggtggaatatccacgtaaataaatatttaaaannnnnaaaaaataattattttaaaaataaaaaaaattctttaaaaaataaaaaacaatttcaaaaaaataaaaataaaaaaaccctaatttcctaattccctctttctcttccgcctctttctctttcgcctttcttcttcttcttcttcttcttcttcttcttctctgctaagacaatgggtacccactatctctctaccaatctcgataaagcttccctataaaggctcaagctttaagggtctggaaaactcccatctctcgacccgtaatcgagaaggggcggttcgagaagaaaaccgtcattttcttggagcaacgagggcagttcacttcatccccgatgttatcgtactctcctctgccatcgccatttccatcgaaggtcgggccgccgtaattgtagcggaggaggtgggaaaaaggttgttgtattcggagtccacttgtagtggcggtgatgtgagtgtggggtataggacgatggcggaagaagaaaccaaccaccggcggctgtgactgtgcatggcagagagcatctgctcaatatgatgaagggcagcatctgtttcgagctgtgtttgtggccgttgcgttgaagtttaggtatgccttttttccatggaaagggaggtttaggttttgaatacagatacagattaaagagacgtccctccctagcagtggaggtttaggtatttagtgtttaggtttttttgattgtgtttggatttgaaagaaaatgttgaggtggtggtggtgggcagttgtggttttgttgaggttgatggtggtaatgctagaagaagaaggaggaggaggagtgcatcaagatagaagaagaagaaagaaagaaaagaaaagaaaaagaattagttttctttttttaatttttatttttttaaaattgtttttttattttttaaagaaaaatatatatattttttattttttaaagaaaaatattattttattatttttaaaataaatattttttttttattttttaaatatttatttatgtggaccaataaaattgtgccacatatacactgtgtacacgtgaatattccaccgtggcagttaacagctaaaaatggatagaaatggctaagtgttaacagaacttgagtttaggaggttttaccaccaaaattttaaaatttggggttagt

SEQ ID NO: 118274 - DNA, 1673 bp, Cannabis sativa
atgagtttatttagggcataaaacccaacatgttagagtagtggacgttggacaaaaggtagtttactttttttatgtgcgcctttccaaggcctgacacatggtaaagaccccagattttgtggcatttggtgctagagaagcaccacgtcggattggtcccagaaggtcgatgcttcgcgacatccgttccactactcgcttcgggatatccttaggggtatatgtttatccgtcttctgatgcgtgataatttggttatatgttaaccttctggattcatctttctagctttacccataataaagtcttggttaaatctggaccccagtctggttcaattcttggactatttcgttgacttatttgggccttatgaatgggcctacaagcagatttgaaatgataataggcctaaaaagttcagaaggcatgatctggtacatgttaaagtttagtgcaaagatcctaaatagcataaatgatatatttggcaatgtatagtgataaaagaaaatttgagttattttcctacaaaatttaaaacatgatcatttagttacttaatacacaattaagggctattttactccaagccccaaaggtaaataagtacattaaaccaaaacaaagtttaaaaatatgtggaaaaattatgtctaaatatgtagaaacgaataaataaaactcaagatatatactagttcaagtttgatagatcgatgtgatttatgactctactccaattctgaaacacaacactaatctttctagaataggtacaatacagtcgagacgagattttctgttgagttctcataaagtgtttcaactctcacacttacacccaagagtcttctttacttacagaagatccttcttacaaaactcaaacccaatctctctcttttctctgcacctctctctctacctctcaatatttctctctcttaaactctcaatctcatctcaattttgcacgtaatcccgtgttattcaaatgacaaagttaaggtggcatttataaacttaggatcaagatcttaaagttgatggcaacaagaaacgaggttgttaagttagttagaaataactaacttaaccaactcctcttgagcaaagtctccacgtcaacttaagtaccatggcctccgagaacatgtatgagcttccaaactcatggaccaagtatactcactaaaggcacttccgaataggactaaatctactatagtcgactattggaatctaccattctatgagggataactggcaagctggaactcctttccagggaaaagctagctatcctgagaataagacccggagtggatagtcatttaggaactcccttccgagatcgataacaatgagtgaacaacttcttagaactaacgtttgcagagtctttttcatttagaggaactgttatagtgagattttctcacctagaaactcgagaccagactcctatgaaaatgacacgtgtactcactctcctcagggaaagatgagatgccattgagtatttgagtgactcctcgagtataaacctcccctggactagattcagcgagatgatgcagccatgaaaaattctagtcgcattcgtactgctcgcatagggtaggaccaaggtgttgggttttatgccgtaaataaaactcatttca

SEQ ID NO: 118275 - DNA, 1360 bp, Cannabis sativa
  modified_base (47)..(53): a, c, t, g, unknown or other
aatactttgtcacacttaattatttataacttaattatttaatctannnnnnntattatataaaataatataacaatgagatgagtagtcctctttatataagctaaaagactcaatatgcaagttgtcatatttgacagttaaatcagttaataaacaactaactaactaaccgaatcttaattaagggtttaaggaataagaccacaagacatattgggtttttcaccacttctgcatggaaaaaaaaatgagctttaatattcaaaaatggaaagatattgtagactgagactacctcagttatttaagagacacattatttgaatacaacatttataaatgaaaaaagtaatctacacaaatcttaaacgaatagagagttaattttttcggttcatattgtgagtgaacaagacaaattttgcaagaacttttactgtaaatgccacattaattggcttatactaatgtcattggatgctttcttatctttttaattaaaatattaataaactaatcaattaaagaaaataaaaggtaagcatatttaaggttgaaagtcaatattttttagaaaatattgtatatttgaaacagcaagactttaaagactgtaaagaaaagaaacaagatataaaagaaatgctattttagaaaatctcttagaaataattgcatgtagcaacataatgaatagaaatgaaaaaaataatgggcctttaataaattatcaaggcccactatcaaaagtcattagatttttgacattcaacttcaactcatacattaaaaaatataaaaaattcaacaaaaaaaaattaagaaaatcttaaaataaaaggaatatacattaataataatgttaaatctaaacttctttatttcaattttccaagttgacattataaatgaaattatgaaacttggtaagataaatattgatgatctaaatcataatgtcaagaacatttgactaatgtgtgctttattcattagagtttcaaatctaatcaaaataaacaaataaaagtatcatatgtctaaataagctttattcaataatattggtaataatgaaatgaaggatcttatcatgtctttagtcttgccttagttttttcttttttaatcattttatattaaaagttacatcaacaatatataatttaataacacaaaatatgtcaataattgtttccaaacttacaccaaaataatattttaaaaataatgagtgttgatctcttcacaataatgagagagagcataataggagtaagttgaaaaatactacttttattaattaattggtcaaatttacttctaattttatatttaattgaaacatacctctttt

SEQ ID NO: 118276 - DNA, 1281 bp, Cannabis sativa
ggccaacatatcattggtactcctgagactatactctccaaagttgagttccaaccgctgtgggtcagaaacccacccacagcggtgtgggccagaacttgctcttgtggagcatagcccaccatgaaccctctctctcttgttgcctcttttaactccgccaagattgaattgtcgccatcctcaatccccactaacatgtccggccgcatcgcccataagaagcgatgcttgctgttcaccaaaccataccaaaactcgattaattcgggttttgtcattatagcgacgctaccaaaactaacatagataactgattttggaggttgagaattgagccaagtgagacagcttcggtctacatcgtaaagactattggacaacttgtcatttaggtgggcatgaagaggcccaattgtgtaaatattagggcaaaactcagtcaagcgattcacaattggaccttcgagatcctcaaatgtattgagtataattgctcgggctcgacgactatggttagccacttgaggaatcatttggaaagctttgtcagttgtgtcactcactcggcatagacttggcaaatcacgacatcgtagaaaactttccattcctggcacacttgttacaagcctgtccatatcttcatataaaatgtaagtaatcaattagtaaaactaatataatcttttttttttactaactttgatctgtactcaaatcatgtcccttaaactttgaaggttgttaaaaataccccctaaactaaactattgagattgttggatttaaggactttgtctaatttcattcaattttactattttagtgattatttatttactaaactatgctcccagactttgatatatattaattaatcctgcctctcaaactttaaaatatactagatcatgcccctaaactttcatccatgttagatttttttattaaaattagacaaaagtacttaaatcaaccaattttaatagttcagtggacaattttaacgactttaaaagttcaggggacaaaaatttataattgactttttttttttttataattttttgagtaatttgcagcataaatacttaaatttaattcccagttgcaaataaatatctaaatttaatttttggcgataataatacttaagttatatttttggaacactactgtaggtatctaactgttaaaatattatgtcattatttacgtgtcattttcttattggtatattttagttattttttttatttaatgacttagaccaattag

SEQ ID NO: 118277 - DNA, 804 bp, Cannabis sativa
  modified_base (750)..(758): a, c, t, g, unknown or other
gtgtgaataattctttgatttattctacaaatacaaactattagaacatgcatgaacctattgatctacttgcttgtctgtgtattgtaatggaaatagttttttttttgtagcttaatcttttcaaaatttcaagatatagattactgcccaatgcatcttaccaaaccaaagaataaaatgacaatcaaataaaatacatatggaatggttgaaagtttaatgtatacgttttttttacttaattggcaggttgctctgtacatcatatgcttttgtaattgtaggtatgaagttgtttatcctcattaatctttttaatcacgattggttgttgaatgcactcgattactctctgagaaaaagagagaagcagttgaaccaatacattttctttttatcaatgaaatactaagaatggtgttattccaaatttagatatattagtttctgcattcatttgtactcagacgtggtatagtatgtaagaaattaatctgagtctaataaatgcttcttctcttttccagattatgagagatccagacacaggaaattctcgtggtttcggttttattagttacgattcttttgaggcatctgatgcagctattgaggtatgttgcctacattgataatgcattttttgtaaaattccgctaatgaattgatgaattaaacagttgattagttggtttctatgatgattaatttcaacgaacaacttaatttaaatatatatatatatannnnnnnnnatatatatatatatgggtgactatacaatggttacatttttattgt

SEQ ID NO: 118278 - DNA, 1487 bp, Cannabis sativa
  modified_base (40)..(73): a, c, t, g, unknown or other
tttatttcatcgttttaggaagttcatatttagggtgttnnnnnnnnnnnnnnnnnnnnnnnnnnnnnnnnnngtaaaataaatttccaacagacacatccatactttccttattttggcccataccattattgcttgacaaaggcccatctttattttcactagacaatctcctcctttttgggtccacccattccatgccatcattgattacaataggtccatcttttgaattaccttcccaaattagatttcccccttctacccgttggtccacctttgaccctattggattattaaataccacaaaattctcctcatcaactattatggctttccccttattacgctcccctaccaatctctcctgatttacctccaatcccatactttccatattgggattttctgaagtcaaacctccttgacccaccaccggccgtttgctctcctctctgatcatcctctccgatcgaagccattttgcccctatcgtgtgttgtcgacgccgaggagcagccttcatttcaatgctaaagcttttagtgatcaagtgtctcggaatatctagagttttgtcgcagaatctttccgaatgtcccaacacaccgcaaacaaagcaaaatgtggtgagatcttcatatttgaaggttgcataacatgacggtccacccctcatctgaagcttcattctccgttttaacggcttatccacacagactgagactcgaacccttagataatccttccacacaccattaaagttcaagggatcagactctataaactgtcctatgtagttccctatatccttcaccacagtagccgatttgaaccctgaaatcatcccatgtaattgcacccaaaaagccaatttattcagagttataagtcgtggattgtcaccagctttcagcctttcaaaaatcaaagggactcaatcgaaggtccaaggactaccttcaattaccctctcaatatccatttcatggtaaaattggaacaaaaatctatcttgtcccaactctttaacaaacatccctctcacgggtctccatagggaagccattttatgttgcatagcttgaaagtcaatagatctatccgtaagaaatcgtcctaccaagcaccatcgttcatcaaactcctctatatccaccgtcccctcttcatacatcaagaatccttcatcatccccccccaattccatatcagcatattgttcctcaacaccaatgcccgccatatttatcccgttctaacaccacaaacaaccaagcacaaagacagaggtcaccaagaaaccacgatcaacacaaacagatccaacccaaaataacagactcaaaccatgtcgatatagacaagacttttcatttaaaataatattatatctatttaatgttaattacatataaaaataaaatagttatttattaaagaaatatatttattaattagtaaacattaaattttattgtattttt

SEQ ID NO: 118279 - DNA, 1476 bp, Cannabis sativa
tacatttaaattattagactattaatcgtattccctctagttgctacgtacttattaagggtataattaatacaatatacacacttattatatatgtttcaatttcttgacattaagacatgcatatttgattggtcttttttctttctttataattacgtgtataacaactcgttattaattaattaccttaccaaaaagggcattcaattcttaccgactagtgttagttagtttctgccatctcacattgttgtataagacttttttaagctaatatttagttatttacatgttttgaagacccgaaacaagacatggtccgcgtataatttatagctttatgaacttttgaccaatttagttacttgtatacatattttacgcaacttagttaatgtcaaaacaaagaggtcaatttatgacaaattaaaaaaaattagttaagggagaactggtttgatttattttccatgtatatgcaaaaactagcatgaaaggccatccatctattacaatcaacgtggtagttagtatttcattttcctcttcccagcaaagcccttcttagaaaacaaaaattcacaattttattattttattataatacgaggcgtttaaaataatttgattaaaaaaaatattatcaagaggaatataattagaagaaagcttactgtgtgtttgataatgtatgaaaatgtttaatcagatttcatttaattagattacatcgtctagttgaaagcataaatctttcatattatgttaaaaaaattaatatattttttaataaaacaaaatattaaccatgttatttataaaatataaaaaaattattaaaattttcatatattcttttaaaaaaacaatatttgatttacgtagagtttttttttcataatatttaaattacatttatttcactgttttttcaaaaaaaaaaaaaataataataaaaagtaaaaatatgaagacaaatttcttataaaacatattactaataagttatttaaatttaattaatttcttaataaattaaatgctacttcatggtattatatataatggtaggtaatatatcaattaccaccaagggattaagattaacttccactagggtaattagatttctattgcaataagactccatgacataaaaatgaaaaccctcataaccaatatggtaatattgattaatattcttatactaggattactgtaacactctcgcgttatgcttttattgggcatctacccacaaacttataaatcttatacacatatacatcactttacctattgaaatgatgactgatcaaaccaaccaatacaagtcttttcagtgttactactacaaaattatatttttgcgttgatcaacacaaataaaccatgttaaaaatttttacggttcaagaccgacgcaattttgcatcaatttaaaacagatatacagaaaaaaaaaaaaaaaaa

SEQ ID NO: 118280 - DNA, 1753 bp, Cannabis sativa
ttttttgagcatcatcttgaggaattttttcatgggctgccacctttgatttcttctttggaagagctcgcccacgtttcgacaatggagaaaaatcagagtcatcatcctcaggtcgtttacccttgtttctattagctaaagatttcaactctattttagaaatttttttttaacaggagaaggagttgatgaagaatgagttacaaccatatttatatatagattaagagaaaaataaaaagaggaaaaacggttaatgggagttgaaaaaaaaatgaagaacaaaaagaagagtgaaaatagagttgtgattttagagagggaagtgttcagctatgaaggttattatttttaaaaaaaaaactgaaaagaaatggaaaataaaaggaaaaagaagagaaaaaagagagagaaatgatgtatagagtgattgatgtaatacatcaatcaatcacgtgtcaaaaaaggttgaattgtatgtgcatgtggtaaaatagtaataaaatataaaagatgagtaaaaaagtttgtttagcctgtataagtatttatgtaataaaattatcattttagatttttggtgtaaaaatttctttagtttattgaatcaattattaaaatattcaaacaattaactgtgccacaaatatttagtgggaaaaaatcatgtgtgatatatttgaaatattgggaataaatagagttgtggtgttttactattttaccctaaagttatgagtttacttatgtgggaagcaagaggtaattttggaattacccaagaggttaactttgttttaaggcttctaggtgtcttaagctgaatatagtaggttttattaatcatttatttattaattattttttttctaaattaactaagaaaaaaaaaagaaattaaagctctttctccctctttgaacccttattttcagccaaggaaaaaatagaagaaccaaggcttcctcatctatctattttctttttgatttctagctggttttgggagctaatatctgaggtaagatcctagaactattccttttgaatttttggtagtttcctttggtgtgagcatgcaaattttaagattaggttctgcctgaatctagggtttttttgggttgatttctagggttttatcaagttatttggagctttttttgagatatatttattggttgtttgaggagttaagaaagattgagtttaagaactcaaacttgtctcaacaatggtaaattgtatttttgagctatacttcattaattattttactgcttgggttttgtttgttggggcttaattaggtgttctagagagtcttgacaagtttggggttgttttcagctcaaatggagactttaatatttttctgcaacagaaaacaacagactatttctgaggaaacagtccacccattttacttgtgagaacctaaaaaagcggtccgtcatttttacagaaacaacctacccttttttaagcagttttttcacaatctcgtttttttgtgttttctcgatatatacggtgtttccatgcctatttatcgatagataaacttttaattttgagtttagggtccccgtaaaggttttagcaagttatttatccattttgcatattatgacataagcctccattcaacgagcgacatttctattcaggttgactgacacacttgaatcaggaaatgaggtaagattagtataaaatgtgtatacatatatgtgtatgtgtattatat

SEQ ID NO: 118281 - DNA, 1631 bp, Cannabis sativa
ttgacacagaatatttcagctattaaatatgttctttaatccatacaagtatgaagtttaattccaacttcaaaggaacttctccatattttaatttaatgaaatccaattagaaacactatctacctatttctgtgtaattgtgatgtgtacaatagtctgtttgtgtagaaattcaattaaatttcctttgaggcttatgtcttaactaatattcaagttcacataatataagaatggtaactttaccttaatgtgtacgaatatgaatgataacacaaaaacatgtcatactaatgttgactacaaaaacttttaacaagagggttgaagtactgtagtcattttcagctataaaaaataaataaataaataaaaatttaccttatgatagaccgctacttatctcaacattaattcttaatggtctagggtcaaaatagcccacaaattatcttaatctgattaaattttacttcaaaattcaaatagaaaaatatcactaaacattacacatacattgtataaacacactagaccaaaacttaagttcaaaacataaacggtaattaataacataaaaaattaaaacccaattaggacttacacttcttttcaactttaggtcctcgtcttttgagactttcctgtgaataataacattaaaaacgtaaataaataaagagtttatttaaacttagagtaaaaacagaaatatttgagaatcacaattattattatttctttttatatatatataaaaaaaaaaatcatttgaaacgaggaaaaaaaggaaaaaaaaaaaaaaccatatccaatatatataaccctgtaaagaataatagatgtcagaagcaaaattataaaactaagaataataatttttttgaagcccaacacattaaaaatggttaataattggccttaaaaaaaagttaatcaacaatccaaaacacaaagaaaacattgtaaagaagatatatagatagttacgttgaattcacgcagcaaggtctgtgcctgggtagcttcttcatctttttcgttatcattatcttcttcaatgttcagtttactgcattcgttttaaactgttaacaaatctgcaattatgtatgaaaggaacttagaaaattgatataaagaaatgcagaatttgaacttaattacctttttggaggtatagatttgggcttcctgccagctcgggctttgggagcaaacctacgctgaagaaagagatagaggaaagagaactgagtcaaaaaaatggagatctaagctgaattttcatgaaattgagagcacaaactaattttttttattacctttaccggggaagaatccgagctatctttcttcatgattttctagttgaagaagacggaaaaaaaattgagacggaaaatagaaagtcacggctcgaacctttgagctcctcgacaactgatgaaaataattccgctgttaccaaagttcttattattagggtttggagtttaaaatatttaaatgcactttatcaaataagaaagcgaaatactccccaagagtttaagggctcgtttggaacgctgtattaggttgtattgtattgtattatatttaattgcattttatacaatattttt

SEQ ID NO: 118282 - DNA, 1096 bp, Cannabis sativa
atagtaataaaaaagttccataattaaaaatgggttagctatttgtagaacttgaaaaaaagagagattaggtcttgttctcatcggtccatgtgtcccgctcaaaatagacaactcttttaagctctttcattaatttatatttgagtcgagcccttctcgtccatttgagctgaactcttcatgtaaaattgagctgagctcttcacttttagtgaaacatgtcgttaaagtatttcttgcaattaatctttatctaatactaggacataattaaacaaatgcatcaattacataaaaatgtgatgcatataaataactgttatttaatttatatattggcaaaataccctcacaattgccctttaataaaagcaactgagcttagttctcttaagctagaagaaccatcatcattttttacattcaagcaaaatgtttgcacaattgcccctcgatcttaaggggaacggagctcattactcttcaaatttaagaattactgtcattttgtattcatattggggtttttttaattctattagcatcctctgcccttattggggtctttacctcaattgggcttctttgccctgacactgaaactctacttatgccacaattgaggtcgtccctagataattgcctttcgttcttagagtaggcctggcatgctctaaggatgaatatgaagcataacaacattgaatattgtacattgtgaaggtaagacttttactattttcacagccttgaagttcattttgttattttgttttacgcatagagtaaatatgagttctttttgtgctaagagtatatttgactctcttttgtgttcatggtacatttgtctttttttgtgttcaaagtacacctgagtgttacatatgagttttttgtacctagagtgcatccaagtcattctttttatgctcaaagtgcatctgagccttcttttatgttcagagtacatccaagtcttattttatgttgcttaaaaccaatttaaatatatatatattttttatttatatgtattttttttaaatatgccaaaataatattaaaaaaaagaacaactgaaaaagcttaa

SEQ ID NO: 118283 - DNA, 821 bp, Cannabis sativa
tgataactaattgaaatggatttattcagggcacaaaacccaacagatctctccctagcacaaagacccttatcctctcttactacctcttctatttatctttttcttttatcgttaggtgtcaaccaaacaaggtcttatttggacacgtgtcaattactttttatgagatatctttacataccttgacaaatatcagttgttttctcttaggtatccatattctatatctctcccacgcaagatgtgtaacttccttatctagaatatttaaatctcccgtcttgtatatgttttccatcttggacataagtcaactgttttggatgtatttttcatcttggatgcaagtcatctatcttgtttatatgttatcccatctgaagtttgttatcctatccgaggtatatcatcctaactgagatatgtcatctcatcttagctatgtcatctcatctatggtatatcatctcatttgtggtatgtcatcccattcgagatatgtcatctcatctaagatttatgtcatcctatatgagatatgtcatcccttccaagttaagtcatcccatctgtggtatctcatcccatttgagatttgatatgtcattccatacgagatatgtcattctatccaagatatctcattccattcgcagtatctcatatcatttgagatatattatctcatttaagatatgtcatcccatccaagatatgtctataagaatattttattttgggaaatatatttctatttaaggaaataaaataaataattgattttctagataaatgaatattttatattcactgaatct

SEQ ID NO: 118284 - DNA, 1429 bp, Cannabis sativa
gttatatcatatatcattgagaacgtcaattgtggtggagggagatcagagaaaaaacacccttacagctgggggaattgacgtggattcttaacacttgaacactgtcaaattatgtctttgtatcacgcatatttgttcatttttcctcaatatatgaatttgaaatatcagttccattgcaggtttattgtatgacagcacatcctttacagcctcaccttgttgctactggaagcaatgttggtgttatcatcagtgagtttgaccctaaatctcttccagcagttgcttcactgccaacaccctcagggagccgagagcactctgctgtctatgtagttgaaagggaacttaagctactaaattttcagctgtcccagacggcaaatccttcccttgggaacaatggctccttgtcagaaacaggaaggcttaggggagactctcctgaacaattacatgttaagcagataaaaaaacacataagtactcctgttccacatgattcatattcagtgctctctgtaagcagttcaggaaagtaagttacctttagttaattatgtagctttgattaattgatctccatcttcatttttcttaaggattaataccattttagaccccgtgttttgcaaaagttactgatcggaccatcttttttattaaatgacaaattggaccctttattttccaaaatggtacaaaatagtaccctgagctcaattttcgatgattttttttaatataaccaatagggtccaaaatggtatttacccgttttctaattgtactacttttgagaaaagtttttcttgtgtagtagttaggtttgtactaattcctgtttatgtatggatgtgtactttggttgtagtgtctggaatttttccatgcttgttcattttactgaattcaaatatcatgttctctctatgtctcacctgcaaaaattatgagaactaatttaaaataacatatatttttatttatattcattttctcacaagtgtatgaatagtccttttagctgagttgttatttcttgattagtgagacaggaaaaaaaaggatagaagattgagttccattgtacatcataatattttttattgcaatcttttgtggtatataaagttggagtagtcttagtaatgctgttattttctgtaaattatcttgttgcaggtatattgcaattgtgtggcctgatattccttacttctctatctataaagtaagtgattggtccatagttgattcaggaagtgcaaggctcctagcatgggatacctgccgtgataggtatgccatattggagtcttcattgcctcctagaattcctgtaattccaaaaggcagctcaagaaaagcgaaagaagctgctgcggctgcagcacaagccgctgcagctgctgcttctgcc

SEQ ID NO: 118285 - DNA, 3016 bp, Cannabis sativa
gccttgtgggattctttcaaatctcacgttcggtcctgtggtctcttaaaggtcgttcgttatacccacactttccaggcccaaacgtgaggaggttgtattaagagttaatcccatattgttaatgtgtggaaataaattgtgatatataacatgaatgggctactcctcccattgccaattggttttgggatggaacctcattcatcttatcctcaaattctaacaggaaccacttccaacggtctttgtggtggagcttcaggtggacgggaaggaacttaggtgcacgggagaggcattgggacactcgacggtgatcataggaacagagcttcagatctagggaagaggaagttttggggtgtttgagatttgacgctatgaatggagaagagggtggctactagcgcgtggcttagggatcgaacggagcaacagggaaccatggttgtgggttctggtttaatccaaactgaaaagctaaaataaaattcaaaacccatctccaatcatagagaaaaaatagtagtgataatgtgacgacaaacctttgccaaccacgaagataaactcctgtcagccaccgacacttgtggtatctcttcctcattcgtcaagcctgttctctgcctctaattatgtattgtaagagatagatgtgtccgagtttgaatgagagagcgagggaaaaagaaagaagcggctgaagaataaaaagataagattacttaggttttttgtatatattgggatatttttatggacagagatggagagagtagtaaatggttatattattattattattattaaggaaattaagatttaatgggagagagaaagtgataacgtgggttggtttagacattaatatttaacatctataataataataataattttgaaatctaattttatgaatttaattatatttgatacatagactcttgaaatgagggacgactagtatgcatgaatgtactcttttttagtttgactcacgtccagctggtccactggaccacgtccaccaatgttggacgaaaattatactctaaaatttaaaaaaaatctttaataaacattaaaacatataatgtccctctattttttcatgtcaaacattattggacatgatgcaaatttttttctagtccattaatatcagacataaaatctcctcaaaaaattttcatgtccaacaccatttttgttggacataaaaaagagacataaaaggggttatttgtagtagtgcgaggtctttgagatgccgaaggatgcatggtccctatccgcaaaaaattcaaccttgcaaatgtatgcaagtcagatttggtaacttgcaagactaggtcctcacatgagaagggttcattcagttgagcatcgtcaactgaatctattttactaccctcagcactctcttcctcctccgactcgtggtcaggaaccctgaagtcttctcccatttcttcaacttcaatgtcaggggcatgccatgaaggagtgaggtacttattatagtgagatttttctcacctagaaactcgagaccagactcctttttggaggacacgtgtattcaattttcccaagaaaagctaatatgtcaatgagagactcctcgagttttaacctcgcctaagctagactcggcgagaagatgcgaataagaccgagtctaatcgcattcgtgtgactcgcattatgtaggaccaagaaacggatttaacacgcatatagtaggatatatgcgagtatcctctcgatcctcctgcgaaaacatagagatcgattctctatgatccgagttggtcccgatgacccaacagcctctataaaccaacatagactcgcatgtcttggttctatcagctcgttatacgatgtccgtaaatgtgactatacaagaacgcagacatcttagacccaactaagtgttaggtgtattctaagtccgcgagcttacgcatgaatatgaatagccaactcgcatattagaagtcgtatgcgttgctgtatttagtgaatagaaactgcacttcatttattaatgtttacattttttagcttaattattgtaaatcaatgtgcaaacggattgacaatgaatgcaatccttgtgtaaatgatcggacacttgatttgtatatacatgagtgatccaccgtgaaatgggacacctacaaactccttgaaatagtggactaagcagaccatgatctaactgaaccactatattccctttgttttcttgatatttccagttttccttaagcattcacgttcccagtttgagtattcgccgttctaggttgagtactcgcacttgttcatcatattgttcttcttattattattattattattcatttttggtgttgtgaaatttgctcgacaacatttggcaccgtctgtgggaaacgaagaagtactttgttgctaatttagagagaaaatcataagggcttgaaaccaagcaaatataggtcttaacaacgaatccatcaacatcaaaatgatgaacgttccgctgtcagggggtagagcacctcccatggatgtcatcaacggcagagtaggtcgaggtaatgtgagacctgtcaacctattccctaaaactataggcccttatgctaggggaaaaatctacaccagcagccacaacggggcactttccaccctccactccagtggcggtgttgagggtactgtccaactgaccaccaatcagtacatcgcaatccaagaccagatacgcgccctacagggcgaagtgggtggaaagaacagggcccgatgccccctcaagcacccaccactcgcacagaaaaccctcaagtaactaactctaggcgtcgtaataacagtactcgcagggaatgaagggccaacccgaaaggactcgacttgaatcaactaagctcgagggaccaatctgcgagatatcccaaccaggaggaacagactgaagaagaccctgaatgatgcaatcctcgtagcagacctc

SEQ ID NO: 118286 - DNA, 1259 bp, Cannabis sativa
tgctgttatacttgttctctgccattgatgtttgtattggaatgaccttttatagttttggaatctgtaggcatatatactctgctagtcagtcatatcatatgccagggaacaagtataataacagcaatccgtcgacaccaagaactagattagaaagactactgagggaaagagaattaaggaaatcgaatcggtctatcaatttgaatgaagaagcaaaggacggtagcagacaggttgaattgtttgggaaagatacactgcttggggagactgaaactcaagacttttccaatgtagatgagaatttggaagagtcatctccaagggtctttcttgatggttgtgaaaggcaagatggacatggacgaccttctaaacagcgtttgttggttgtagctaataggttgcctgtgtctgcaattcgaaagggtgaggaacaatggctacttgagataagtgttgggggtttggtcagtgcacttctaggtaatctcatcacttgagctaattttgtttcattagatggattgatagataaaaatttcaatccttgtttgtttgttttttcaatttttgataggggtgaaggagtttgatgctagatggattggttgggctggtgtaaatgtgcctgatgagactggacaaattgcactaactaaagctttagctgaaaaggttcaaatatctacttgtcatttcatcttgtacttttagctatgtacatatcagataccttaaaagaaattgttcattgactgcagaggtgtataccagtttttcttgatgaggagattgttcatcagtactacaatggttactgtaacaacatattgtggccactttttcattatcttggacttccacaagaagaccgccttgcaaccactcgtagtttccagtcacagtttgatgcatacaagaaggcgaaccaaatgtttgctgatgtagtgaatgagcattatgaggagggagatgttgtgtggtgtcatgattatcacctaatgtttcttccagaatgtcttaaaaaacacaacgataacatgaaagtaggttggtttctccacacaccctttccttcatcagaaattcataggacactgccatctcgatccgagctcttgaaatctgttcttgctgctgatttggttgggtaagtcaagttgttttacagcatcataatccaaataacttgtaaataatcttctatgatacgcctataattacattatgttacttaaattattaatgat

SEQ ID NO: 118287 - DNA, 1387 bp, Cannabis sativa
  modified_base (1358)..(1362): a, c, t, g, unknown or other
tattggattggattggatgttcggtttaattggattggattggataatgcccacccctaattagatctaatatataattgtatgggatctgaataggcctaataaaaatattaaatgtgatccaatgaaaatccctactaattttctgtcggtgtaattacatataattgagttttcttcgttagccctactaagattgtttatgggatttgtgaatatttgagttttaataagcaagagtattataactataacatgctaggcattggttttggcaataattcattatatatatacacccaacgtctcacatgtagatcatcaatcaaattaattagccaagcaaataaactataatatataatattagatatgctagtagttgattatcttcatatatattattatagtaaaacattgatacattgtgattgtctgatcaaaatataatgtacttttatatatatatattaccaatactcaatataaacatgaacaataatgagccatctaccaaaacttaaataatgaaataataaaatcgtgtcaatacgtaggcacaaataggagctattgaattagtcaaactaattaaacaaaacaatcgtgtaacatgatgtacgtataaatattaagaagaagaaagaaagaaaaaaaaaataacaatgcgtgttttggtgtctttctcattattaaacaaacaaactccaatttggttactactattacataactaggaaatatctaatagagtaaatataattttcaattttctgttttgcctgttattctatctattttgttaaataataatttgatcccataattttaaatatatatatctaataacactttgagtacaatttttttaaaaaatatatttttaactctaaaactttctcgtcctaactttatcttattacttaatttctataatcctaactcaaaaaagtttgacaaaattaataaacccagggatcattatgttttattttgcaaaatttaaagtctaaattattattagtaataaacatcgtctagtaaaatcatacttctcatagagaaagggggtccggagttcaagtaaatagtgaggtgcattgataagtaacttttgtgactctatttattcaaaaacataaaataaatgtgattttttaaagggttgtttttatatgtacccccataagaaattttttattcagttttacgtttttgaaagaatagttacatttgtatataatctataacttttatttcaatatacagattgtactagtgtttacattaattttttatatatctgtgaaggctttatatatatatgggtgactatttaatggttacatttttattgnnnnnatatggttacatttttctttaacct

SEQ ID NO: 118288 - DNA, 1557 bp, Cannabis sativa
ccaaacttaagtgttgtaacctgagttcaatgttcatctgttggttacactcgtcaaaaaaaaaaagtgaaaatacaaagccactaattagagatttaggatgggactaaaacttcttaaattgagaaatgctaaagggcaccagggatgtctagcactcttctatgtgttaatattgttattggtccaactaaatatcaggttctatatagtttaatgtaataaatactatatgtcccatccttcaaagttgtgaagtacttagtgagttaccaatttgagggttaggcttcttataatctttaatagaatccagtttgaaaaacaagtattttggtaagaaatactgtaagaattctatctatattgacctaagggtggtgccaccataaatgagaaatatggagtatatttttttcaaaaaggtcaatgaatagaatgtgcacaaggccattaacagtgtaaagtgagacatgaggtcttggatgaatatagcaaatgtgtgtgtcattgtcgttttattataaaaaaaataagttggtttaatgctttgtcaacttaatttttaataaaatttatgatgaatgcactatgattaagttcaagttgaaaaatactatcttatgcacttgagcaaggactctatagagattgttaaattattcaattaaagtggtggatatatattaaattcagtcaagttagttaagtttgttaggcatttagttaaatcaattggttggttttttctcataaattgtactggttcaagctctgcctataaaagccatctttcctctcttgtaaaaatagagttttcatatataataaaaatattgctttctttgttctaatatggtatcagaagaatagcacataatccttcgaagcttttccaagctttcaataatggtgaggacacgagcaacaacctctgctactaccaccgatcttgtggttgatgccactgctccaatcgatcctctcctatcttaaacttacactaacaacaataatcgagctccatctacagctccaccaacccagcaaacttagatcgatcgcccagcctacaaagatattcgcaatccgtagtattggtgcaacactgaccatccttgcttggtacttgccactccacttctcacagatcgaaacttttagccatggcaataagacttcaagatttcaattggagctcgaaacaagaccccgtttattgaaggtgctctccctaaaccccctcccaatgattctctttttggttcttggattagatgtaaccaaatagttatgtcttggattttacatttgatttccccctgagattaaaagcagcataatgtattttgacactgctgctaagatgtggactgttctacacaaccgattcaatcaagggaatgggccacggatcttcgagctcaatgaaaccctgacataccttcatcaaggagatgactctgtgagcttttatttcacaaaactcatagaaatctgggatgaaatcaatcaattgagaccaagattatgttgaaaattattttaccaggatct

SEQ ID NO: 118289 - DNA, 865 bp, Cannabis sativa
aaatataaaactacccgcaaaatttaatatttttataaaatgccctttcttacacaaaagtgagtgggcttactgtaggaacaataataataagtgggcctatccatgaaggagagcttaattggatctgttgaaaatgaaggcccattttctgtaaagcccaatgtggaaaccgaagagatgctgttttctaatttttcagtcccaaaaacgaaaggacgctttctgatttcgttgtctccatcccatcccatcccatctcatatctcatattcatattagtcttttaaaaccctaaacaaataacgcagttgtctatatctggaccaacatcatcacctacaagatttcagaaaatgtctatttatattttccatacagcttaccatctacattcatataattaatttttaagtgttttcaatgcaacaaacaactaaaaagaaatattaaaaagaatctatgtgtttagcaccatttaaaatgtgatattattattggtacaattaagtattgagtctcatacatttaaagtgtgatatcgttactaatataattaaataattaagtatttaatcttgtataatttaatttaataactttttcactaaatatttataagttacaacttcctcaaaataatattgttttaattattttttttataaatacttactaataattattttttatactaatttttcttcgatatattttcgcacattttttctacaatttagtacaattttttttttgtttttatcaaaaaacttaaattttatgttatgtttatttatattatatatatatttaatgtgacaatatttataattaaaataaattatatattaaataataatgtgtg

SEQ ID NO: 118290 - DNA, 671 bp, Cannabis sativa
tgaaagaaggagctgcaggagaaggtgcagtaggagggtgagaatctgtcaaatggggatcagatgtgtcatttggctactgcagaggtgaagatgcagagatgttgttgtgtgaagaatcagaatttagatcaagtgatccaaactgaatctgagaagggtgagcagaatgtggtacagtgggtataacaaaagctgttgcaagaaaaaatttgtggtaagtagcagtatgtggtttggaaaatattgcagaataaggaaattctgtttcattgaagttaacacttcgggcaatgtagattcttccagaggagtggaggcatctatagcctttatgatagggactataaccaagaaagacacatttagatgtcttgaactgaaatttgtgttgattataaggtctaagaaaagggaaacatgcacacccatatgttttcaagaatgaataatatggttttgtgctaaacaaacattgaaagggagatttaaaatcattaacaacagtaggtaatctattaataagataaatagctgaaacacatgcatcccaccaaaaatttaagggcatttgagcttgggctaatagggttaatcccatttcagttacatgcctatgctttcattctactcttccttgttgttggtgagtatgagggcaaggatgtcta

SEQ ID NO: 118291 - DNA, 1040 bp, Cannabis sativa
gacgcacgaccaactgacacacggccagctgacgcacgaccaactgacacacggccagctgacgcacgaccaactgacacacggttagctgacgcatgaccaaataacgcacaactagctgacgagctgctagctaacgtgcacgagcaggttggcacacaggcagaccatcacatggagcacacgtgtgcgaggagcattgtgtgcttgtcacatggaacgtgttgggtgcaaggagcgcatcgaagcatgggttcttgcgtatggagacctgtgttgacttgttgctcctcgtgtcgggaccttctttgcgcagggatcttcattgtggaacaaccccgactttatgactgagtattttttagataacttttcaaatattaattctcgtccgaattaataactccaaaatttacacttagcgaattttgggagtcaacaaattataataatccttttgtaataatgacattttattaatgtagttatacttttgaagaaatttataaaaataatttgattcaatttgcattgcagatttcagaatgacattaatagtgataaattaaattaatagtcttaaactaacgttaaaaattccacacatctacgaagaaaacaaaaaaatttaatttaattcaacaatgttgatgatgtaaaatataatactaaaacatgctcacttgaacaagaatcggactttacctttctttaacaatattcatcagcttggacagcaaataatgctttcaaaaaaataaaataaactaaaataattggatatataaataacgaaagatctaatatttaaaaattaaatctaaaataattagaaaagtagaaacaagaccaaatataatttattcattacgagccaaatcaaaatctttgtagatagagtcaatcattagttcccaactatagggcaaatagaatcctatacataaatcaattaataaaaaaaagactttgttcccgtcaggataaatctgactaacattgaacaagcaattgttgggttttatgccctaaatacaact

SEQ ID NO: 118292 - DNA, 2501 bp, Cannabis sativa
aaatgataaggagatttttaaccatgaaatacctagttctggaattatgttgtttaattcatagctactctctcatgttatgtatcagtttctttcttttcaaagggtagtgtaagttaaaaactgaagaacatggttggaaaagcacaacactatacttaaaacattatgtgaacaagaaaacttacaaaagcacttcacttaaattttatttttatttggaacggaaattactaggtgatattttctgcaagtgatagatgataattactaagtcatttacggtagataattatgtaacacaccaaattcacttgtaataaggtgcaaatacaagagacgagttctgtccgccgaaggccaatgagttggacaatgctacctttatgtccaaacgctccttcttcttccccactagaacattcatgtcctgaccacattcattaccatactattaaaacaacactgaaacattaacacatcaaatcaaatgaatcataggtgtcaatactcatgatacataccaccccttcatcaggattatcaagatttatgtttggatgcaccaaaccagtttgtattgcctgtatgtgataatcaaaatcaagtataatatgaagaagtaaaaaatacaaatgatgatagttgatcaattttagtaaaagagattcaaccttaactgttgcaacagcttcaacagcaccagcagcccccaaaagatggcctatcatggatttagtagagtttactctcagctgcaaaagaatggtgtcaaaacagtcaccacaaccaaaatctggtgatcttattatactaggagaaaatatgtgcatttaggatttaaaacttacatttggattcttgccaaaacatctgtttatagctcggatttcttttatatcactggctggtgatgatatagcatgtgcatttatgtagtttacatcttctggagctaccccagattgagctaaagccctctccatgcaaagagatatttctttccccgaatctacaaaagaacagaacagaacagttattaagtaacagcagtcaatgttgagaaagttatggaaaatgagggaaaaagagtctatatatgttgctggtttgttaccatcagtacgaaaagcattacaagtgaaacttccccctaaaagctctgcataaattgttgctcctctcttctgtagtagtaacaataaaaaagaaagtagacaaaaatgagaagagtttaagtcttaaaaaaacctggctaatggaaactatgcatagatatagagataagaacaaaccttagcatgttccaactcttccaatagcaaaactccagcaccttctcccatcacaaatccatctcgattctacaaaataagcatttttatgtacaagattaaacaactaaaaaaaccagaagactatggagtaagttaagtttttaaaggcagagtagaatggaatacagtatcccaaggccgtgaagctttagttggttcatcattttgacgcgagagtaatctgcatgatataaaacctccaatagctgcagagataaaaatcttaaacttagtttgataagatcatgtctttgaaccaacaaagaatgaaagaactggccttattacatatgggaataactcctgcatctgatccaccacaaagcatcatgtcctgcgaaatttgacaaaactagattagagaatagagacttatcatgggttattactagattttattttcaaaaaagttagaacttactgcatcgtcacttataatatgttgtgctgcatttagtatgcaaaaattgcttgttgcacaagctgttgaaattgagtagtttggtccagtccacccctgaaatttttggtggaaccataatgataatgtgtacaagtaaattattttgtatgccattagaattaaaccaacttgaattctttttctttaccaagtctattgctagtatagcagatcccatattggctgtggcaaaaggtacagtaaagggatttatcttcctataagaaactcttaaagcttctactgcttcagtagaaacctaacaaaaacaacaacaacaataacaacaaagtaaatcaattaataactctctgagttgaaatctactttggaaaaggttatagtgaatttggtggagacttaactgccatgcctcccagtgcagtgccaattatgacaccacatctgcttttatctaattctcccatttcttgtgaagtaattccactatctagcagtgctttctttcctgcagtgagcatataaagcatgaatttgtctgcccttctagaaatcttgggagacacatattcttctgttgaaaatgactttatctctccagcgattcgctgttaaaaataaaaatgtgaaaactatgagtgaaattgcaaactcaaaacctcattaagttgtcactgttgaaactgatcatatatttgtaaatattatataagtacatacataccgagggaaattcagaa

SEQ ID NO: 118293 - DNA, 1309 bp, Cannabis sativa
taatttcttttttcttaattggacgggttgcacttaatttttgtaacatgatttttacattgggttgaataaaatatagcataaactgaccaaaacgaccgacgtacacccctatagcagagtgtgtaatatgagcagatgcatagattagtgtgtattacaagtagatacaatatccttgtattacgaccagctacaagatttttgtattatgacaaagtacaatatccttatattacgactagctacaagatccttgtattatgactaggtacaagatccttatgttacgaccagctacaaaatttttgtattacgatcacgaacaagatccttgtattacagctaggtacaagatccttgtattacgaccaggtacaagatcattgtattacgaccaactacaagattcttgtattacgataaactacaagattcatgtattacgaccaactacaagattcttgttgcgagatattgaatgtttgtcaaaataacattctaacaacactaaaatatctcagtttataaatcttgcgatccttatttagatgaggttgtattacaggttgagtcatgagtttatttaacttgtctgacgatatacaattgaacttgtttattaaatagtcaaaaataggtataaaaatatgtgtttgtgtaaaactatcgggtaaagtattagctattatttgaaacagctatatgttccttacgatcattaaaaatagtcgcctattcttgcatgcttagactgtcaatttataaccgttgataatatgtattagcgtccgtttgtaactgacacttatttcatcttgttttacctcggtagcataggcatcggttttataaattgatgataatgctatattcgatcgttttaaatagatgccaaaactattttgtttcttagtagtataatttggcatattaaccaataacatgacaattgtgtgtaattcaaaataaaataaaaaatttaaagtagaaatatattttgattttaaaaagaaattaatagttttctttactacttctatttatataaatgagttataatacctttactagataaaacaaaggtatactttttatttgatagtaggtatgttggtatactattacttttatttaataagggtagttaattaagatcgtttataaaaattttaaaacatcttaatggttttttttaaagtaaatataaaactttattaatttattaagggatattggcggctaaatcacctgaactttacggtttgtaacactaaccacaaaaaccaaatttttggcggctaaacta

SEQ ID NO: 118294 - DNA, 1277 bp, Cannabis sativa
tcagagacacaatactttccgagccccaagggtttcgcagggttaggccggtgttcatgtatgacggcggtgtcaaaatcgaaggacaagaatggaacacatttgtcagagatcgcgggattcgagttggtgatgttcttctcatgaaaactactcatagtcatagttacccttacttaataaatctcagactgatcagattaaaaatccaacctaacaactatgacaaaactctagttactcctcgtctgcctaatcctaatcaatcccatgatcatgatcatgatcatgatgattttcttgattatgtgagttttcaaattaaaccatttttgtgtatgaagatactgagcgaggatgatttgagaagtgatcattttcatcaaattgaaatgccaagagagattggagaagtgataatggaaaaagcagaggatttgattgaaatcttgaatgaagatgattttggggttcttgtttacgggaagagctatgatattattgagactaagttgaagttaagagctgatggtgaaattttgtttggtaaaaattggtcccaattggttgatacacgtggccttaaagctggagatgctcttcttttcggggttgatcttcgtcgacgtggcatcattacaggtagtgttcgagctaaacaagatcaaggtcaagattttgttatcccccaattcatcatcatggtcatacttagcttaactcaactcctacattttgttctttctttctttcatagttatgtttttgaactaattaagcacattttgctttatatatcttgaacaaagtttaatatgcaagacttagtttgaaaagggtatgttgatttattgggtttgagaaaaaaatgcatgaaatgacagatttttggtgttagttacaaaaccagttgtaaaatagctgcagaagactaaccgaaataactaactcaatatcaagacaagcagttagttaacaacagtaaaacagaaaagagtaactaactcaatatcaacacaagcagttgagatattttttcatatataaaaaaaaaaaaaaaaacgttatatttaaaaaaggaaatatatcttttatgtatatatatatatagcccaagctgtagaaaaaagaaattgagaaagaaagagaagagaactaaacagagatcatacagcatgaatctaccacctggttacgtgttcgcacccagcgaagaagaactgattgttcattatcttgaaaacaaggttaatggacactcattaccaatgcacatc

SEQ ID NO: 118295 - DNA, 908 bp, Cannabis sativa
agccaaggtgggcccattgttcctccgattgattttgtgttgcagagtgagaaagtggtgtggagagttagtggtgccaattctatggttagggttagtaatgatgtgttgtgccttggattcgttgacggtggtccacttcatttcgttgactggggtattaagtttaccccaactgctattgttattggagggcgtcaaattgaggatattcttctacagtttgatttggcttcttcaagacttggtttcacctcttcccttttgtctagaaagctttcttgctccacctttgatttcaaatccagcactaattagaaaagagaatatagatattgtcttttttttggtgataaaaattaagctccctcttgcatgatgcttttgtatctttatatctcgtaattgttatatgttttcttaatttgtaattttgttataatataaatatcgagattaaaatggtttgaaattctctaatagtttgtgtaattaattgtattttaatttaactatctattgaataattatcacgtaattatgggatcgattgagtaatactactccaaatatatagaatttataagcaaacaaacagacgaattaaacaaacaaactggcgagtatatattttagccgtatgttttagtcattgtatcaattgatacgtgttaatttttctctctatgggtttatgttctttcttctttgggttacgtttgttctcttggggtatgattttcttaagatcgtgttgttagggattaggtgcaggttatatagttagggttttgggttcattcttgttagggtttggatccattctttttttttttgggtgcgctattatatttgactcaaattttataaatgtactaattaggataaaatatttgactttattttta

SEQ ID NO: 118296 - DNA, 2159 bp, Cannabis sativa
cattaatccattccaaacaccccctaactgtgtttggtttacccttacttaattttctcatatatatatatattttaatttttcttcaatttttttaataattttttttttttttttggaaaaaaatcatatttttgcaaaaaaaaacataaaaattaggaatgttcatccaatctaatctgtactattttgctcatataatacattcaatttgcactaagtgtagattttatattttgaatctaatccaatcagcacaatagctcaaatccaaatccaattataaaagtgcggattgaattagttattttagattggttaacttttatttttaaatttttttaatatttatcaaaaataatttttttcaaataattaacaacaaaataaaataaactattgttgttttatgtctctaacaataaattaaaataaatagaataacaaattcaaaagaagaaaataattgtatatagaaaaaatatttaattttatttaaattgtatatagacaaaaaaatacatatataaatgaaatataaatttgatctattaaattttgaaatatatttatattatatgtgttagaattttaaattactaatacttttacattaaaataagaattgtatataattttttaaaatgttatataaatatgtatggattaaattaaaatggttatttttacatgtcaattaaatttaatttgtataaatataaatttttaatttttcaatttacacaaattgcaggtatctatcatttacaaattaaattaaattaaatggtataaattatattaaattagttattttataaacactcataataaaaactataaaatttgtaatttcttcttatcttaatcccaaacttacaaacttattagcgtgaataattaatcaatacattttaataattcaagccaattatattgcagcacgtggaaattagaaaggacaagttggtcattaaagtggtcttggttaggtgacccagtcttccccaccctgttctaatccacatgcctaggctaagcctttaactcagactgacgtggcagcttcagtaggggaaggtgagatctggtgatgagagttacaggttaattgttacgtggcatcatcgtattggtagttcaaaaattatgttattataaaataaagggatgcaaatctcgccaaaatcttttcggtttttggtatttcaaaccatgtagtagtcttatgtgttgaatcgttttttttttatctgattgcaacgataaaatgataaagagatatcgaaattcttataagtttaatttgattcatacttcattttgtttattaggttatgggtaaatttctcaataaatcaacaatatatatctaaactaaatatatttttattactaaattacatgacaggcactaatttttcaaaaaatactaactatttttggcatgttattgaaaaaaataatcgatattaatatactgaaatctatcaattgtaataaatttgatattgattaaaagaaaaaaattattaaattattcaaaattttaaatataaaatagatttttcttatagtgaatatctttcatctacacttaaaaaaaataatatcttaatgttcttatgacggccatgtgaaggggattctgccacgtggaatggtaccataaattattattttctaattttaagacatatatattatgttggtagagtattgttattagatttataccgcggggatgggtaactgtggggatccgcccttaatggggtggggattctccgtcttggtggttaatggggcggtggtggaagacaatttcaatacccgaagcggggatagggcgggagcggggataatactatccgcaccatatccgaccctgatatagatatatataatttcttttttactcttaacatatatatatagtatatatatatgattaataatcaaaattattttgattatcgtccataattatatatcatatgcttaaattatgaagatctaatgatgatagtgaagtgatgttcattgtggattacatatgtaaatatattttcttctcgattcttaatttcatctttgtttactttttaatttgttgggaggcttgagaggtatgagactatgatcctatacttgggtta

SEQ ID NO: 118297 - DNA, 1178 bp, Cannabis sativa
  modified_base (1151)..(1153): a, c, t, g, unknown or other
ttaatggattttccctcctcttcctctcttcttcttgttcttggtctcgggattagggtttttaatggaggttttttaggtgaaaaaaatgtgaaagggaagagaatgggtcggggaagaaggggattcgggtttaaaagcaaaactattaggggtgaccaggtggcagggtatcaaaggcgacttttgttgcccctaatagtttgactgtgtcaggtggcatggtattaggggcgacgaaatagcataaacgggataattcccacctttgggcaacatatatttttcaatttattaggggcgatttttgtcgcccctaatagtaacttgtcgtgtctaatacttttagagacaacttttgtcgcccctaatagtaacttgtcgtgtctaatacttttagagacaatatttgtcacccataatgcatgttgtaccgataaaaaaatcaaatttctttaggggtgacgctctttttccgcccctaatacttgtactattaggggtatttttttgtcgcccttaaatatgtgtcgcccctaatatcccaaagtgttgtagtaataagatcgaagaaattattgttatcatactcccataaatagccgtaacaacaatgtgcaagcgaccactaaatttctaacttataaaaattatactaaattttatcttaaaaaaaatttaaaaataatactaactcatagaatatataaaattaactacaaattacataaataaatctttattttctttcattatttagtattttaattcattgtatttattttccttccaaaaaaaattcattgtatttatttagcaattttcttacatggtactaattatcaaggctcaattaatctcaacgaattttaggattaacatatataataaattttaaattttatgtaatttatcttgtttatctatgaatggatcttttttcgataaataagtcctcgtgggttattatcctccactttccgccctgataaagaaattttagggctggaggtggagagacgtattaaaataatgaacggaaggggacgagggagagaactccttacttattattgttctattatttttaatataataatatgtagattaaaatgtggtaatatataatattatgtgaataatatatattnnntgtatggtaaataaatgtgtaacct

SEQ ID NO: 118298 - DNA, 2251 bp, Cannabis sativa
gagagagagagagagattaaattagagctcatatatcaaccctgggattttggttggggatcttgggtctacaatgtcagaggttgtgttgtcctgtgcgaggtaaagagaagaacttgcgaagagaagaccgagcagagagagaaggaggcagagagaaattgagtctagcattaagggttttgagagaaagcgagcttgaccttaatggggtgttttagtcgctaatcattggagtagcattgggcagcaacaactgagaaagaaatgcgaaagagaggggaagaagaagagggaggtgattagacttaggatttttcagcttactaattttaaaaaaagagaaagatagatgcaatattatataatatgtcaggttttttttttaattttattttaaaaaacccatgcgtctgtctcataggatttttatttcaaagccttaaatacaaattttgtttttgttgtttttttttttatatttttaattgattattacagttgtattttttttttttaaaaaaaaaaaagtattattataaagtaacgcgctaagtgggtcatgacacatttacctaatcgcatttgacgcgtcactataggccagcgatttttatttaataaaaataagaaaattttggattttaccttttagtgactcacattacaggagactaataccaaaaatttagagtttaattatgcatgttattaaaaatcactcctaactcttaagtgacaaaaaatacgagtcactaaatagtgtcactaaaaggcaaaattgtagtagtggcgccttgaagcaaggcaggcctcaacttgaggcatgtaaaaagtgtgcataagcattcacttggctgtgaaaaggagaggcatacatctcaaatgacaaggcatttgggtttgttgtgaggcgtttagggaaaaagaggtgttcgcctctaacatttcattaaaattgagtctatttgagttctagaataaatgtccaaatcatttcaattttgaagaatttatacaaaatattatttttggtaaaagaaatttacttttatgttcaaatattttttttcacattttgcggtgttctataaaaataacacgaaaaaaaaattacatgaaagtaacaaaaaaataacatccaaataatatataaataacaaaaaaaaaaaaaacaacaaaataataaaaatacaacataaatataacatgaaaacgtcaaaatactttattttctataaataaaagctttaaaaacaataaaaataatttaaattccatacaaccatattattatttttattttatttttgtgcatttacaaaataattcctttatttttgttttctcttcctacaacttaaaacacttaaaagaaatgaataattacaccacatactgaaatttctaacttttttatttttatgctgtgggtcgaattttttttcaaaaatattgtattttttttttcaaaaatattgtgtaagtttcatactatgtactgtgttaagttttcaatgttgttttacggttgttttttagttggtctactgttatttttaattgttttcatttgttgttttacggttattttataaaaaaacaatatttttgtgaaaaattccgtgtgacagtaaaattgaaaatattaacccaaaatctagtatttttgtaaaaatccctaaaagaaagtccaatataagttaataaaagcccaataaaacttgtaaaaataatgaaatgcagcccaaataaaatttaaaaaacttctctacctttttcaccacattaccttttctaaaaatattatttcaactaaatttttgaaggttaagacttgtcttcacgaagaaagaaaaaaaaaaaaaagcaacaagaaggcgtaattgcgtaatttaaaacataggttaaattaaaaacatttgctttcaggaaaaaaaaaaaaaaacataggttaaattaaacattatgactacctgccaagaacgattatagtcactcaactatattgtcattaacggtaatatcatccacgaaaataacagcattgctattaggtactagtagtgcctagtactttctcgacaagtcgcgttgcgattggcaagcgatacttcctaaaagttattatattaaactctatgtgactcaatacttacttgggcattttataattttgtatacattattttaataaattacaaaatatgtacaaaaaaacttattattattttctcgtacatttttatat

SEQ ID NO: 118299 - DNA, 1311 bp, Cannabis sativa
gtgtaataataatcacatgtaatgcaggtgctcttataatcagaacaatataactaactcagaataatttaatatttgcagtttctttagttggttttgtgatgctgatcagacagaagtaatagagcttcaggatcaggtatgtcttaatgtgtttctttatgcttagctatatctacatctaatgcaggtgctcttataagttccttcaattaatgactttgcatttattattaatgattattttgattttcttcaactccttaaattccttttcctccatggaattgcaggtgggagagataattaaggaggatttatggcccaatcctttgaagtacttcaataatgtaattattctctcttcaaaagttttagttgacaatgaatcttttcttattcataccaaccttcttaaaattcttgtgttcattaatcgttgcaggaggctgatgaagaggattctgatgatgaagaaaatgatgaagaggtaacaacgaacgacgaactttatcacatcttgtcctcttaataatttaagccgtttttatttgttaacttcattatgaacttgtgttaaaatatacagttctaatattgtttcggaagtttagaatttgattcgtgcatgtgtcctgacttctgcattgtcttctaggagatcggggatgaaaccgacgatgaagaatgagaaagcggaaaaaccatctgtagtgcttttcagttactcccttaagaatggattgcggcaaatactatagtagcaatatttgtttacctttctagttttaacttataaaattttactcatgacagcttacctcaatgctgctctcttttctttttttttttctttactggtctgctgtggatttattatttaatatttaggctagttggtttcattgttattaaattttttgttctgtttttaatgttgaaaacgataaagaatcagaatcatcagatatggtagcctgcgtttgtttataaacaaaatggtttcagagttttataggggtaaagtattttagtagtgagttgtatgtggttttatatattagtgctgattttatatgaaagtagtgaaacataacaaaaaaataataacggagtaaattagatatttcttttagtgtcatttttacagtggtcaatcggacacaaaggtcaaatgtttagaaacgctgtcattttccggacccatttttccaaacggcgtggaaaaagaaaatgcaagcactacctttaaaatgtctagccaaagctttttatttaggaaaatttgattttctatacttagaaaatcaa

SEQ ID NO: 118300 - DNA, 1055 bp, Cannabis sativa
aagttgtcatatattttcaatggtgatatgtattagtttaaggataaaatattagatatatgtaagtatataaaatcaaattttccaattaaaattatttaaggacgtattcttataaatttgagtgctagagatcgagattactggacatttcaaagagtgatatatagattgagaatggacaagatatatttgtattataaggtcttttagtattctgtttcgaaaaaaaaaaggtctttcaatattatctgacttatatgatttgtcgaaaattctaaggggaattttttttatatatatagtgattagaattactcataatagtgattcttgattcattgagttattctattatttgagcttgtggctatgcttagaatgcataaatgtatttttctaggaagttatagctagtttggtgtaggtttgaaatgttagaactagaaaatttttagagttgcagaaatctaggcagaatcggttgcccgttattagtgcctagaattttgggctcttagttaggaattcaaatgcccagttagggattcttgggggtacctcaatttttatgtttttaatatatttaggacatttccaccttatttatcgataggaaaacttcagataatgaattttagtcctaaaaagtgttttagcaagatacttaccaatgttcaactaatgtgagttagggcatccgatcatcgagcaaatttttactcaggttgactgacatacctgaatttagaattgaggtaagaatagtattcaggttcacatatgcacatgtttaatatacatgtatgttatattaccatgtagctagcatattggagatagcgatatcagtgtacctagagttgcactaagatgatgatatctaatatgttggacaatagtgaataatatgaattaatgctacaaacaccaatatgactagaatgttgagcttaggttaatattatagttattcatgctgtaggtacaaccgttcggatctcagttatactcattgaatgtggttaatagacttatggtaattgggtgtatgg

SEQ ID NO: 118301 - DNA, 1532 bp, Cannabis sativa
  modified_base (1452)..(1495): a, c, t, g, unknown or other
ccccccatgtctaaggctagtggctatgcctgagattacttcatggtctacggtgcaaagggtgtgcatcatgcaatctagagggccccacctttgaccagccaatacccaccctacagctcagggatacggccaaccatattctcttgttgtccatctcaagacgaaatatttctaagttggtaatgaaagagaacttcattaagtatggtctctaccctttcacgggcaaaccttaaggttcatttgataagatttccttaaagaagaaattaaaaactaagaggaaagaacccgagactgaaactccctttgataaaatttttatgaagaagaaatcagagactaagaaggagagagttgctcgaaagagggtcaagcgaggtgagtctttgagtgaggcccctgttctcattaggcctcaagagtcagattctaccaggactatctgcccagcagttattaagggaaaggataaaggcattgccatcaaagagagtgaagagtcatctttagatgatgatggtattttgtatagctctccttaagatgatgctttcgggcaggccgagcataaaacttctttactacatactgaacttatgtcttttgaagttagtttctgaccaatattttgtgtctttactggtatgacttcaaaattagaatagtttgtcaagaggaaggtcgggggtacttttggggaagagtcctcatcaaagaggcgtcaagttctacctaattagttcttcctttgcctcctccttacgctcctctagccaaccaacccatggtggaaaacttggaaggacatcctcctcctactaggaagtcaagtaaggagcgccagagatccagtccgacattactctagtctgagtagagagagaaaaagaagttgtccataatcacctggacaaatgcttggtttaggtggacgagaaactgtaagacacagacagcgagccggttgagacctttatctctggcctcttgaaggatcaagccctagtaaagtatcttctctcctttaaagctttatctctgcttaccatgcaacttttattctgacttgtaattttttattctcaaatgtccttgaagtttgggcacgcctatgcccgtctcaaagggacatgtgttgttatcaaaaagaaggttgaggtattggaggcccagctcggagaggtgaacaaacagttgtttgttgccaataataaagtgaaggaactcaagcagtagattgaggacatgccatctatcgcatagttggagaaggactttgaggagtctgagaaatgggttagggagttgacgggctagaaagagtccttaggtcggctgctacttgcccaagatggggaaattactagactcaaggaggagttggcagctgagaagactaaactagaggaatcagagcagactcggtgtaacaccctaactagcatnnnnnnnnnnnnnnnnnnnnnnnnnnnnnnnnnnnnnnnnnnnnaatcaacgaggtttatagaaatcgtgattaattaaaa

SEQ ID NO: 118302 - DNA, 2903 bp, Cannabis sativa
gattgtctcttttaccacagagcaagggagattgaatgatcactttccagaagtggttcaacacttccttaatcattttagaaacatcatgggcaaagagaaaccaactttcaggccggttcagcaggattgtatagacatgggttccattctcactttggaccaacaggtatctctttttaaacctttttctcttacaaaggttaagactgcgatgtttggtattcctagtactaaatctccagggcctaatggctttggatcggggttctttaaatctatgtggctagaagtgggaaaggaaattcatagagttattaatcatttgttttttttaaaacaaatcaatttcttgttgaccttcataacacggctctatctcttgttcctaaaggggaaaacccttcaaaagctgttgactacaggcctatagcgtgttgtatgactctttacaaatgtatcgccaagcttttgtgttctcgattagctaaagtgcttccttctttattaatcaaaaccaagatgcttttgtaaaaggtcgttcaatagcttataatattctcattctccaggatcttttgaagaactataagaggaagaattgttcccctagatgcacggtcaagattgatataagcaaggcttatgacacggttaattggtattttcttgagaagctgctgaatctctatcgttttcctgctaaattcataacttggattatgatttgtgtgagaaacacttcttatactctagttatgaatggaagacttcagggatcctttaaaggagagcagggtctgagacaaggagatccaatatctcctttgttatttgtgttgattatggagtacttgtctcgtcgattccaacttgcagctactgataagagatttagattttatcctttgtgtaaaaagctgaaattgaccaacttatgctttgctgatgatttagttgtcttttgtaaggggaatgaagactctatccaagtgattagggaggctttggaagatttcagcaacacttcgggtctctctattaatcttgggaagtctcggatttattttggaggtgtctctcaaccaggtaagttggctcaacacatcaacttacaggtagggagtttccctttcaaatatcttggcattcctcttacaccaactaaatggaagcttgaagattgtggtagttttctgaaaaaaaaatgaagaataagttgatttcttgggccaacaagcacctctcttttgcggggagggtgcaattaattcactcaactttattgagtctcaggaattattggatgagaatttttctccttcctcaaagtgtgataaaagagattgagaaattgtgtcgcggatatctttggggaatgaaggataactggccaaatattcatttggctagttgggataaagtgtgtcttccaaaaccttatggggtctgggtttcaaagatggagttaaatggaataaatcttctcttgctagatttgtttgggatcttatgaacaaagaggacttgctttgggtcaaatgggttaatggtgtgtatcttaagggggttgatttttggaattatgagttgaaaggtgatacaagttggtactggaagaagttgtgccatttgagaaatagtttttcgactacagatttattagctgctggtgtttagggaaaatttagagcttctaagctctataactctctgattgtggagcagtcggattcagcagctcgggctatttggtgtgggttgaatgttccaaagcacagtttcatcttgtggcaggctgctcactcaaacctgctcacaagagacaaactgatttattccacataccaacttctgacttgctttgtgctgtgtgtggtttagactttgaaaaccatcagcatcttttcttcacttgcaggttctcaaagatggttcttgaagcagtttttgcttgggtaggattcaagggatgggctgccgattttgggagctggaacaattggcttaggatgggccattctaacttgattgggaggttgttgattgttattttggcagccaccatttatcatgtttggaggaataggaataattgcttttttttggattactcaaatacagtcacttgtatagttagcaaaattaaaaaagatgtcaaataaagattgtatttactcaagaataggattggctccaaagtggaattagatttactaaagatcttgattgtaactaagtgagggagtggtctctttttggagagccttgagggtgtattgttggttgttggtgtgattaatgaagctttattcttcttgataaaaaaaaaattatctatatagtggcattaaaaaggcattatcaagaaatttatatcatttttttttctctctccttctcatgtgatactctacattctttaatcttttcatacttttcacaattacaattgaataagtgagtaagataattttgatgccttcaagtgatgaacataacttaatttcagtaaaagaatatgaattactgtaaatatatgtgaattaatattataatgtaccaatatttgaacaatgataactcatttagctcgagtatgtattttagttaaataatattacaatataatattttattataatttttctcataattttgtcatttgtataattaaaatgtaagaatattacaagtacaagatcacattggatcaatttctcaatcaatattaataatcaatcacatattctaaatcaatatcaatatacattattattttaataataatgggtgactatttaaaggttacatttttaaagtaaccatatggttacattttttttttgacctgtaatagcaagttacaaataagtaaaaattctatttttagaattaattaa

SEQ ID NO: 118303 - DNA, 837 bp, Cannabis sativa
ttttccctccccccccccccattattgtcgtaggtttgaagttgggtagcattgctggccccaactatggaatgtgagctgctaggagcaactattttttgctcgccaacttgcacctaccagaatgcttcttcaagttttataaaattgccagccccatctataagctctctcatattattggttgacctttttctgatgtctctccaaaggtcactcagatgtaggatacctcctagtatgggtgtataccacccttcttccattaggcctttgacttttgtgccttcgatcatgaacttttggatgtagtctttcaaaggctcccctagcctttgttttattttaaccaagtccttcagttgggataatatgtttttggaggaccaaaattgtgcgtaaaactctatagtgaatgcatcccaggaatcaaaccttcctaggggtagcttgaagtgccactactgtgcagtttcaaatagtgttgctggaaaaatctcgtaacgggtatccttaatcacattttgtaaatccatctagatttcaaaatatttgatatgagataggggatctttattcgttgtatattttccaaatataaaattgctaaaacccatatcaaccctaaccctcctattggatggctactgttcacacctcacctaatcctcctcatcaagcttgctcaggcgaaacaaatagccctttgccctcttcaaaatcgtccaacttaagcccatttccttctcttcgaagaccggcctcctccctcacctcgttgcctacaactctattctcctttcttctcttcttaaagccccaaactccattaattat

SEQ ID NO: 118304 - DNA, 2030 bp, Cannabis sativa
  modified_base (668)..(682): a, c, t, g, unknown or other
ttaattatcaccattaatgcttgattgtattttcctttattacatattaatttagtttctcattcatttagtcaatacttttgtataaatagagattcaccacattggaataaacaattaagaaattctcattcattttctatttatctcttcatcattttcttcttttcttcttatctatattatattattttataacaatattataaaaaaccccaaaataaaattggtacaatatagtataaaaactaaaacaatcatataaactattgtattactttgggagaataaaagtttctttcttaaataaattgtactaaatatatgttagtaaagaagatattgaatggaatatataattattatacaaagcatatatatatatgggtgcacttttaatgggtattactatgaatgggtaatattagaaaattttgagttttaatgattaaattttccatttaattagaaaaatttctcatttttacattatatgggccgagattggtccatcagctgaaaaaaaaataataaaaaacagttttttggcaaaaaagtgataaaaaaaagttgaatttgacttaaatattttacatataaatatattttttatatagtgtaaaaagaggtatttttgattttgtttttaattaagtagctaaattaannnnnnnnnnnnnnntttctcttttattattcgctatccaactaaaatctaatggtttaatatttttaaaattaatattaatagttaaatttgtttattaccctttaataagtaatacccattaagaagtatttcatatatatatggtagagatatattagattaagaaagagtaactataaagatggtaagtagtattaattagttagtagaaagaaaggggtcaagaagagaggaagaaagattggcaacttattaaaaaaattaaacaaagggactattaaaatgaaaagaggttataccctaaatatgaagtttaatatagttatacaaagcacttcttaaaaaaatattatacttaacattaaatttgaaagtatgaatgttggtaattcatccaatattcttgttttcttccttgaatatttataaatgggtgtttattggaccacatccaatattttaaggcttatccagattcgatctatttatatattagatgttagatttaccatccgatctgatccaattagtttcagtcatccaatcgatcaaacgtgcattggatgttggattggatcggttttatccattggatgtatttcatatatatttactgatttaatttgagtttactcaatattttagacctagtatttttttagatcggatcgaatctatttaatatttaagtctagtatgtactgaattagactagatccatccaatctaagaaaaaagagtaaaattttaatgttaattttcatatatacatagagattttacgtataacaatataaaatctaatcactcattcaaactaaatgaaaatactaattaatttgattggatgttagatgtattagatttctggacaccccattcaccatctgatccgatccaattggatatttaaaaaataacatctaatccgatctgatcacaattggatattcaatggtggtcggttgtaattggatcggtcagttatcattagatttgatcaatgtatgcacacccctgatagtgtatcacacatacacatgtagttaaagtttttgaatagaattttaggaatgcaattacaaatatatatatatgtatgactatataaagattttttatttaaaaaaaaataataaataaagattttgaatttatttttttttaattgattgattaagtaatatttataagcgaaattaaaaaattaaaaaaaaaattaaaatgagatatttaaaataattttaaattattatgtcacctcatacattatagggattttttcaaaaatataagtaaaatagaaaataattacaaaaataacttaataaatttcaattacaataatatcttaccacat

SEQ ID NO: 118305 - DNA, 998 bp, Cannabis sativa
atgctttgcttacatcctgatgtgcaaactggaaagaaaccatttcgatattttcgaatgttgaaatctcatgctgaatatgacaggagaatcaaagaagtgtggcaagttcaacagacaagaacaaagatgtatcagctggtgacaaagcttaaaaatctgaaaaagttttcaaagaaattaataaagaggggtattcagatattcaagccgacatcatcatatttaagggagagctagaggaatgccagaatgaactcaaaaccaatcctttagatgctaacttacacaagaaagaacttgagaaaagaaagcagcttatacagaggcaagaggattacctgtcaatgctgcaatagaaggcaaagctcaattgggtaaaacatggagatgacaactcagttattttccatgcaagtatcaaagggaggaggagacataacagggttttatcaatagaacaaactgatggaacaagagttaatgatccaaccagaattgtagatgcttttcttacttactacattgatctcctggggtcaacactaccagagaggcaacatgtaaaagcttctgtagttcaaatgggccctattctgaatgcacaacaggctacaattttgatgacagggtataccagggaggaagtgaagaaagctatttttgaaatcccaggtctcaaggctcctggagcagatggatattcaagctatttattctagggtaattgggatttggtggagaatgaggtttgtgatgcagtgctttcattcctagaaacagggaaaattctcaaggagattaattccacggtgctaacattgactcctaaaatcaaatgcctgaatacagtgaaggattttagacctatagcatgttgcaatgtagtgtacaacattgctacaaagctaatttgttataggctaaaaactgtattaccaagtttgatagcacagaatcaagggggatttgtgcatgggaggtatattggacacaac

SEQ ID NO: 118306 - DNA, 2292 bp, Cannabis sativa
  modified_base (1592)..(1595): a, c, t, g, unknown or other
cgacgctcttccgatctattattcaaatttctttaaattaaatatgatttattttttattcatttatttccttccgaactcataatataattaaatatgtacacgtaaattaaattttattttttaagaggacaaaaatgcttttctcatatgttgcgagataatttagtccgcagaatgtgctaatctcatcattatatatgtatatttatatactgaagttaatttctcccaccaaaatcaaacctacaatggaaacgatcaatattaattaatttatacttaatttcatattttattatttttctccacttcaaacaaacacacaaagagcacttagaattttaaagcgaaagaagtttaaagcctaatgattgtaaagacaaagtgcatatatattaatatatttatcagtatatatgttgtgcactaacgattgaaatggttggagactagactatgaagttctatttaatttaatatataacaatacatagaaacgcattgggctaataattaagttaagcaaataatgctaatatataaaaaataatattatatacgttcatatgacatataccagtgaactttattaattagtgttttttttttaacaatgtattagttagtgttgaatgcagtaatgcactatgaatttattaatttaatttttttttaaaaaaaaaaaaaagtggaaggcaactttgtctaatactcattggtatcatattgttattacacaattaagtatcaagtttcatataacgtaagataataacttgtaagaaatatcgctaaccaattatcaatcgtaggacgtcacttgctatactaggtacccaataataatgctaaaaaaacaccccggctcacagtaccgtactcctctcagtgtaagaagccacaggagaatgtcacataaaaaaaaatgtcacttttagtgactattttagtcacaacaaaatttttttgtgactaaatgtcacaataaaaaagttacttgtgactaaacataacatttaaactcatattgtcactaattagttttagttacaataagtattgtgactaaaaatacatatagtcacaataaattgtgatttttgtaactaatactttcagccacgaacattttagtcacaacgtaagaatgataatttatcattagggtcaagatcaactgcgatgtcagagttggggtggaatctatgtgtgtggtggcaattgccagagatcatacggaatcaattttgtgggtggcgactaacaagcttcacttcactgactctcttatcggggaagcggcgacttgtatattagctttggagacggcggccacaatgcatcacccatttattatggtggagagtgattctaagatggtgatcaagaacctaaagggtgtcgaatccttttggcagcttgagaactacgcaagacaatgcaaacatctctctactttttttatttgttgtaattttttttatatttctagaaactgtaattttgcggcccataatgtggccaagtgagcatttgccaataatatttttggtatggtagaagcctctactattccgagtaatattttnnnnaatgaccgtgaggtctgactatttgtttccttctaatatatataaggtttattttcaaaaaaaaaaaaattaccattagttatattttttttactttagttataaattttattgtcattaaaagtaaaaaaatttgtagtagatattattgaacaaacatatcgtgcatgtcataaatcaacatcttcgttgactttattgagatttaaaaggagtctgttgtaaacttttttcatgtcacgaaaggaatttacatgactaggacatgatttttaattctcatgatttgaatgtttcttctaagctaaattaactgttagtaacttgcttcatacattattaatactattgaaaatatatgttttacgttaattccattttagggaagtattgttatatatggagaattattatagtatctaacatgcagtatatatacatattaattacgattaatatacataataaagaattctacaactttaataataattatttaatgttgttgatattttaaattaaatttaaatatttaaaattattttttaaaaaaattaaccattatttgtaataatttctgttaaatagttatatttaatggggatattggcggctaaaccacctaaactttacggtttgtaacacttaaccaccaaaactgaatttttggcggctaaactacctaaactctggttcc

SEQ ID NO: 118307 - DNA, 2053 bp, Cannabis sativa
  modified_base (151)..(155): a, c, t, g, unknown or other
  modified_base (2022)..(2027): a, c, t, g, unknown or other
acattttttctttctttaattttttaatttttaaatttttaattgtttaattgtataattgtataacttataactttctaactttcaaataacatagaaaaaaattagcataaaatttagtatacgtgcctcgcacgtagctttttactannnnntatatatatatataaaacttaaaactatatattaattcttattattataaatatagataagatataaatatattatttatacatctttttaattttttttactttaaatacacatggatataaaataatgacaatcaaactgaatttttaaaattaattcatcaggaggtcatgttgcgggaccttatataattaatttttttattatataaattcaaggatataaaataagaatcaatatttgtttaggggcttgatgtatgtatcactaaaaattaaaagcttttttcatgaatttgtcaactatgtatggaacttggaagacataagaaagttctgctttagtggagtcgattgtatttttttatggagtttgtgcagagtctgtgatagtaggtcgacattgatagaaaaaggtagtacacttcgaccatgcctagttcttcatccatgaaagatcaacctgatcgataacagtggggcaaaggtattcaacgaagaactagaaaaatctgtcaagaaagccactagaggaactgtaatgccctaatgcgtaagggcgccacgtgggtacttttgtaaattagttcataataataaactatcagtttaaagaaagatgtagattgtttaaaactttaataatttaaactccttttcaaattattactaagtcggggatcctcttttattacaaacattactaaaagaccactgtgttatttattttattactaggtattcaaaatactagccagatcctgtcaactgatcacaaaagacgtcgatgttaatatgtacattcgtcagaagatgtctaactcatggctgatccatctttcattttctcttacttgcatgacaaagcacttgtgagtcataaagactcaacgagagaagcgggaaacaaaatacaaatttcatgattaaataaaccgataatcattaaaagtttcatacttaaaacatatattcacacaaaacataacggtttatcaaaatactagttatccaattacttatctaataagacaagctatccctgatactataaagtatccatcgaccctcgtttccaacgagtcaactaatgtcactatcgttgcctaatgaggcaactgataagtaataaacctaacaacgattttagaatagagttatagctctttcatattgacggtcattattgtatctcaattagccatgtaatgtggtacaattaacttttcttacctcgaattcaaatttaggtgtgcgggccaacctgagtggaacaatgctcgacgatcactacaacatttcaccctattagcggtggaccactccgctactaataggcccacattcggtcgcaatagggtattagcggcagaagtcccccactaaaggttcgtcgctaataagtggccgctaatagtactattagcggcggaatagcagcggaattgggcttcgccgctaataatactattagcgacggaccattagtggcagaccatttgcagcggggtcccgccactaatgaactctgtcagttttgaactttgaaactgtagagagcattagcggcgagaccccgccgctaataacaatttgaaataaacaaaataataattttatacataatattatttatatatatataaataattatttataaataattaattataaatatataaataataatttaaatataataaatcatattacaaataatataatttaaatccaataaaatttattaatagtttaaaaatgtctcaaaatttactactttcacattaattctattacaatattgtctcaaaattaaactaaattttttttaaaaaataaacaaattattgttaggttttatgccctnnnnnnaactccatttcaatgtaatctatttt

SEQ ID NO: 118308 - DNA, 2661 bp, Cannabis sativa
  modified_base (27)..(32): a, c, t, g, unknown or other
  modified_base (2545)..(2556): a, c, t, g, unknown or other
gttaaaccaagaaatgccgttagatannnnnntttaatatataaagatatatttagtactgtatggactaaacatatttatttggaagaatattttgttttcaactttagtcaatgtttcatttacacactttaaaagtcatgtgatcacgttcaattgtgtgcacttattttccttcatttttctcctctccttttttcgtaacaaacttggctacataagcagcccaataaccgatatatctataataagtacacacaaatatatattttaagcagaaaaatattcattttttatatttatagtggacctttacgcccgacatttggagttcataatgcaatgaaaagttaaatattgtgttcataaagaagagaaagtaagaagaaagttgaaagatcatacaaagaagtgcacgaagggccaaagttcctcattaaacagttcaaagtagatcattaaagttttaggctaagtgattgaatcggacgtccactaactatacatatatataagaacatgaagccctacattaaaaatatttatatcaaagacccttattcgaaggaaatgggtcgatgccatgtcatgcctacggtctcagtacatcattaattataatatataatgattaattaactaaacataattagttatataataatatggttaatggatcgaagtgtcctacttcttcttagtagtatatatattgtacaaaatgtaccactaaacctacctttcagactatataataataataataataatcttaagttattatggaatgttgcataatgcatttatttgcatcagtacaaacataagaaccattgaacttgcttttgggactatatataatatttctctttatcaatatgtatttttgcattcaactttttaaattctatctatatatataggtaataaacttaatcaacaacaagaatttgtgcatattattatattataatctaatttccaagagataagaaatatattttataatatagggcgaggatttagattaatcgtgatgatgcgttattgtttgatttgataatgggtgagaatatgtattacagtaatagggtatagtagctagaaattaagcagtagatttttattgatagttggttctttcttttatcacaaaccatatttttcagggaaatttttaatattatactaataatatattcaattaacaaaaatatacctgaaatgaaaaaaacttgataacgtaaaaaaaaaaaaaaccagaaacaaacatacgcgccaattaatccacaaattatggaatagatttcttaaaacaatgcgtgaaacacaaacgcacatacaaaacatataaattcacgatttgctgagtttgcgaatcaatttgaatcatttttacaaaaaaaaaaaaaaaaacacaccattaacgataaaaaaacctttgaatacaacttgaactccaaaaatcaacaaatcgaaagcaaaaaccgattccgaatctgtatacaattttgattctatgttactgtaagtgaaaaacagaaacaaatctgaatagattctcaaaaagaacaaaaaaaccattgacaaagaaaaaagcttcagtaacgatcttcagaatttcaatcaaaaatcagaagcaatgttgtttctcaacaaaagaaaacgatcctcaataatataaagattgcagagttgttgctggccaaaatagaaaataatagagaaaattcgttagctgcagaaaaatttctcaacagtgctctgttctccgtgtagccaaaaataatcatcaaaccaaaaagtaatctaaaacattgttgtaatattacatggataaaaaagatcattgtaaataacatgatcatatattttcatatacacagtgcgatttcttcctatttattctaatgcaattcatcaaaattttttcgaaaaaaaataaaattgattagtgtgcaaataatatctatattatttttcacaaatacttaaaagtttaataaaaaaaatgtaataaactaatatgtatatgataacacacaggaaacaatggatcccatgacaatcattattttctacaatgcaacatgggtagacagaacaacatacaacgattatgaagtggcaggtatactaatcccaacaaaatgttcgtataatattcttgcacgggaaatctatgaaacattatcaatagacagaaacaagtatgaaattacaatcaaatttcaaattaaagaatggataccaccaataaccatcaaagatgacaaaaataataagaaaataataaaaagtaaactaaatcatatacaaaaatatatttaaacatattaaacacctaacaactacggcaagcatttgtatgtattgtgcttgctttgttaacataaatgtaaatgtaaaagaaacaaaaacaaaaacaacagaaccaatgcccctaataactacggcaagcatttgtatgtattgtgcttgctttgttagtgtgtctattttacagttgtaggaatagtaaagtattgtaacaccctaactaacnnnnnnnnnnnncgtgatttttaaacatactgtgctactcgttgctaatcaacgaggtttatggaaaaatgtgattaattaaaattttgctttttaattaaacttataaaacaatat

SEQ ID NO: 118309 - DNA, 917 bp, Cannabis sativa
tttggatttcgttgttaattacttgctagcaataaaaataagatattatatatagacataataagaaattagaatttcagcaaagtgaaaaacaaaattagcactcataataatatataacatatggcttattcactacaagccatgaaaattttacagagtcttgttgggatctatgccttaactttgctcatttcttccttagtattccatgcaaaagcaactgttcaaggtaattaataattaattattgtatatgataagcatcattttcttaatataactctttttttttttttaattttaatcaattaaacattcaaaactttttttctgaattaattatgacactttcttttttctttggatatgaagatttgaaagtcaagagatctgattttccatgtacttttatttttggagccgctacatcagcacaacaagtattcatcttatttcattttcatttttgattttcttatatgtgtatatatatttggataaatactattttcaattatgtaatttgtaaaagttattatttagattatttattttgtttaataacaaaacagaccctgtatttttaaaaatattataaatataagactctaagcttaattttcgacaatttttttaatataaccaacttgaagacaatttttaacacggacaaatgtaaaaaatttaaccacagctttgtcataacacctctaagttagattattattaagttttattttgacaaaaaatcaatttagtgtcttatttatactattttgaaaaatataggatttaatttgttatttaacaaaacagagtgcctaatatgtaatttttacaaaatacaataggggtgttcatccgatccaatccgcacttttttcgtcaaacaacatccaatccgcactaagtgc

SEQ ID NO: 118310 - DNA, 1705 bp, Cannabis sativa
aatagcttaatagcttcaaggtcctaagttcgaacccttgacttctccctttttcccatccctcccttaccactaagctaaccttagtggcttatatatataaatattagtctttataccactttttttagtgaataatatatattcaatcaaatacctaaatcaaactaagaaagatcatgcatgcatattgcctaattattttcatatgatatgtcctatctatttgttttcttcactaaaatgaggtatctacatgtcccagccgacatccatagagcaaactagatcattcatagtttggaccacttttattaattcctcccataccaatgtcatattttatattcaataattagtatatttaccttgaattttttatatactactaagttatatcttataagatataggacttgttaataatatccatcgaaatataattttacatcaacatgattcttccatcacactctattcaatttttttcataaaatgagtgacataataaataatagttgacaaataaatacaaattatatacttttcatatttaaatataccttaatggttgaaaaactaaaaataaagatattaatatgtatatatcaaaaaaaaaaaaatttattctattattcattaacgtataaaaagtgaaaaatatatagtttgcatcaatttgtaaactattatcttatgtgtcactcattgcacgaaaaaaagttgaatgaagtgtgatagaaggaccacgttaatcagcttagtagtgtaaaaattttaaagacaaaattattaattattctattatatttgcataaaggtaagttatacgtatatagctatagatgctaattaaaaaaaatagaattaattttttttttttcatttgataattatacacttgttatctttaaatagtttagagttgacacgtgttatatgactgggacagaagtttcaagaattctgcctcaaggacccaaaaaagcacatgttaaaaatagacccgaagtacccaatctgtaatcttaaacctagtacacgtgaagtcatatagaccaatttgtaaagattcattcattttatcattaacttactcgagaagaaacaagagtcacgtgtggggggaatttaataagcctatattaatcttaaaaatatggttatttactagcgttattattattttaacacgtttgatgtaattttaacacattatggtggtaaatggtggatgcgggagagctcagtttgactaagcagaacataattgaaaattttgatgatcttaaaggaaaaattgtacttggagctgaacatgaaagttatagatcttgttctcagctttccaaaatatcttgaatcgtctgattttgagttgtattgaaaaatttataataaaaatactaatctgaacatgcgacagcataaacccaagaagtagcgcccatgtgtcacttaaactccgcttaggcgctcatatccgtatggtgtccatatgaatttcaaaaattcagtttttaagtttgaagttaattgtatttttagggttatataaatagcactttcagagtttattttaagaagttttccattaacttttttaaaagagattactcaagagaagaacagaatttacatctacatctagttttactctttaaattctgaaaaaccgtgtttttgcaaatgtcagttgtatata

SEQ ID NO: 118311 - DNA, 1983 bp, Cannabis sativa
  modified_base (1481)..(1488): a, c, t, g, unknown or other
taggttgcggtttgctgcccggacctgctccaactccgtcacaaatgcgcaaccctccgtagtggtgctctccgccagctgggccgcttttcaaacgacaaggccaagttagaaagctaaagtctcaagaacaaagggcagggcgaacaaaaaaaaatctcttgaaattactccgatggcctgcctcttcgtgaaatgggctagtgcaaaggcgtgtgcactactgcaagatgcctaaacctccgtaggtagttctaaagtgcttccggccacttggtctaaaagctcaacaacaaagggagcggtttctccccccgaccgataggccagccggttctctaaggcttcgaactccacgagttgtcccgatggaggcacagtgtgcgtgtgattagccatctttgccttacgaattgtagacatcacggccgcccatcgcagaacctggagtttttctgcctcgagacgccctttcagggccctgttcgcttccttctccctctgcatctccaaagggtcgaagggaacaaccctcctgaggaaggcgaacgccacggttggcatccaagaagcagggggaagggctctagtgtggcccagtctcaattgggcgtaaggaggccgggggtgatcccctgatcccccatgccgaaatcggtcaccacgagtttcaaccttttcctaacaaaaaaactacctcccgcggtgttggaggggccagcctgctctgaagaataagacatgacgaacctccccacaaattgacatgacaaaaagagaatggtggctgactgacccagaaaatcccaagaacaacaccaccaaaaattgataccctaaaggcgaatatgccgtcataattcccttggaaactattaagtaaacggagaacttaccaattgatgaggcagaagggtctggagtggcgtccttggcgggaagaacaatgtttggtgacagcagcattccaatatgactgggaagaagaaagctcaaaaggatatggcttaaataggtaagaagagtgaaaaacaaagtggctactgtaggtatttatgggatgatagggaaagggcgcatcgcacatgaagcagatgcttcgattttccccaggggacactcggtgattgggtgtaagaagctaaaagagcgcttcgcttcccagcggataactctcatcattccatgtctcgtgaagaacacttagcgaatgagaagattgcctaagtccaatcgctgccattttgcgcttcccaaaaatatgcgcccatcaatgcgcatgaaaatccaaaaaattagcatttaacattatgactgaaaaaagggagaaattatgtctcctacataatggcgatacaatttgacggctaatgactgttgtgaatattttaccaggatctagatttactaacaagtatgatgattaacatcctaaataagaatatctctaaaacaaaaaaattaaacacataagagtttannnnnnnntacattgattgtagcagaatataatgactcattccgctcagatctctaacctttgttcctttctatcgcagagtattatcaagatctgagactggatatctttctctcctttaggtttgttaccaccgtcttatccagtatgattgagtacttgacttgctatgtgtgggcatggcaatctatcactataggctcgagtaggaagaacaatgaaggaggcttgaaaactgtatagaatgtactgtttctcatctactagttgttagagaatgaaaactagatttataggttgaaagtcaatagttcgatgagatgagagcatcatgttccttttatagtatttcaactagggcttagggttgaattaaatggattcaaaaagaataaaatattatgcaaaaatcccactagtggtcagccataaagggaccaatctctagttacaattttgccactttatttcaaccacctattcttctttcaataataccatat

SEQ ID NO: 118312 - DNA, 7864 bp, Cannabis sativa
aactctatgtatactgataccgctatcaatgtaatctaacaggcttaacaagcatgtacgctaaacatgtaaacacatatgcatatcattatcttacctcattttcgggttcaggtgtgccagtcaacctaagtggaacagctgctcgatgatttacaggcccctaaatcacattattcgtaaaactggtgagtgacacgctaaatcacttttcggggactaaaacttgaaactaaaagtttccctattgatggataacatggcaatactctaaatatcgtaaaaattggaaaaattaagattccctaaaatgtcccaactggtagaccggttccccaaccgaaattttgatttgtggggtttcctagggaccaactggtcaccggttcctataggtcccccctgaaccggtcgaccgattcaatgcaagaaacaccaaaaacttcccaatccactcaatttgacaccaaacttcatacaaacttccaaacctgctatttagaccataaagaagataaaccaagcaataaaacacctcaacatatccaaaatcataaattaccattagagagcaaagcttgagttcataaactcaaaccttgctcaaccaacacaaacagccttaaaactagctcaaaccaacataaatcaccttaatttaacctcagaataccctaattaacaaaatcaagcaaaaaccttaacttagcacttaagaaaactaagggaaaaggtgctagatgggttaccatcaatggattcaccaagaaccaactaatatccacaaaaacaagctgaagaaacaccaatttttgatgctggttctccaaggaattcgagagagagagggagagagagagatccaagtgtacagactcctaggaacacaagagatccaccagcgataaatcccagataagttaatacacaaccatcgatggtggggcatggagtgacttcccctctggctgggttcacaccaagtggacaagaaattgggaataccagtacagcggccgaccaaactactcctgacaccgagatcctgtccaccaataacactcaaaggccagttagagatgatactaaacttcaaaacttgcgagttacgcttggacttatgcaaggccatatcaacatgatgtaccatgatgaggaggatctccaaacaactatcaaccttgcctttgatgaggaaagacatcaatttatagaatggagggaccaggagatggaagtcatgagggctcagtaggcagccattgacaaccgttccaggcaggccaccatgctgattagaagggcctaccaagttactggtcagcaattagtgactgattctagcatcccctaaagcatgacagaaaagtatgtagcttgccataccacacaaacttataacagtcaatcatccaatccaagaccacaagaccaaactatgggccaaacagtagacggcaagaccttgctagactgcccctgcgaggaggtactcaattaaacagctctactcaaacagaggtattaggccaacctctcaacccggctggttagactaaagaactcttgatacgtcagtgtttgaacggttaggtaccgtgcatgaccacaaaaacgatctgaatcataaaaatggattggacaggcaaaacaatccactagttatccagtaaaataactatgctcaagatccagttcaaagagatcttaatgtgacacaagttggtcaacaacctggccaagttcatccacttgtgcaagcataaatagatcaacttaagaacctcatacaaggcctgaccggcccagaactcacagatctcgaactcgaccaggcaagaggatcacccttctcacctaaaaccaatgatcttgacctatccccaaagttcaaaatgtcagtatggaaaatgtacatgggaaaagaagatcctttatctcacttgaaatactttgagatgcaaatggatctgcaaggggtaagaggcaatgtatggtccagaatttttctaaccacactagtagaggccgcccaacaatggtatttcaaattacctctaggaaagtttaattcatggatttccttttcatctaaattccatggacgattttcctcctctcatcagctaccctcacacctagaagacttagtagaagtgaaacaaatgctaggagaacctctaagggtctacattagcaggttcctgactaaagcaacaaaagtttaagggataattgaggaaggaagattggttgtaatacttagggcattgagcctctgggagaactatggaaggatattaagagattaactgtggggtcgatggcagaatttctagaccaagctgatggattcattaagctcgaagaggcagtacaacatgtggatacaatgggacagaagaaaaatcagtaacacaccactatagccgctacatccgcccagaattcatagcatcctagcagtttgaatcaaaaaggaaagaggtcaaacaatgacaatagatatggcaatgggaagaaaagcaagttcaatggaaactccaaacaacatcctagggagaatgcctcaaaatttactactttctcagtcttaatagatgatatagaaataatgtatgcaactacccagtctatggtgccatacaagaaaccctctcccatgaaaaaggacatgagcaaaagagacacaaccaagttttgtcattttcttgcggactacggccatgacacaaatgaatgtaacaatttgaagtgggagatcgagttcctgatcagaaaaaataacccacacttacaaaaatatgtcaaggtcgaccaagaacaaagggctgcccaggcagataaataaccaaatccaactaatgcctccaccagtagacgggcatcttcaggttatcattgggggcccataccttgctggagactcgggcaaagatagaaaaaagtatgcccagtccttgcagtatgaacaaaatgatgtaattcttggtcgtggaggagagaaaacctaatgtaccaggtgttggagaaccaataataacattcaccgaaatagatgctagccatgtcatttttccacataatgaccctttggtcattaaggtgcagattgcgaaaaaatggcagcatggactatggtaaaccacagagcttcctgaaatattctattcaagacaacatataaaaaaatgggactctagcttaaagacttgattccttgcacccaactagtctacgagttctacggccagagtttagcgccactaggacaaattcgcttaccacttatagtaggacaagctttgaagagcataacgataatggcacaataattggtgatcgatgtcccttcagctcttaacgtcatcttaggctgaccagctctatatgacttgaaagttgtcacatcagtattccacttttgcattaagttcccaactaaaagtggagtgggttgtctatagggaaatttaaggattgcacaggaatgttataaccttgctctatctaaagtcaaaaaggaaaatacttctctccagagttcagagaaagggaaaggcattgcccaataggaattcacccaaggcggggaggaagatatggatccctgacatggggaataaaatgcaaatgttgtgctagtagaagagttagaagaagtggagatcgatccaaccatcttgactaggaagctcaaaatttgtaagggtttgttggttgaagtaaaattagccttaataaaatttctaagagaaaagcttgacatttttacctggtcacatgaggatatggtcgacattgaccccactgtcatctctcatgccctaaatattaatccaaacttttgtcctgtccagcagaagagaaggttattggataaagaacgtgcgcaggcactaaaagaagaggtagaaaggctctgcacaaacaagtttattattgaagctttctacttgacttgggtggctaaccccgtactagtacccaagccaaacaaaaaatgtcaagtatgtattgccttcaccgacctcaataaggcgtgtcccaaagactgttttccactcctaagatcgatcaacttgtggatgcaacagtcagacacgaaatcctaagctatatggatgcctattcggggtacaatcagattagaatgcatctacctgactaagaacacacaagcttccaaacaaacaagggtctatactactataaagtaatgatgtttggtcttaaaaatgttggagctaccaccaaagattagtaaacaaaattttcaaagactagatcagaagaaacatggaagtatatgtggatgaaaggctcgtcaaatctaggaaggttgggggcacatagaggatttggatgaatgcttcaaaatcctcaaaaaataaaacatgatactcaatctcttaaagtgttccttcagagtcagctcatgtaagtttcttggatttattatgaatgctcgaggaatagaagccaacccaaagaaaatgcaagccctcctggatatgaagtcaccaagaaaagtaaaaaaagtgcaaagcctaactggttgggtagctgcactcagcaaattcatgtcaaaatctacagacaagtgtgttcctttcttcaacatcctttgaggtaatatgaagttccaatggacagagaaatgtgaaattctttcccagaactgagaaagcaactcgccaaacctcatgtactctcaaaacctttggacaaagaagaattaaggatatacctggtagtcactgaatatgttgtaagcaccgtgctgataagagaagagaacaatgtccatcatcaagtctattatatcagtaaaagactagttaaggcacgaggtcggtattctttaattgaaaagctaacttactgtctaatcttagccacaagaaagttaagccttatttccaagctcatcctattcgggtgtataccgaccaacccttatgccaagttttgcaaaagcctaatgcttctggacggttactcaaatgggctgtagagttaggtcagtacgaaataatttttcaaccctgcacagtagtaaaagggcaggctttggcagactttgtgacagaatgcataggcaaagaagcaaacattctaaaagataatctcgagccagacaaaggaccaaaacatgagtccctacctgaagagaatgaagacaaacccatctggaagttacgtgtagacaaatcagtcactgattagctttttggtgcaagaattgccctcatcacacctgggggaaacctctgcataaataaattaaatttgggttcaaataaaaagcctccaacaatgaagcagaatatgaagcactcatagctggactaaagcttgcttaggaagtacgtgccaaatacattgaagtctgcagtgattcacagttggtggtaaatcaactctcaagggaatacatggctcgtggagaaaaaatgatggcttatctcagtaagatccaagacctactcgcacaattcaagggttataccctcaagcaaattctaagggaagaaaatacaattgttgatgccttggcacaacttgcaagcagcacggtaacagataaggctaacctagttctaatttaatatttggaagaacccagtatcacctctatggaagaaatcgaaatgatagatactagaccaagctcgatgactgctatagcagcttatctcaacactggaaaacttcaaagcaacagaaactaggctcgaaaaatgatgagaaaagctacatggcacatcatagtggaaggtgtagtgtataaaaggggcttctccatgccaatattaagatgtgtgacaacagaagaagctgcacgactcgtgttcgaagtacatgaaagattttgtggtaatcatgctgggggaaaagtttatcaaaaaaaatactaagacaaggatattttaggcctactatgatcgaagattcaaaggcccatgtggaaaagtgtgacaaatgccagagatttttgaagattccccaagcacccccaaatgagctaatatagatgcaaagtctatggccctttgccatatggggaatagacctaattggacaattgcccaaaggaaaatgtggagtacaatatgttgtggttgcaacggattacttcaccaagtggacagaagccaagcctctgacaataataatatccaagaaggtattggattttgtagtaaaaaacatcatatgctagtacggacttccacacaagattgtctcacataatggaaaacaattcgatagccaaatgttcacagatttttgtacaacacattgaatcatcaaaagtttctctgcagtagcacaccctcaaacaaatgggcaagtcaaagaaatcaacaagacactcaaagacaccgtggaaaaatggctcgaaaaagttaaagggaactggccggaggaattaccagaagtattatggtcgtacagacaactgaaatatcgacaacagggcagacaccttttgtcatggattatggttatgaggtaatgctgcccgtggaattagaacccccatcccacaggagactaacttatgatcaagaaactaaccatgccctcctcgcaaaatcacttgatgaaattgaagaaaaaagagtttcagcaaacctaaagctagtgctcatcagcaaaaggtagctcgatacttcaacaagcaagtgagggaaagaaaattcattgtgggagatatggtccttagaagagtgttcttaaacacaaaagatagggcatctggcatgcttggacctaattgggaagggccatatcaagtaacaaaagttacagattcttgagcatacaaactttgtcggtatgatgaaaacatggaactggttctagtaccaaggtattggaacgatgaacatctgagaaaatacaaccaataagtgtacaaggtctgatgacccccctaaagtacacaatgcttaaacactcactcttaagtaggtggctttttgagcggaccttgctcaatggtttcaaaaacaactggtacttaggtcggatgaccacccctaaattacagtatgttcaaaaatcgtcgctcttaagctatgtctcttggacagactataccgttcaattgttttatattttaattagctaaagatcagttagatcacgtaatagctttcataattcaataaatatacgttactatggttacagcacatctagaccaataaataaataaagatattaattattattctaattgtgcccattttatctctttttgatagcaagttatgtaattaccattgaaaatgcatacaaagggtttgcccaaacctagtagctggacagacaaaattaaacttgtgcaatacaagtgaccaagagtcataagtctgctcggtcacttgggggcaactatacccatacaaagcataggtaagtaacaagcttgaaaaataaaaataattacatgtgcaatcatttagacttaagagaaaatattcattctaaaagatagcaaagcatgataactctgggattaaaagttgcctgaccagccaattattttaaaacaaaatgaaatattcctcaagtttaaaaaccacttgttcagctatattgtactgaaaaataggcccgtaggccaaactaatagagaaaaagaagttaattcatgcaattggagtccctggttctttgtacaaatcagatgcatcatcagcggctagggtttcattgtcttggtcagtcgaaggattagtgttggatgcctcaacatcttccttggccttttaggcttcatagaaacttagataatcctctttattttcattgaggtaatcaaagttggcctctgggttagccctcaaaa

SEQ ID NO: 118313 - DNA, 1964 bp, Cannabis sativa
actaattacgatttagagtttattcttatttataaatgacctaaattaggatttgatttttttataataaagtagagattattattgaatagagtatttttatataaaaattttaatttatatatttatatatagtttacattgaaattaattttaacaatacaataaaaagtatatatatataattattattcaaaactgactaaattaaatacacattattgattgtaatttaaatatgtgtccattgtttattattactctattttaatttaaaaagatgattgctaatttagtgtaattaaatctagactaattaggattttcattcccaaattttgatatgtatcaaattatgtcccttgaaattttcaagtcattacaaattcttcgtgaattgagattgttggatttaaggatatttgtccaattttactaaggaaagttgcattggataaaaattcagtgggcataatttgttacatatcaaagttcggaggcatgattaattggtatatattaaagttttgggagcactatttagtatatgaacaatcaccgaattagtaaaattgaataaaattttacaattctaacaatcacaataattcagaaaaaaaaattaacagtaaaaaagttcacgaatatatgatttggcgtgtcaaaattaaaggaacaaaaatcctaattagtcttatatctattaaaaaaataaaaaaaaaatgataataaagtgctaaactacatttggtacaagaaatgaactaagcttttgatgtatttctttccctatcatctcttctttgtacactcccctacttaaggccattctttaatctatgttttggattaacttaaaatacaaaaataatgtgctgttttaattcatttgttatcatattattgtagtgtgaacatgcataaattaattaatcttaatatgtaataatataacaaatttgaatgtttaattaaattttttatttttgttttaataattaatttttaataactatagtaatatttaattatttaattaaaaaatattattttcttaatcaaataaatcatctacctaactgtcattcataaacacaaatatagatttcataataaggataatttttagccttgtaggagcgaatttaaagactattagaatatcaacaatgagagtttcacacaaatcacttgttagatgtgaagccaaaaatagatggtgtaaatgtgagaaaatttaatgaaatgacaatggcaacctttttcctttaagaaaaaaaaaaaattggtcggtaatctcccgaagcaatatcataagttgcttctattgttgatgatattaagtcaaatcatttgactttttaggggcgaatttgaagttttgttgtagtgatttgattgagttagatgatatttactttagcatagtcctttgtaaagtatccacaatgttagtggattattaactagtcctttgcctttgtgtttgactatgaacacatttagaagttgttggttttactaattggttttaaaacggaatctcattcactttatttattttattaccttttcaatattaacaatgacactctctaacgtaatcaactttcattctaaattgaagtaacttattttcttcaagaaccaataactaaatatattttcatggagaaatttaatttgtctttttccacacatttggatttcacatgtaaattctaataatatgaggttaaattgcacttgttcgcttttgacatgaaaatgacagacacaaattatatatgttagtcttggaatattctgatgataatctcaaagtgacctattagattatcatatgttagtcttggtagattgtaattaactccctttctctcgtgactcttgtctctacttatatataagtactttttattagaatattttatttatggaaattattttctaattaaggaaat

SEQ ID NO: 118314 - DNA, 1040 bp, Cannabis sativa
caaggtacttggacacttgtgccttatgaaccttttatgattctaattgataataaatgggtgtatagagtaaagctcaatgcagatgggactttggataaatgcaaatcgaggcttgtggcccgtggataccttcagcagcctggcatcgattttcaggacacctttagtcctgtggtaaaaccagtaactgttcgattggttctcaccttagccgtgacatataattgggaagtgaggcaactggatgtgtcaaatgcctttttgtatggagaccttagtgagacagtatacatgactcaacctaaaggttttgaagaccctctttatcctaatcatgtgtgcaagctaaataaagcaatctatggattgaaacaagcaccaagggcttggaatgacaaactcaaaaccactttattcaattggggatttaaggcttctcgtgcagatacttctctgtttatccatggctcgggctccactcaaataattcttcttgtatacgttgatgatatactcattacggggcctaatgttacacttgttcagcaactaatcactcatctaaataccagtttttctctcaaggacatgggggcagtccattactttctaggggtggagattcatagagactcaactcatatgtatttatctcaaagtaaatatattactgatttgcttgttaaacttcatttagatggtgcaaaagtgtgctcaagtcctacaagcagtgcacacaaactatctttgacagagggtctcccctttgaggacaaaactctctatcgtagcacacttggggcattacagtatttgactctaactcggcctgatgtagcttttatcatcaacaagttatcccaatttattcatgccccaactgtggttcgttgggaggcatgtaaaaggctgctgcgatacttaaaaggaactcttactcatggcctgcaacttacaccagcaacgagaatgtccattgaagcatactcggatgctgattgggcgagttgccctgatgatcgacgttctacaggtgg

SEQ ID NO: 118315 - DNA, 757 bp, Cannabis sativa
aaaaaattaataaggttatgggaggtttgcaatggaaagagaacctaaaagaagacaatgagcctaaagcggtttccaaagttttggggtatccaaagtatagtaatgtaagtgtttgtatgaaattatgtgatagttttttatggggttggtagctaaatgtgattaaattagggattaattaggtttaagtggccaaccgtgtggccttgatcagctcaaaatggttcacagttccatgaaccatggtgggctcacctgacctgacctgactcagtcacccaccacaaaatctttgaccacctcagtccaatccctatttatatatattaacaacaacatattgcataaccaaaatacagtaccatcccctttttaattttaaatgataaaacattcagaagcttagaaaatttctcaaaaaatatagtaattaatgtgttaaaattctgtggttatactataatattttaaaaaacaaaaaacaaatctcataaaacaacttaaaaatatgggagagctctctttaaaataataataagaatgagttgaaaaatatttaaaaatccatgtaaaacaaatcaagggtatatgcaatacatcaataaacataaatagttgtaagttgcatcatataaaacttgtgattaatatacagtactataggaaaaatttatagcaactaggagtaactctagtggaaaattttaaacaataaattacactaaaaaatatttttattattattatattattt

SEQ ID NO: 118316 - DNA, 1064 bp, Cannabis sativa
acatattacaaatattgattctgattatttttcatttattccgttacatttctccattaatttattctgattctgattactgtatagtaaacgtgccattagaatgagtatgctagtattttttaataaattttctatttttctaattaaaaaagtaaaaaaaaaaattctaaaaatatgttttaaaactatttttactttttaattttttcattgagaatcaaaattttaaaattttaaaaataaaaaaatcacttttattttcttcatcagtcaaaataatatataaataaagaaataattaaatctagaaataattaaatctgaaataaacaaataaataaataaataaatatatacctatttcactcagtggtggtggtggctcggttgtggccaggcaagagagggggatggatatggatggagagagatagagagagaggtgatgtggtggttggccgccgtcggtgtttggtgtttggggttttgttgaaggagggagagaaaaatatttgggaatttggagtttggtcatcgtgtgagaataacgaagtgtacgttagggggttactctacggtataaaatcctcggggagaccccaattataaaacctggcaaaactaacaaaatcattaactatacttatatgagtgtttaaaattgactcatatttttaattataggcatcggtctaaaatactcaattttattggtgacggtcctcgaaaaaaagtgttttgaggaccgacagaaataatagttttttgtagtagtgttagtttaataaaactcttgcatggttagcttttagaaacaaaaagtgtctcataattatcattatatataaaaacaaataaagaccttaaaataatcacaaaatcaaactttaaatgtatgacacaccgtccactagtcacctagctctcaataccaatcatagaaaacgacatcctaaatcgggtagtcgcaaaccaccaaatactggggctcatattaaatttacgtcctgtacagattctaggtcttacacctacaggtaagtgcacacctgatctaccta

SEQ ID NO: 118317 - DNA, 928 bp, Cannabis sativa
agcgcagtttgcgaaatgcgctggaaaaagtttttaccagcgcagtagcgaactgtactgataaaagtgatatttcttgtgatgttttttttccaataccaactacattgaagaggagcaatgttatcccaccaattctagtatatatttaatatatacactaataatttatttaacccaaaggtcatccttctttgttcagatggcccacacatacttactgatggctgctttattccaagcaagaatgttgtggaagtcaagaccaccatcctccttaggaaaacaaactatttttgaagttatcatattgcaccataagctttcccatgccataaaaaagcccaaacaatggcattgatatccttcaagattctattcggaatcaaaaatatttgactccaatatgtatggatggaaattaaaactgagttgatcagcgtgattcttcctgcaaacgagaggtttcttttactccatctttgaatttgcccaaccatcttgtcaatgagaacatcacacttttgagctgagattttttggcacatattgggattcccaaataccgatataacatagagctttgataaaaaaccaaaagcaccaagcaaccttgcaatctcttgttcctccattctaccataagaaatggctgattttgcttcacttgggaataaacatgtggttttggagaataatttcaacccttgtaacatgaaataggctgattgaaatcaccattactaaataataatacatcattaacaaagctcagctgattcaacttaagctcgtcacacctttcatgaaactgacagtcaaccttatctccaattcttctcattatgcgaggcaagtactttattcctaagacaaacaatagaggcagcatgggatcatcttgacgcaagcattttttagcctcaaa

SEQ ID NO: 118318 - DNA, 1654 bp, Cannabis sativa
  modified_base (27)..(52): a, c, t, g, unknown or other
tcatatttagtcacaaaaaaaattatnnnnnnnnnnnnnnnnnnnnnnnnnnagtaacagttttttgtagtgtaactcaagttccattgtagaaaagaatcacaattctaatattcatattcttgtgtggtttatatagtaaacgttagtttattcatgttatgtgtagtatatagaaaaaattgttcatagtatacgacaagtttgatatattgtaagtattagtttattgatgttgtttatagtttattgttaaggaagataacatgaaatcgtgtaactcatgataacaataaacatgtaataagaataaaccaaaataataaacagtattgataataataaacatgtaacaagaataggagtagcatgcaatttgaactataatatgggcatgattacaataatagtggtttatagtttattataaatattaagtgtaattattgtagatgttttttaggttagttgtttagttggaaaaatagtgttcaacaaaataagcaaacatcatattcgtttagttactaataacattaacaaagtatacatgttttccatatagtgatttcatattaatatgttacattttaattgtatacagtatacgaattgtataatgagttatagtatatgatttttacaaagttagagaacgaatttgaagcagttgttcgtaatcgtatatatagtatacgaatcatgattatgtttatgctacctgctcaataatgttacgatccaaattagaatgtggaagatacaatcgtagatttccctctgcgatttttacaattgttaatttaaagtagttattcgtaatcgtatatatagtatacgaatcatgattatgtttatgctacctattcaataatattacgatccagattagaatgtgaaagatacaaatgtataatagaatgtagaaggtgggtgctctaattttttttttttttttgtgagatgataggtgtattgattaattgagtgggatgatgattcatttgttgtataaaacaatgaatatgtatccaattttcttctcaagtactaagatggatcgatttatttggtctgtatggtttaagcttttttttttttttgtcaatggagttctcttatgttcgatctccttatggttttggattttttatttcgtttactagaactgagaaaatatataagtttcctttttaattttgaaagcacgcattgagaaggttgagaatcatggatggttggcgcgtcctgattcctcatttgatgatggaaactaattccggcagccacgatatgaatgggctaatgttgcacggtgtataaactcatttgttgaaccaccatttttgatgtaattgtaatgtctattatgtatatttgtaaaaaatttccaaactattaagcacacttatgtaatactatattattaaatttgtacgtgatttgctaagtaatatacagtttacgccactaaattgtaattctataaagtatatatataggacaagattatggcaggacttagcataagttccccaccggtagggaagcattttttatctttgattttagatcatgtggttattaagatataaggtgtatactcttacgataggactacttgtatacaattaaaattttatacatattataa

SEQ ID NO: 118319 - DNA, 1184 bp, Cannabis sativa
aatttttttttataaaattactgtctttttataaaacaaccgtaaaacaataaaatagaacaattaaaacaatagtggaataaaaaaaaataaatatagaacaacagtgaaaatattacagtataaaacttacacagtatttaaaaaaaaaaaaaatccactctacaataaaaaaaataaaaattaaaaatttctgtaaaaacttcttatcttttttcttaaaaaataaaaaaataaataataaaaaaaaagatgacatagttagtatcttggacaacacttaatatttatattcttaaaatttatcttaaaagttaaacaacattatatatgtggcaaattatatatagcaagacaactgcaataaacaacacatactctagcaaaattgcttgtattttaaaaatcatgtcttttctattctctgtacccaataaaaattacacttcttttttgtgtttggcaacataatattcaaaagaaaaaaattcttgaaaagatataatattttttaaaatattaaatataatattttttatatatagtaccaaccacaaagttataaaagatattaactctttttctcttgaaatatattgtagatttcaaatatataaatatcgaataatttaattttattaaagttataaattataaagttatcttgtcagttataactaatccaaaaaattatttgtgatcgttctagtataagcaaacgaataatggcaataattgatttcattttcgtcattttgtttttaacagatcatttttgttatttaataatcattttatactatgttaaaaaaataacaataataatcatttcataccatcttgataatgagtactgatattataccttttaaaattgacaatattttaataaaataacagggtgcaatgcaccctaatataaaaatcaagatggttcattattgataatgtatatattttggaataaataggaataatgcctcttaaattattaccactatattattgttccttaatttgtctgttttatgtatttcaggactttgttaagatccgtttatttttcttaacaaaacaattatttgggaagtttagagcttaggtggcataatctgacatagatagttggaaattcaatactcctaaacctgaataataataggtgataagaggagaattcttga

SEQ ID NO: 118320 - DNA, 6288 bp, Cannabis sativa
ttagcaacgagctgcacagtacatgtaaaaaatcacgtaatacgcctatggtagttagggtgttacagtttttgaggtggcttcaggtcagaaagtaaattatggtaagtcatctatcttcttcagctcaaatacacctgttgcaactcggattagactatgtgggacgatgggaatgatggaggctgacgaaaattctagttacttagggctcccaagtaccatgggaagaaataaagatgttataccggggttcttaaaagagaaattgcagcaaagaattcaacgatgggaggggcgtttcttatctaaggcaggcaaagagattcttttaaaaacggtgctctggccgttccaagttatgctatgtctgttttcttgttgcctttaaaaacatgcagccaattggagcaaatgatggccaaataatggtggcaatcgaattcaaagaaggctcgtggtgttagttgggtcagctggtcacggttgtgcattcataggagtgttggaggcttgggattctgtagtcttcgggatttcaatttgtcacttttgggaaagcaagcttggcgtttgctgcagcaggaaaactcacttgttggtcgcctcttcaaagcaagatattatccaagaggatcctttctgaatgcatcactagaaaacagcccgagttatatatggagaagcttgtttgagacacaatctttgatcaaagagtgtgctcgaattcgaattggtaatggacaacgcaccagtattttggggactccatggttgcctaatgactctaatcctcttgtaatatctactcatcctggcttgagtaactattcagttcaaaactcgatgaaggtgaatcgaagagagtgggatgaagagctcattcaggatatgtttgaagacagggatcaagagattattctcagcatacctttgagtaattcgattgaagaagacacttggtattggaataaagacactgttggtttttatacagtaaaaagttcatatcaatatattcaagagctaaaaggggcatggaattcagatatggaggataaggtttggaagactttgtggaagattaaagtcccacctaaagtactccatttgatatggaagcctttaaccaattgtctacctacccgtacccaactttactccaagcacgtacctgttcagttgacatgcccgttttgccatattgaggaagaatcaataactcatgtgttgctgcaatgtcagttcaccaggtcttgctggaaccgttttggtttggccactgcctctgcccactacaataattttttttctctagtttaagggtgttgtcgacaagaatgcacgagacctattggaagaagccgtgatgctttgttggtcaatatggcaagctcgaaatggagtaatctggaaccagaaagtatgtaatgcagctgatgttatgttcacagcaaggttaactttagcacaatggaaaaatgctaactcaagagatttgagccactgctggttccatctggaacttatgacagtggtgagcgttgggcaaaacctgctgctaatatgctaaagataaacattgatggggctatctttcaagctgccaatgcatactgttcgggtgtggtaatcagggacactgctggttctttgatcgaagctttttctgtgtacaacctcggctgtagtcaacctgagattgtagaaatggttggcataaaggaggcgttaagttgaataaaaatgcaagaggatcaagtgattcaaggtgctataattgaaatggactgccttgttgctctgcaagctttgcacacttcaattaggatgccttctttatttggtttactggtttttgaatgtcatgagattttatctaatttgcacaatgttaagatttgttatgttaagcgatctgctaacatagttgcgcactgtgttgcaagaaacttttgttattggtcaaattgccattttgttgaaggttctatttctatggaactttactctttgttaattgtcgatttggttgattaataaaattgaaactttttcaaaaaaaaataatgctgatggctttagtttttagtttatgtattacatcattcatggctgccatttatatatatataaatatataaagtcaatgaattttaataatttatacaccttgatatttaattctttaccatgattatatgaataaaactacagctgtctattatacttattggatgtgtttataatcatagcggtagtttattatcaaataccgtaaacttaatattctttggctgataggattctttggaatttaatccttcaaaataataatagacataattagttattggttaaattagttgaaactgagttgtttagcttctttaattaattttttaatcataacaatttgttatcttgtatgagctatagttttcatttttattttattttgtagatgtaacttgtactgtaaatgtcaaagaaagagaggaagagagtgagagagagagctaaagagagagttcgagaccacggagtggccatgagaccaatcgatccctacagtggccttcgaagacctacggacccattcaggtcctagcctagtcttcgcctcctcctttggttttgacgtgcatggctgagcatccaacccatgcacacgtgaaaattttcacgtggctcaattttgagtctcacagctcgtagccgcactcattgggatttgtggctcatcattttgaggtttaaaatatcgtctcgatgagatcagggtttactccttaaactcgagttcactcatgaatggagaatttgtggaatattaaattacataatttaacaaaaattacaaataatttttaataaaaaattacaacaaaattcctataccacaattatggtgtacaatttttttttaataaaaactataaaatttctaacccaatttttccatataattaataatttacacccaatgtacaaaaaatctatccattcataatatatcaacatatatataaatacattattacccaaacacagtatttaatctatataattatgaagatagctcttaatataaattgttggtttttatggtccatattataattagaaaagcagaagatgttttgattaaaaaaaatataatctaatatgaactataatccctagaatctcaacataataatttatagattaaatctaaactacatgaaaagagaaataatacgtcttgtagcctattagggttttctcgctatcttttttatattaatttatcgaacatgtaattcaaaaacttgctgaagagttcacaccacaatcttctaagtcagcctcaacactaacgaatggagtgagctattagatttaatttggatgagtataatttaatttgtaatcaaagtatatattcaactcataacatgaggtactatgatgagatagagaagaacacaaaaacacacacaaaaacacacaccacactagtgtgagagagagagagagagagagaaacaatgtaatttttcaaccctaattcttctttaaaaagtgtcgctcaattcactaatattagttgtctattattctaatatattatatatataaaattataaacaaatcctttatttaataatttaaaataaaaataatatctaatttaattcaaattcaaaattcaaatataaataaactgattaacaaaaattaattatatccttttattttaatattatcttttaattaagtagattatccaataatatatttaattaaaaattaaaagataattaattaatttaatttgttaaatttaataataaaataatcaaataaaattaccattgatctttatatgttaccctacacatgtggggtaagcccttaccccacacgtgggccatatgttaaggtctaaaattgattttttaattttattacaaataagatttattatttattttgccaataattaataattgattaattctcatttatctcttatttcactagcattaaaatacatattattttcactaaaataatatatttttctctttaatattatttaagaataatattacatttaattaattaatatagttttataaaataaaactaaatagttaaataatatttgattacacaatttataattgttataattattcaaaataacaatttttcataaattactattttacccttaggatttatttctcactcaaattaaatctttccctatacagtgttgtatagaggtgactttgagactatgaacatatatttcagaactctaataaacaattgattattattgatctcatcaatagaataatctagtttattattccattattactccactataaatatggaattgtactctttgataatatagaattatactttcagaattcttactagtagtctattgatataatcaatataagtaatttgccctccaattattagttcataattagagttggtcaaaattatttttttacccttctaatgatctcttgattccttatgtactattaattcagtgtgaacaattaatctattacttattatagatttagatccaactgttaacactcccagaattaacactataaggaaactaatatttaatcatttcagaaatcatggattccaatattttataacatgttcccaaccactcatgttattaagctaccaaaacagaagttgtaagaatcatcttttctaaaaagttttaacgagtgaatcaaagaactcaatgaacacaaataagagttcatgtatactcagaattcagacagatctactaatgatcattgttgtgatataaataactcttttatgataaacgacgtgttgataaaatatgttattacatatcggtctagtcatgtataatcaaattatacacaatacctttactacatctctatctacatatgtgaccgaatcaaaatcatacacagtagagtatagtgtatagtaaactgtacttagtagttctatattaaagattcttttactttaatacactaccaactagttctgaatttgcctaggtgtttgggattgcttgctggtgccacctcaaggctctccttccccacgattgggatctaatcaatcttgggagtccagaagagatgctttcgaggaacttgtaccataccctcatggtaagttggccgtattttttttgttcctcatatttacttgctcgtaattctccaggcttctttcctctcttttacctccaatcgacgattcttggagcggctcagatagttggagggcgaggtccaaaaatcactagcccaatgcgaggccgtgattaaacaacggaacgacgcccaacaggaagtcacccgcctcaaacaagaggctgagaagtcaaagaaagactttgaagaagccgggaaggccatcaagacccaggctgataaatttaagaaggcgctcgaggagaaggaggctaaactttaagggaaagaagctaaactcgaagggaaataggccgagaccacagaacaatgtaacaaggttggcctccgtactgtatattgagcatggatggaaaatcctaacatggacacaagcttcttagaggaggaggaagaggaaactttggcttactgtgagagggccaagacggaggaggaagaggccgaggcaacggaggaagaaaatctatctaagtctcccaccatgtaggcttggtttttatttatctttttttttgaattggccttagagccgagacaatggtttgccccttgtggcacattttgtaaagacaaaattgcaaagttggatggccaactttgctttttctttattttatcttttaatgcgtcgtacttttatgtttgaacttcaatatgtaattgtttgcttgtgtttcattcacaatttaaataatctattttgatcatgcattaagtttcttaggggtttctattgctcgtatttctctctgacgttaagtagttaatagcctactttgcgagcaatttatcatctgccctgcactcgattcgcgagcagtcattgattctgccttgcgattatcagtagtgtttcaagaaaacttgaatatatttttaatcaccttggcactttgtatatatttttattgcttacatgcattgacagacacacatgtattaatgtggggttatagcccccactaacaaaaatattatcttttaaaaatttaaatgtaatttttttaatttgataattataggttaaaatagtaga

SEQ ID NO: 118321 - DNA, 1095 bp, Cannabis sativa
  modified_base (1060)..(1061): a, c, t, g, unknown or other
atatatatatattaataatataaattttaaattttttaataaatcaataataaaatactctaatgaaattttcgataatcctcgaaataaataataatcatataaatactatgatgatgatgatacattatggggaacgagcaatttaaaatttatatataatttaattgtataacctttaaatttcttgattaaaaataatataactaataatacggtaaatagacttatattttcaataactaaaattattattaataataagcaattagaaaatataattttaattattattatatgttagataattttttaagttagtatttatcacattgataaacaattattttttttgttgcgcgtagctatattacttagttatactataggacaaaaccctatttaccatgcttttatcataaaggacaattctatataaatacctaagcatgaaatcctgatatccaaattataaaagcatgcatgataatcttaaaaataaagcctaaaatattcattcttgatcctacatgtttagtatcatctaaacaaagagacaaaattccttacccttgctaaccgcttatcccaaaacctatagaacctgtaggagtgttcttggtgttcttaataacctaaataccataccaaaaattatgtaaatatcatgaagaaaatgatgaaatccttaggagaagaagtgaataagatcaataggaactaaatctcgaagaaacaagcttacgcaatgactcttcttccttcttcttcttctttcttaattttttttttcttacttttttctttcaaaaattttgtggctctccctacactattctggctgaatactcgaaggtggtgtgagaatgagagttcttgcttctctatttataggatttcaagactttggggtacaggaatgagtcatcaattaattgtcttaacctaatatcattagtttttattcctaatttgcccatttgatacctacatcctaatcacaatatgttagaccgaaattaaaaaacaatgaaattggaacgaattaccgatagaatannctggctgagtcgcggacaatgtcgctctctttaa

SEQ ID NO: 118322 - DNA, 2367 bp, Cannabis sativa
tgttcgatatgaagcggtctctactactccctaccattcttccagcgaaagtttattgagtgaggtttacattcatacaatacagtccagttaatgattgaaacaacacaaacttatacagcatgagtaatcaaagttatgccttcatatgttgaagaacaacagtattatttaactagtctaaattctgttatccaaactgacaaatttcatcaattttctttagtaacaaaaagtaagtggttgtgtaagcagatgcacttgcctcagtaagaagttcccaagcccaaccaatagcttctttcttaaaataatccccaaaagaccaatttccaagcatctcaaagaaggtgtggtggtaagtgtctttccctacgtcgtcgaggtcattgtgtttcccaccagctcgaatacatttctgagtattgcaagctcgagtcagcttactcaaggcagtattgggatcagcagtccccaaaaatatcggcttgtattgattcatccctgccatttcaattcttccgtcaaacaagacgattaataaaccaataaaaaaaacaacactttccctcattttcccaataaccaaatgttccgagcaaaataaatcaaacttccaatcatcgaaataaattgaactgaccggcattggcgaacaggagggttggatcgttgtgaggaacaacaggactggacttccagaaaacgtgatccttggcctgaaagaagctgatgaaggtgtccctgacgcggttggcaggccagtcagcgacctgggaatcgaggccagggagttgggaccccatgggagggtgaagcgagggggaagatgagagaagtgaagaagaggaggatgagaagaagagtgagaaaggcggcggcggcggcaaagaagaagggttagctatggctatggctattccacgaaatcctcgtctcaccacctcattcattcattcattcttccttcctttcttatttgttttgtttttaatttcaacgctaaacttcgttctttggatttatgcccctattatgtcacacctcacacgaatattatctcatcaactacacaatttaatatgtctcctaaatggaggtttttttagggattttctaaatgagaaatttgtgtcataaataaatacttaattgtgactgttagacttcgtgattcgcaaagggaaagattaggagttgtgcaatttcatatttaatattgtatagatatagaactgtatagttgaagaagacttaaatagattgattggtactacttatatcaacatcttgttttaaaataactttacggttaagtgtgcttgatctgggataatttcaagatagatgatttcttggaaaaaagtgtgctagtgaggacaaaatatcctagaaacttattggtctatagagctagtatgaggctcaatagagacttgaagcaaaaacgttatattgatgtgcttagcgaaaatagaattttaggagttttggcattatttttttattttttgttattagaaaataatttttgtagttttcaaaatgcaattatatgtttggttaatgttttctaaaaattatttttaattttttttactttataaaaaattttaatattacacacttcgacacgaattcaatcctaccctaaccctggtatggatttgaatttggtctcaatcccaaacccatctcgaaaccggacaaggacctagacttgaaccctgaccacagtgttgacccttaggcatcaaccatggacatgaacctggatttggaccccgaactcagactttggacatgacctcatcctgggctcgagtatgtgaaagaaagtatcaaaaaaattgctttttaattaaaaaaaaaataacttaattttcaaaataattggtcaaactctgcctattggcttttagaaataatttttattttttaaaagtgaaaataatatttaagtgatatagttaaacactcttttagttttttttattttaaaaaataaaaatgtgttccgtaactttttttatttttcaattttttatataaaaaaaatccatataaatgtctcgtaatttttttttttttttttaagttagctaagacaaaatgggttaagggttgggagtgagatttgagtgcaagttaagggtttaggttgagatccatgtctaagttgaggtcccttaaaaggattattctaatacactccaatctgttttatcattgaagagaattttttagtctatttttttatctgttatattgtagtaatttgagacaataagtaaagggaaatttgattttctatacttaaaaaactaaaatattttattcttaaaccaatgcattttaaactaaaaa

SEQ ID NO: 118323 - DNA, 712 bp, Cannabis sativa
ttccgattatttttcatttattctgttacatttctccattaatttattccgattctgattacagtatagtaaacgtgccattaatgttaaattatacaatgtgtatatatataatatatgattaaaacagtgttatggaaattagaaaaaaaaaaaacagtgttattcaatcggtctggtagtcttcttgcattgtcaactctttgatgatttttcttttattatatgtttttagtttttacaaattattggaacttaaattcatactgtgcactgtttgataattgggagaaaatatggaaaaggaattttatttatctaggtcatgcttgtaagcataattttcattcattaaggaattttggataatgtgattgttcattggtgtgtttctagtttactaatagtattttatttctttgttatttggaaattaatacatttatttctcaatgaaattatctgctaatggtctttgttttacgttcatcagtagaagaccaatacccttatacccatttttgatcatcatcgcagagataagaaaagtagagtgaaaacagccatgtacacacccaaaagaaaatgttaaaaatacaaaataaaagttgtactatgaatttttattaaatgtttagatatatatggataaattttagttttaagtaagttatggtatttttttattttaaattattatgtggtttttttt

SEQ ID NO: 118324 - DNA, 1734 bp, Cannabis sativa
aaagctttggcaaccaatttcagtagcttttttaatgttgggctcgtggcccaacctaattaaggaataagggcctacagaactcctcatttgaagtccaattataccatcgaagcaaggtcatcagaaccttcatttagagatgcctccaccatcgaatctttatctctttggttacaattctcttcaggcgtttggatggtaaaggttttacttactccttttcccctttttctctccttttcttattcttgattcgaagttcgctgaattttaaaatttatgtaattcacagggcaattgctatctttagaatcctaagcaatttcatctccactggctccttttatgggggatacgcttccgcaggagacctaatctgtcagtgttttatgttttttttttccttttttgctgggaatttgtttggatgccaagaaattatttttctattattatttatgtgcaggtttgctgcaaagtgtagcgttcttggaagttatccaatggagcaattggtgggctatttagttaactttttttatataattatttattttatcagataaagaaaaagagattaaaattagtggcattatatggtcaggtttggtgccaagtggagtggtgcttcccttgatgcaatggggagggaggactcactttctattggccattgttcgacaaatcgatgaggttcgttcatttacctcacttaatcctacgagctttggtagaggtggcgattattggttagctatattttataaagttaataataaattaaattatattagaccgactctgaattttaattatgttagaagctactacacactattattattttttagtttttttttttaatctatttatcaatgtttttaagaatttttttatttttatacttttaaaattttattttattttattttttttggtatttttataaaattctatatagaaatttctattacaacgaccaatgcaacttaaattctaacaaaaaatcgtataaaaatctttattgcaactagcgctgtaaccactctaaaaattcaaaccgtaaatttaaaaaaaaaaataaaaaaaaatatatgggataatttccctttttttatttatttagagattaaaattcaattcgcttagtaatttaattgatactagagtttttttctatataattattttaattatataaatttatatatacaggtacaagagttaccggcagtgtttattacctttcttgcatggagcttaagcgaggtaatttttattcaatcaattttaccttttcaaattcgtatgtatagtgaatattgtctatatatagtgagagagcatcacttagtatcttgtacttgtagaggataggggcacctcagcctagctcaaatagctgttgggtgtgtgaaacacactaaagtttacttatttagcatacgaataattaaactaaataagtgatacaaaattaaaatataatttacctaataaagaaaaatatgttctaataataatttactaaaatgtgatataaatttaggatataaaaaatgtttgtgataaatatttatactgtacgttaataaattatataggttttggcaaattagttctcaaattttatttgggctatttttaaaaatatgggaaaaattattaaggttatgataaatatggcataaaaagtaaatgccactaaatatggcattatctaaccaatca

SEQ ID NO: 118325 - DNA, 1777 bp, Cannabis sativa
aagtgcggatatctgcattttgcggattggattgaattggatcgtgcggattggattggatcggatactttgtgaacacccctactcacggcacaattaggtcataatccaagttttgtttggcatagcattcgggagactcaaagtgttgttaagaatatggtgcgttggaggatagaagatggaaaaacagtggttgtgatgggagaaccttggttgcggagaatccttttgtcacctttatacattctgctcttgatggtatagtggaggaaaatttgttgaaaactgatggagtaggttaggatttggagctgttggatgatttgttcaatgattatgataaagcagtaattcgtagcattccattttaggttacccctcctagtctgaattctttatactggtttcatgagatttctggtgcttactctgtgaagagtgctttcaatttgctccaaaaacttaagagattgaaaataccacacaagtttaaaaatcttatgtggagggaaggatctagttgcctaccgactatgataatgctacccaccaagaaggtagtagtgactagcctttgcccaatttgtggattacatgatgtatgactgatagtcataacaattgcataaacattttgctaacatttatttagtttgattaaaaccttcgtctgatgcaaccttcagccaaccatccaacaacttttgtttgattaaaattttcgtcttatgcaaccttcggccaaccacccaacaaccttcgtctaattgaaacctttgtctgatgcaacattcggccaaccatctatcaaccatcctgcaaccatcatctgattgtgtaagtgatagtgtaagaggtataaatattgtctacactttatgaagatatttttataaataaagtattaatttatattttccatgtaataactttttttatactctttctcatacatcaaaccctcctaaaagttttaggaaagttatatttacacccttaattttaagagcattgctattgggcaccagtagtgtccagcaccttccataagtgtcaccttatgattggttagcgatattccttaaaacttatatgagaccctctatttaattacacaaattccttaaaacttatatgagaccctctatttaattacacaaatagcagtatgacgctaaagagggtgctaggcaccagtgatgttctttagcaattctctcattttaataaagacattccattttgttttaagaaacaattaattacatatttactattatgactaaaatatacaattttaatcatatttgtatttataaatacatccagattataaatgaagtgatttttcatgagtaccgtcaaaaactcaaatcaaagaattaatgatattgaaattttatcaaataattcgtagagttattgaggtatattatgaaaaattatctacttttgagaacatttcataaaaaactatttatatattgaacaacaaattagtatatcgaatcaagaaatccctttgtcttcttggtcttcatttttaattttttgtttaggaacttctttccttttttattattttacaaaatgactaaagaatttgaagtaaaatttttacacaaatttatccacattaaaagtgagaaccttttcaatatttttaactgaataattaatttttttagtccctgtacttatgacactatactatgatgccccttaatttataagtgtagttaaaaataccccctaaaatatatcagttggaata

SEQ ID NO: 118326 - DNA, 2020 bp, Cannabis sativa
  modified_base (1203)..(1229): a, c, t, g, unknown or other
  modified_base (1956)..(1960): a, c, t, g, unknown or other
aaagaaaagagcaactaaaaccgagaacacaaggtaagaattcgggtatgtatgcaaaacaatcttaccataaatgaaaaaatattttgtcaactaacttcccaaaaaatgactttacattctaaataataataacaaagggtactacctaaacagtttccgccttctctcttacaaatataatttatttgtatcgacactaattgtacagaatgtataatttcatccccaaagtatattacaaaattataattaaccaaagaataaatatattttttctatttttacaaataataaatattattttagaactcgtatcacaaaagttattgattttttactttatttatttaaatgataattttttaagaaaaattagggagataatttcgacctatcttttgcaatgtggaacgtaataatattatgtgcatattggtaaaaataatgacagttaagatagattaaaaattgagtcacaatcattattgaagttaagaagaatttttttaaaaaaaattaaggtaaaaatattttattataattagaatcagcatgtcattatattttattttgtataatataatatgtaaattgtaatttagttaaatagaaagaacatccactaacttctttttaaaacacataattaaaatttatatttactctattacaatattgtgcaaaacgtgactacgtttattagtttataagatattttctttgctcaaatataataaaacatttaaagtagttttagtcatttttttttctttttaagaatttagagatttgggtttcttataattaataaattttaattattcagagaggaaaaaaacataacatgcgataatagtgtaaagagaaatttacggctaaatccctctatgtttcaattattatacacttaaaaaaatagatttcatatttttttagtcccacttttttcattaagtttaactttaattaaatttatatttttaaaaaataaataaataatttttaaataaatttatgagtttggaccaataagagtgtaacacgtggaatataaatcaaattttgttatatttaacaaactagtagtgatagaagcacaaaattgtaacataaagtatttaatctgtaaaaaaaagtgtaagtgtataaaactaaaagtatatggtgcctcagatattccttattattattattattatnnnnnnnnnnnnnnnnnnnnnnnnnnntattattattattattattcatagcttatattaaaactaatatctaaataaatgtaagatcaacctaatatatatgtgttatattaaatgtagctaatataattgtttggtattattgaatttgattgtctagtattgttagaagctcttagaaattttaatattttgtcatctacttttggtggtgtcattgaggattatgaacaacttttatcttcttttagtaatgtttctttacgttttattaaagatttgctaatcgggttgctcatcttatgcctagagtaacttgtttatatgttgatcgtattttttcaaagtgtaatctcccgtttaatattgttgatattgttgaggctgagttggtctagttgaataaaatttattgttatcctaatttttttccacatgacgtgacatattcacatagacaagatttatgccacgtggaatacaacttgtcaatagatgaaccaagtcgacatgcacaacttatgaattgacaaagggtccgaatactcaagcagaacgaagatacaataaaatggacaaccaggagggtctagtcagacctcccctggccggccaaggaagagtatgtgtcggccagccctagacaaaggatatgtcggctagcctctttaatgatagcccaaacgactagtgtttctgcaaccttaacctttgacgacccatgattattttcaactgttgggttttatgcccnnnnnaaaactcatttcaatataatcagctttacttattaatatagatcagagatcggaagagcg

SEQ ID NO: 118327 - DNA, 1610 bp, Cannabis sativa
atatcgtttatcgcttattaaaagactcattgtcgttggctaaaagaaaagtcaacacctatcatcaacacatgatgcccaatctgcattagaatacccttgaattgaaaatgaggtagcaggagcgagatgaaggccatgcaggattgtccctttgaggtatctcatcagtcttttacaagcttcccagtgtgtagaagtgggagcatgaatgaactggctaagtttgttaatgatatgtatgcaacatcaggtttggtgagagtgagatactgcaacgctccaagtgtacttctgtatagtattttgtctttaagagggtcaccatctgtaagagacaattttgtgctgacacttgtgggattcgggcaaggtttagctccatccatttttaatttgacaagcaggtcagtgatgtattttgtttatgacaaatacattctagtggcatatctgaatatcttaactcccaagacgtagtgaacattaccaagatcttttagggagaaggattggcttaggtttgagatgaatttgttaatgaaagttacatctgggcctatgacaaggaagttatccacataaactagcaggatgattagctgactgcctaatccataggtaaaaagagaattatcagatttggatggagagaatcctcattgagtgagagtgtctttgagagttttattccaggccctaaaagcttatttaaggccatatagagccttatgtaatagacacacatgattaggtttggaagggtcaacaaatccttttggttgaaccataaacactctctcattcaatgttccattcaagaaagcattgcttatgtccaactgtttaattatccaattcaaagacacagctagagtgaggataatccttatagttacaggttttaccactggagagaaagtctcttcatagtctattccaggtgtctgcaagtaacctttagccacaagtgtagatttaagtttgtccaaactgccatcagtatttagtttcactttatgaagccacttgttaccaattactgtcatgccaggggtgtaaggcaccagagaccaggttccaaccctttataatgcagcgaactcatgttgcatagatttaaaccactgaggttgtttaatggcagtggaggtggattttggttccgataggataagagcttctgggagagggaatttagtggccagataagctttaggtttgagaataccactttggcttcttgttctcatcccatgagttttgttagagaaattggtgtttaaatcagttgcagcttcattaagttgagtttgctgaaaagaggtaggggtaggtcttgtatgtggggttcaggtggaggcaggagttgagtaagagattggtcatttgtggacaatatgggtttaccagatgctttaacaaaaaaaagataaaatatagtattcttggatttatttacaaaattatgacataaaaaagtaaacaaaataaaaagttcatacccataaacattatttttttttttttgagaaaagggtaaagttttattaacttaagataagatcatcccttacaattgaaatcaaatttgatggagcagagaactc

SEQ ID NO: 118328 - DNA, 1693 bp, Cannabis sativa
ctcccggaggtgcttcgttatagccttgctctccgggagtatgtgaaacccccatgccttctccgggaggcatgttaagtggtaatccttttaattaaggggacttagtcgaatcatctcaaagtcttgcttcttcaacctacgtgtcacggtctggttggtccatgtattttagataaaataaggggcaacattgacataataaattatttagatttttttaaaacaaattatatattacttatcagttagtgaacgttagttcaatttattccaggtgattgatagttgactattaagtcaactaattgtattctattagtagttacgtagctcttagtttgtttaaacaactcctaggcttagctacttgattgtaataatgcttataaaaggtcattgcgttagattcttttagtttagtttgtacagattacattcaatacaattaaagaacctattcatttattttctctgtgttatgattgcttgaatggtgatgtgaattaaattaagacttgtattgattcttaagaaattggtatcagagcttggattagattgaaggattagagaagatcgattggaggataaaggaagattgaagatctctacctgctcgaagaattgatccaatggaagataggaaatgtgaaatttaattttgaaaggttcataggcaagaacaactttggcttacggaagatgaaaatgcaagctcttctggtacaacatatggacttcaaggcaccataaaaggagaatgaaaaattgagagaaaggcaaagaaggagacatctgaattgctcgagaaggctcatagtgtcattattctatgccttggggataaggttctgcgagaagtataaaaaaaaaaagagtgcatgcaaaaagcttatgaaagaagcttgaacaactttatatgaagaaatcattgtccaatcgaatggcagaagttatatacttttgagttatcccctgaaagatccattgaatataatcttgatgactttaataagatcattcttgatcttgaaaacgtagatgctaaagtggaagatgaagatcaagcaattattctggaaggaattcattgacattggtgaggttcatagtactctaatgtcaaagcaattgaagaaaaagttagaacaaaaggataaaatatcaagggaaggattgcttgtttaagagaaaataaataagagatataacagggtttaagaaagtaaaaagaatgggaaatctaattcgaactacaagatgtgttacatctgtcataagacaaaccacttaaaaagagatagtccagaattgggaaatttttaaaacaataagaaatttggcaatgctaacattgtagatgggtgtgagagtgatggttatgatactaatggagttatgggggtatcaaatagatattatgaactctattgggtaattaactcaggttcttccttcgacatctgtccagatagttctcaattttattgctacaaggaaattgaggatgggacagttaagcttggagataatagagctcttctagtgactagaatgggatctgtgaagatcaagttgataggatgtagtttgattgaactctagtaagtaagacatatccatgagattagagtgttatcccgaatttggcactctgacgtggcatcacgagaatggtgacacgtggact

SEQ ID NO: 118329 - DNA, 1075 bp, Cannabis sativa
  modified_base (36)..(54): a, c, t, g, unknown or other
  modified_base (1004)..(1011): a, c, t, g, unknown or other
aatcacttcaaaactcttaaattgataactaatcannnnnnnnnnnnnnnnnnntagggcacaaaacccaacaaagctatcctcgcatgataagaactcgcgataagctgtgacttgggcaaggtctagtcgcacactatgaagcagcatagtaaagtaaaaggaggaccaagagaagttatcataagtcgcgcatatatcagttatatgcgaagaccaagtgattctcccttgcgtcccacgtaaagattgcatctttacaagcgcatagtcagaatgactaaagtgtgtgacaacttattttgaacacgtaaatttcaatgttgtcagtacatgaacgcccaatatgaccagtatagtcgcaggcgttctatctcataaatgaccccaaggttgtagtcttgagactttgtatgcaagtaacaccaaagaacctgcaagttcatatgttactcggaaaattgaacaatcattatgcaacttaaagtcacatacgttcgaatattaactaagaacgatcgaaaccgttctttcatttattttgtaaacatttttcatcttaattaatgttgtaatagttatatctgatcagttatgtaacttaaaggatcacttaatttctatataaaggaatgatttaacccaaaataagaataatcacaaaattcttacaaaagtaaactaagcagaccaaactctaactaaaccactataatttatctgtgtcccctttaattacatatacactgttgttgctttatcctttgctattttacattgagtatttaccactaatttaagtgaatatttgtgattctgtaagtgagtattcttatttatcatgagtactcatgatttttgttagtctactttcttcatacaacaagaatgttttagtaaattattcagaaagttatagaaatttacaaataacttcaatgtatttgattattaggattgggcttactttcttatttttatcttgaggaaattacactctatannnnnnnnatattgtcctcttttatttttatcatcttttttaaagtctatcatttttaactctttttttaaa

SEQ ID NO: 118330 - DNA, 960 bp, Cannabis sativa
attttaaaatatttaaatgtgaaattttttgcttaacaatgtaattctactagcagtttggttgctccttcaaaagggaaatttaaattgaatgttgatgcaaccattgataaaaactcaagaactattagtattggagctatacttcgaaattcaaatagaaatatcatagcatatctttcaaaataaatattaggtatgtattatatcatacatagatatcgctaggtacaatatatataccattagactatacatatttaattatgaaaagatattagtcatcttcttatagaaatttatctaattggaatatatttacaagaacaagcttgagtgttataaattattagattaaatagagatacaacaggattagatattggccgtctatctatcattgatgaagaacttgttttaaactttctattattataaactgaagggttcacacacttcgatccactcatttaatagtataatattatatctaattttaatcttttataatctattagtatacttttaatataatattaactaattttcaattaatatattaccttttctaattttctacaaattataattagctattagtaatttttttagtttaatatatttatttatacttgagtaataatcttataatctcttattcttataattatatttattagcttttaatattagtatgtttttgtatttttttctttttgaaggttactttccgggggttcaagtggagtgtattgcgattatgatgcctttagattggattttttctctaagttatactattcatatagttgaaactgattgcctttcaactgtgtgtgctttttataaaagataattatttttctaatgattttggatctgtgctagatgatttggcaagtttgttgtcacgacccaagccctaggccgtgacacatttgtaatatccataacttgggt

SEQ ID NO: 118331 - DNA, 3779 bp, Cannabis sativa
  modified_base (2265)..(2265): a, c, t, g, unknown or other
taaaatacagggtaccaaataagtattattaaaaatacaaggtaccaaacttgtatttagataaaacacagggtaccaaatgtgtagacacccttgtaattttactattttttcttaagttttaacactcttatttatctttctcactctcacaaaatttgttctatttttaaaatttaaaagcacttctaattttttttctatattttcttactaatcacactcaaatttgtctaatactattttttcaaaactaattatatatatttaaaataatattaattaatttcattttaactcttacaaatttaattaaaattatttctattaaaaataatttatataaaattattaaattattattacacatttacatttttttccatctctctttctaaacaagataaataataatatacgtaaaccaataaaactgtaccatgtgtacactgtgcccacatagacaattcaacatgactgttaacaatcaaatttagttggtaattgtaaattgctaacaatatcttagttttgggagtttttgcgccaaaaattgggttttgaaggttaattgttaacaaagtgaaactattgaggattttgttacaatttacctttactttgatgtggtttttagatttatttgttatacaattattttttagttgttatgtatttgtcacggtgtaattatacttttacatttttctctttccttccttctttccaaacaataaaaaataagatacgtttctatctttctatctttctcttcaaaaataccaagtattggagtaaaattggattgttgttaagttttttgtcattgttatttgttatttatgttgtacacatgtattttttatttgttgtttatgtttggatagactgattaatatttggttaatgaaagttatatattttttttttttgtatgttttgtagtttattcggagttgatttataaatgatttgcatattccaacgaggtcgatgtcttatttttttcttttttttttttctgttgttttgtagttgtcttcttgttattttatagttatttttgtgttgttgaattttaagtgtttcatagcagtgttatagttatttttctattgtttttatgtgttttgttttgttgtacaattattttttagctatttttttttatttatgtgcacatttgttatggtgtatatttttattttattcttgacaatttttttgttgtataaatatgtatttattttgttatttttgtattgtgtttttagttatttttaagtggtttttaaaatattttttttttgttgtacaattactttttagttgttttttgatttatgtgcatttgttatggtgcatatttttattttattcgtgataattttttgttgtatgtgttttgctttgtagatgtggatacatatatttaatttacttttttgacacatttttttttaggaaaatacaatgataagtttttccctttttttatcgacacattgtgtattattatatattgacaaatcatagttatttttttatttattttgaattatacattatccattatattatatacatcattttgaaattgtaaaattttattattaatgtaaccattcatttaatttctaaaaactaaatagttattttagctgttactagctcaaaaaagaaggaaaaaaaaaagagttcaaagtataaagttgtaataaataaatgttacgaaaaaaaaataatgtagtagtacagaaaataatcaagttgtcaaaactaaaatcactttgtagtacgaaaacaagcggaggagttgatattgttttgcatattgtaacgaggttgatgtcttgttatttctctattgttttgcatctgtctttttatagttttattactatttttttagttgctttagttgtttttttttattttattaaaatatagtatttttgaaaacttaacacaataaaaatatattaaaaaaagtatgaccagtaaaagtataaaaatataaaagaaagataaatattttttttgtaaaatcttatttttgggttttttttttcagttttaactaaaaaaataataatattataaaaatactttcacctgaccaaataaacaaatatacaacccaaatgaaaaaaaattacacaataccacttacacacacctacaacccaagatccatgctttttgggcaactatcgtacaactatcgcgcaatcacgcagcaacccaacgcaaccgaaacgaaanttcaaccagaaagagaaccaccattaattccggtgacttcacctgagaagataactagaatcaatcaaaacaggggttgtttcgaatcataaaaaaaatgtaaaaaaaaactactacaaaactaatattcaaccggaaatccagtttaattgtataaaactaatgtcccgacttaaattttcagattcatgaaaggcaaatctcaaaaaattaaactcgagttcccaaacaatccaactcaagtataatccaaaaaaaaaattacatcgatactattgtaaaatgtttatcctggtgtatttcgctgttttccgaatttctaatggtgaatttgttcatattaaattataaaaagacatgtagacagagttacgtaagtggaaatactattctgatttttaatgtttcacaatagttgcattatattttgctaataattatttcgtctgattgaaatttttgtctgatgcaacctttggccaacccccatcaaccacccacaaactttcgtctgattgaaaccttcgtctaatgcaaccttcgaccaaccacccaataactacccctgcaaccatcatctgactgaaaccttcgtctgatgcaattactgcgcaaccacgcagcatccaccctgcaactatcgtctgattgtgtaagtgatagtgtaagtgatatattagtaattaaaataaaataaaatgtataaatattgaccacaccttatacaggtatttttgtaaataaagtgttaatttatattttttatgtaataattctatatataaatttataattttaaaagatttaaattaattgaaaaaataatactagaatagtaatatggtttgaacaaaattataacaaaaaaaaaagcgtagatatttaaaaacttgggggttgtgatgtgaatgactgtatttgggctgaaaagcagggttgtgttattgggtttgggtcatagagaggacacgtcacaccatcgaggttggctcacctcaagcgaagctgatgctgctagtgtatctccaatggcacaatactcaatagttgccaaaatacacatatctttctatttttttttgttgtaatttttctttcatccacataaaatttgacacattttcttacaaaaattatttcgataatagacaactccaaaagttgtcacaatgatttcgcatactactttttaattaaatttatatttctaaatgttctctcaaaaacttaattggtaataaaataatatatttttttaaaaaaaataaatgataccacactaccattactcattttggacaataatattaataaaattaatttgaaatattaactaaaatgtacatgtggcaaagacactctatgagcaaccccaattgaagatgctcttagggatgaaagagatgagaggtccctattttataacgttatggtttgaagttgaattttgaaagataaaaaatgtaacgccccgcttcaaacttttattgggcccttacacccacgaaatgaat

SEQ ID NO: 118332 - DNA, 1185 bp, Cannabis sativa
aagccgtatattttaaaggccaaaatcaatattatcgaaagttcaaagaacaaaattgctaattattgtaattaatatatcatttgagttatatttctactaagtataatattttttttttatttttacaaattaaaattggttccacctttattttttcgattttcatattcgttggaaaaagtattatttcatgattttcaaaatatttatgtatattatcagtagttattttatattttgttcatttaataatatgcttgattttttagttattgagttattgaagttatagagttattggaatgaaaattttgagttttagcgtcttcaaatgatatgcttgctttgctaaagaagaatatttttagcagttttcttatttattttttattatattatatatatggtactttcaattccaagtgatttttattagttgctaattttctttattttcatgccatttagaatatttttgaggaagtacaacaagcaattgtaaaattaagagtggaagatggagattttcactaattcaagcatattatctggcaatattagtgacgttggataatttccttcaaagttcgttgaacttgttgattatgaacacttagcaattgtgtcggcttttgctagaagacattttttttttgtgatctaaaattactattaaatgatataacaagcatgttatccagattatccatatacatataccggtcaatgtggctacatatgaattagttgtgcatacaatttgtttgcctagagactatctattattttattatttagaacgtatactcatttaacctgtacgacattatttaattaccagtaatattagtcattgcttgcaaaaaaaaatattaaaggaaaagaataacattataataaaaaaatagaaaaagataaaggtgataatcgcattaatattagcaagttaattgtgatttttgttcttttaacttttacatatactaagtcatactttaaattttttagcccgacaaaaattctcctaaactattgaaattattaaatttaaagactaatatggtgattatctacatacttttgctttttaattttttaattacaaaatgaaagtaaaatgtttgtttttaaaaaatttatttttaaaaaacaaaaatgcgttctctaaccacttttgttttt

SEQ ID NO: 118333 - DNA, 2806 bp, Cannabis sativa
aagatgaaatcccctactcaaatataccaatcaatatatgatagtattgggcattagtggttgttaacttggttaggcacacgaacacattttgtgacatacttttgacactttattagataataaattgaaattattaattcgaactataaaaataatatattttagtgatgattgaaaaagtagcccaataatacatgtaatagataatattgttaatgaattgatgagttattatgtttgttggacaagtgaagcattggatatgacctgctgcaccacttttgtttttcgtatggtattttccatgtattattggataaggtttatttgggttgtattggaaaatgctactttattttagtatcattctcatatttttggtaatttattataactataattgttatattatttatattaaataagtgacaaataacatacatgtttataaatgttgaatgatgatctaaaagaagatataaatcatttacattgatgctcataaaaagttgtaactcgtctcccactacaataaatttaagttttagaggcgaaaaatttagaggcggcataaagtcgattctaataataaggatattaggagtgataatacaatatcgcccctaaaagaatttgatttttttttttttttaattcgtacatagttaagtcgcctctaaaaattttaaggacaatcttttaattaatagaggcgacattgtcacccctaataaaattaaaatttaaacgttgtgctttggcaggattttcccgctaatagaattaggtgttgcccctaaaagtgtgatctaacaagagatgtttattaggggcgacttttcgaggcgagaaagtcaccccctaaaagtctgctataattataaaaccctactatcccctttgacctacattcttctcctctttccttctttctttgtttcaaccatctatttcacaccaagaaaaaaaattgaagaaccacgaccgacggccccccattctgatcggtcgtcatccaaccccactcacaattgtcccatccccatcggccgagccccatccccatcctctgtcgtcctctttattttttacaccccaaccccctttccggtgtttatacaacctctccgtcctgatctcattttcagacactgttcctctccaccccctctaaaatttacaagaacgtgtcttcttttagtgagatttatatatttaaaaaaaataattttttaaaaaaaaaaatcttatttgttttgtattttaactatagaatattatttggtttaaattttgaacaacataaatgtattttttttttctttttgtagaataattatttttgtgttatatatattgaaatttgttttgaaataaaagtgcatagataaaaaattaaacttcacagtcattacaaaagatgtaagccgggatagaagaaacaagcaaacaaccataccgcttgtgggtacaggcctactttaccacattatggactacaaaattacaggttctactaacataagtaaaattacaactaacaaaataaagagagtgtctattacaaaaaaaaagaaaagtagctcacaagctcctaatgagaatcctttccattgagcgtattgataaccacccttgaatcactctccacaataataaagttgcaacctttgcctttagccacttccaaagccaagcagcaggtagacgcttcctcgcacagagcatcagaaaactccaaccttgccgcgtgcacccaagtcacctcaccatggtggtttctagtcacaactgcaatacacatactttctatccctactttaatatcacagtttagcttaaactaatcttgagggggtggccgccaactatccaataagattggagtaggagtaaggaatagagaagctttataatctgtattagagtaatgaatagagtcaatgtaatgtttcacattatttagaatattattgtgtaccttgtcattccgaacctgccatataatatcgactgttggttttatggtattaaatcaggtacacaacgaaaaaagtcgtattatttgattatcattgtaccatatcccaatagaactctaaatgtgtgtacattaaatcaaaataataaaatagtaagtttagagtatatctctcgaagcctatgagggtatcctcgaaacttctcgcaaattgtatcattaacccagtttgataagaaaattacaattggaacttacactagtgtcttccaaatcgattcactacatacaaaaaatagtgtgggctattaggataaaatgtataatgatgttcttgttgagttctcaatacatgagcaagacagttgagagaattttctctccctattttgaaaatagtaacataaaagagtgaatttaatttctcaaattatgctcatatttatagtagttaaattcttttatttaaataatatttaatttttcaaataaataaatatctataactgaattcagttattgatatttatgagaaaatttcttaactactgagagaatatctcaacaaccttgaaatatctataaccacttttcaaattagatatttaccccattgaattaattaaataattaattaaccaaaaaagataaactccatagggataggatatgccataggcacctaccatgtctatttaggacaaggttggtattttttgtcctaacaatttctgtcctgacaaatcttgtctcgacaaattttgtcttaacaattttttatctttttttcctatttaattaatttgaaaaaattatttattt

SEQ ID NO: 118334 - DNA, 2105 bp, Cannabis sativa
tatattttaactaaatttattctgcaggtatttttagttaattcaattataaaaggggcacttatcaacttctcccattacaaaatgagacatagttttcgattgcgtaatggggctccttcccattaagagcattaattaataactactctaaagttgctctccacgattacaaacttagacctaatatcatttgcaaccgataaagccaagcagcaggtcgctgcctctctgcataacgcatcagtaaaatccaaccgagacgtttgaacctaaaccaccctataaaaatgattcctggctacaactgtagtacacatgctttcttctcggaactttaacacttattgccattagttttttaataaataatacccctccaactttaaaaatatgtaaatttgttccttcaattctaattcacttgaatagtaatgggagttcggttcgaatagtagaagatccatggctaccccgacctcggagtttcaaggtttatgacaggcccagtattccttcgcaactacgggtgatacatttgaaattgttgaatggtgattgggatgaggatttcattcgtactatctttaatccggatgatgcgaatctaatcctacaactaccagcagatagctccaatatggaagacaaggttttgtggcactatagtaacaatggcgagtattcggtcaagagtgggtatcaaatggcactttaattgaagaaagaggtaggacaagcagatgacaatcacataaaagaatggtggaagttgatttggaagctgaatatccctcaaaaagttaagcattttgtatggaatttggctcactcatggctgcctacaaatgcaacgcttgcttcgagagaaatgaatattgactatggatgtcaatggtgtcattctggggttaaagaaactgtctatcatgctacatggggttgcaaagcaaacaaaggggtgtggcaactcagcgggtttaagaacaagctacagagagtttgggatgaagatgtgatggcttttcttatgcggcttcctaaggtatggactaaggttgagtatgaattgtttcttattatgtgttggcagcaatggtatactagaaacaatatgaaacatggtggttgaatacctatgccagcagaggtggtggactggtgtgctaggttcttgtctgagtttcaaggccaacatcaacaggagagtaggaagcggcagagaatcagtgccagatggtgtcctcctgttgaggggttgatgaagataaatgttgacgggggggctaggccgaatgggggtgggtcaagctcgggttgtgtgactctgctggggctgtgcaccttgctactgctacttctctgcagcagtaggttcctccattacgtgctgaattggttgcaattaaggaaggtcttcggctgggaatacaacggaaatactggcaatttagtgttgaattagattgtcttcatgccatccaattaatccaaaaaaaggaggatgggtgcagggatgttgatgggatattagattgtattagagctttaatgttgaatgatgttgttgtgggtattttctttgtatatagggaagcgaatagtgtcgctcatggtttagccaattatgctttgttgaacaaagctagtactatgtgaattggagttaatcacccttgcgtaagtcgcactattgagtgtgacatgcctaatcctttgtaatttgcttgtttgatttaaaaaaaaaaaaatctaattcacttcttattttttggaaacaatttattaatatggacacaaacatacatataattacaatatgacgacctaattaaactaacataaattaaaaattttaaacattcaattattaactttaaaatgacaaaaaaaaataggaattattacatgaaaaatataaattgatattttatttacaaaaaaatctccataaggtgtggacaatatttataccttttatgtacttttaattgcgaaaatacctcttacactatcacttacacaatcagacaatggttacagggtggttgcactacaagaaatgtcacttttgccaacacttttttgtgctggcaaaagtttgg

SEQ ID NO: 118335 - DNA, 1089 bp, Cannabis sativa
atttctgatctttattaataaatctgattatattgaaattgattttatttagggcacaaaacccaacataaaatacatataaaatactgactattgggtctctaagaaaattctttctcgtgtagtgaggcagctgtacaatggggaccattgttggaattggacacacattgcctaaaggttgcaccttgaaaataagatgcctagacaagtcgttaggccaagaggtgtattcagaggcgaggtgtgtgcactaccatgtttaatgatattgtggataacatgcgcctgtaggaagcgtgttttttatgggaaaatccaactgacggtaaagttatgatgtggcaactctttaatccacattgggcctgagacatgtaataatgaaaattaaatattttgatttagccaagggacattaaatgccatcttttcaactccctagctatcagatccccttgtgcttttgaggagatgatttgaaccatcaatttcaattcacgtggattaaccttagctataaatagacacaaagccacttgtcttaattttttgaccattttttaatctttaaacctctttaatttcaaaactcaaaccagagcttttttcttaaaatccagaatgaaaaatcctaaacgtttattccatattttcaccggtgaatgaatgagagcttcaattctctcatagaatgcctcctacaagtttgaatgtaatgtcctactagattaggcatgttatcgtgattttaatttactatgcactcctttgctaataaaaggatttattggaaaacgtggataattaaaattttcttaaataacttaaacttcaataaataaacataatttacataagtctgtgatcccgttaaaagtaacataagtttacaaaatacttgtactacaaaagtttttgtctagagactatcaaaaggttaacctaaagtgcctcgaagattctgaacgctctaggtctaaccgtttgtacaatcttcacccttagctttagactcatctcagtttggttctagctcttacttgcacatacacgtaataactataagtcgacagactcagtaagaaa

SEQ ID NO: 118336 - DNA, 2075 bp, Cannabis sativa
ataattacatatatgctagggggtcaattacaatatactaaagtttaagacttagaataacatatacataattatatacatggtagggggtcatggccactataaacaaccatgtacctccgcccctggttataagattctcaatcttgatggtgagaaggtaaaatgaaatggacatgtatatagggtagatttaatatttttgaacacagagttactttttggttagcaatacttgacatattacagactaaagaaagactatagaggtttaatatttgtcaagatactacttgtttgatttgtggtctaggtgatgaaaatgtgaaaaagttattttttgattgtcactatagttgtgtttggaagaagtcatgaattagtttggttgattagcccaaagcaggaacattgacagatgattgagatagatttctagatcgcatcaatcccccttttgtaagcaagtctattcaatggctcttgcggtgattattcaccatgtttgaaaaagcctgttgacctcaaaaagtgatcagccgagagcgttcgtataaatctgatgcttgccacataattggccaaacaagaatatgtaataaacacaagattaattgtagaagttcgacccccttgtgatagcgggtaatgacctactccccttttagctttattaatatcaagaattaatactatctagataactatagataggatctgctataacacccttaggaatacgatgtatgaatcaagaacagcaaaactcaagtgtagagataatgcttgtataggtgtgtgagagaggaagtgaagaagagagaagttttcagacttagacttaaagcttggaggcaagtgttaggcttaactaagcttagccttctaggttagagttaaggcctttatccaggaggcctaaacccttgattacaacttgaaaccctagatatttatatattttattagttaattataaaatagcaaagtaccattgaatttagatattattaaactattatgttcgggttttagggcccaatttatagcccaagagttgttgtccacgggtagacgtgcacagtaaaccctacaaaacaacttctggccagtcaggccgctgtggaaggcaggctggccggccatggtgcagtcccaaggctggctggccatagggctagctaggggtgggcgaatagctcttgtgacggagctagtctgtcacttgatgctcgtttgtgtgtcggggtctccaattgtttaggtgttaactttgccttccgattagtgagttgtactatcatgtggtactaattttgtccatgttagcatgccacgtcaggaggaaaaaaattgggataacatttgcccccaagtccttatgtggattataagcatgtaggacgcaatacaccatagcaaataaaactaaatgagcatagaatagaatgtacgtaagcatataccattgcattatccacagcatgcactacaacctagcaaacatctcatataggtgtgaaaatatatatagggacacgattttgtctcatgatgtactttcacggaatatattctgtagtacattagatgggtctcggggtacattaaatgagtatcagggtacatttctacatttttaaccctaattatccctagatcaatatcagccgtcagatcaaataactccctcatctaacggctgccgtacatcacggaatgcattccgtaaaagtacaatcacgggacaaaatcatatccctatatatatataatatatatatatatgcatttgcttcccatgtgcattgatatttaacataccacttattcattaatttataatatatgtttcataacgtggcaccctctttttgactattttttgaattaattaattcattcaaccctccatttcctacgaagaaattatgaaaattatatcaatatgatatcatcatgaatcttctgtttgatgcaccaaaattaaatccctaacattttttatttgatgttaataaatagtaaatgaatattatactgtgtcaaaaagatattgagagagagagagagag

SEQ ID NO: 118337 - DNA, 979 bp, Cannabis sativa
acgaaggatcactttctttttatataaaggagtgatctcatccgaataaaactaatcataaacctcttttaaaaatggattaaacaaatcaagatctgactggaccactataatctttcagtattttttatatgttttgatgttttcattctattagtcgctttactattttgagtatttgttatttaaagtgagtgctagtattcttgttttaacttgaataattgtgagtttttagtgttgtctaaatttcttccacaataatatgtgaacacaattacaaatgtcatgtaaaatataatttactttttatattaaactttgcactatatttaaattttatgttggagactatctaagttcccatcaaaattaataatgaaaaaagaaatgtgtgaatatttgcttggtgtgtgcttaactacgttttgtatagttcattacattttaaatgagagatagaaacacgtatgacgtggaatctatctacttgttaattatattccacgtgattattattgcttaatttccttctcaatgatcaatttttatcattgtctcacggataaatatttttatcaaatttaagtgtcctcttgatttgaaagtcatcctcattttataacactaatgaatatcgttatatatgtatttttcctttctatgaatatcgttatatataatttatagagaaatataagtaaatgacttaatttttaactttatagatagttaatgttctttttttaaaataataaagtaaatatttatttttactttttaatacttaaaatacccttcattatataaaatgtattatatgttttattcctttaatagaaattatgaaaaaacaatagatcaaaacctctttaatgaatttttgtattatataaaaggtattatatgttttattcttttagattttgatgttgttgttgctgtctaatatgttatttaagcatataattagtttttt

SEQ ID NO: 118338 - DNA, 1302 bp, Cannabis sativa
tttaggggacaaaatcaaatagtgcaaaaaattcaaacaacaaaaatattagttattcattaaaatatatatatatttatatgatatatccgtttcatgaaaaaataacaaaataataattaataaatgaagaaataggtgagtaaaacaaaaggcatttataccagttgatgaattcatttcggaccagtcgttatttaataaatatatataataatttttattattaaaatggatcgaaattccccaaccacaaacaccaattaatattaattttctattcgtacatatgaaaataaataaattaacaaaaaagaaatagtaataattaagtacctgtttgttgaagatattgaaataaatattgagaaggtaccaaattccaaacatggatacaagctgcaatgtccgacccaactcttgctcaatcgcgctctcttcactactctccggcattgatgtgggtgtcgccctaactatgaaatcgttttcttttcctcttcgactgaggatcgaagcagagatttcagctttgaaactcgaagaagaagaagaagaaaaagaaagaggaggtggaagaaatggtttcgaattagctcttccccatgaaattcgacgaagtgagtaatgatgaagctgaatgagagagggatgatgggaaagaagagacattttagggttagggtttagaaatggagattttggaatggaagatgaagttgagaaaagaagtagagtgttctgcattttattttgtttgctaggtaattaattaagaacccagtgataataattttaatataacgtagcatgagaacaaagactttatatataaaacgactacgttttggtttgttgttgttttatcttttctttaaagaaataaatacttaataatgatttgagatttaattgtggttagcaacattcatgggctctgtctggaccactacagtatagtcaactttgtattagacttgtgagtttcttcattagtgaatagtgattaggttggaaaagtaattaagtttttttataaaagagtgacgtaattataaggattaatctaaatatatatatgtcataaatattaattgaagcgccaaaaagtttagttaattaggtttactctatttttcataaatattaaagagcacttattgttagataaaattatagggctaatttggtatgtgtcgtggcaaaaagtagttgttgttcttattctttttgttttaaaaagttgatgaatactttctttttttatatattaatcaaatttatttttaaataaaatttaat

SEQ ID NO: 118339 - DNA, 795 bp, Cannabis sativa
catattcaacgacacgtttgtgaataatgagagcgaagtatcgtaccaatccgatcttcgcaacgactcgattctcgctcggcaagtggttgatgaatcgggaattgtttacttatcaatgtggcggaatggacaatggctaaggtttttgtcggcgccgactgagacgtgcgatacgtacgggttttgtggcccgaacgggatatgcgacccggacaacatggatggctttgagtgcgcgtgcctacccgggtttgacccgaagtcacttaaaaattggttgcttagagatgggtcagacggttgtgtgagaaagctacagcttaatggcacgtgtgggaacggagaagggtttgtgaaatttgaaggcgtaaagataccagacacatcgaaggcacgtgtgaatttgagtttgagtttgaaattgtgtgaagaggagtgcttaagaaactgtacgtgtacagcttactctagtgcgactgtgagtggggacatgattgggtgtttgacatggcatggtgatttgatggacgcaaggacttattctaattcgggtcaagatttttatgtgcgagttgactccattactttaggtattattattttgacaaaaataaacttatttttatttttggaattttaatataatttgttgggatattaaaatttaatttttgtaaagaaaaagatgtattatatatttatagggactggatttcgtcccgttgctgtacggacacggatttcaatccgtgatgtactgtaaccgtcggatgggtagttaatttgatccaa

SEQ ID NO: 118340 - DNA, 1366 bp, Cannabis sativa
acttattaagtgaatctttgtactgagtgtttattgctcaattactagctttagcctttcattgttacatactcactagtggaacctcaattaggagaaattgagtaggccaatttggctaattataacatccatctacatgtttcaatcttgattcagtgttaaactttattgttctgcattatttatttattttttatttttttgtatttcattttttcttatatttaaattagtttttttagtgtatttaattgtgattgaactttaggctacaatattcaaccaaaagattactctttaataaattaagtctaaactagctatatatattaataaattatttaactcattaattaatattaaaattccaccaaaatatagaactatatagccatttatatatttttttattgttaatgaaaattgggggagtctctattcaagcatgatgaagacttggaattattggaaataaccttggcttgatatctacattttgaagagctattatataataataataatggaaagaaaattatcaattttcattaacaattaatattatatctcatattcaaaatgaaatattattgtttattaaagatcatgactacctaattttttttttaacaaaatagtattacaattagtattaataaaatatatatgtttattagagttggatttaaatcatgcagtttctctttttcccattccttcctcatcactgagctaaatagcttaaattttttgatggattaataaatattcataaatataaatttcactattaaaaaaacaattttatataaataattaaaatatgatcaaaataaaatgactagattttatttaaaaaaaatgactataattgtattgatgaatatatataaaactcatatgggcaagtttgagaataaatcatgtgacttgttgttaatatgattggccaccgttttgagttgactgttgacacatgacagttataaacagttagaaacttaataatatataattatttccttattatataagaaaaatatttacaacaagaagactatacatggacaaaccaagcaaaatatatataatattatatattgtatattaatattatacagctagttatgaaaaggaatggtagtagtgcgtgcttctcgtatttggaactcaatgaaggccaacccttaaagcaaaagacattagtttccaataagaaaactagtcatcataggttgtatatatagagacccttttcaacttttgtgaattctttctagtctttgcccttctcttaaaaacacatcatcaatattatttatataacataataatttcatataaattatagggtaagtttaca

SEQ ID NO: 118341 - DNA, 1179 bp, Cannabis sativa
  modified_base (1109)..(1136): a, c, t, g, unknown or other
ttctcatatattctatatttattccaataaaatttatatgtattttttaatattgttcttttaagaaaaaatcatattaatattatagagggctggatccgccactgtgaggaacccccaagtgttttattttttttttggaaagcaaggaacccaagtgtttagtagtacctattttcatttttaattaagaaatgacaaaaaataaaaatatgtaaacattgactcgtatattagaataatttaaatattttagtccattaatatttgaagtttaaaagtctaaaattgacttctctataggcaattaactaattacttttaaattaaagaagtaccattttgctttcgttattaaggatttcttcttggacaattagttgatactcgtatgggattgttacatcagaagttgtaagctttgagttggattaaaattaagaaagccgccacaaaggatgactgtcgagatggacaatctatcttttggtgctacaagcacttcggcaccaattgtctgcaggggaagagggtcgtatgtcctcttattttagtgtgatagttgaggattgtacgacattgttaaaatctcaacctaatatgtctttagtttttattacaactaatggggttgcacataatttaactagagtatctcattttattttgagggaatgatagtccttttcatgtcattgataaatttctatctttttattaaaaaaattatagtattgtaaattaatataaaaataatttttttattcaatattgggcattagcgtgtctaacaccttctaaacgtgtcactttacaattggttattgatattttttaaaagttattacattaaattatatgagattcgatatttaattgtaccaatagtgatattgatacgtaggagggtgttagcaggcccaatcttgaacatagtgggctaggcttgtgtctagggcccacataacctaggagccccaaaaaaatttctctttttaaattacacattttcttactaattttgaaaaatactacattttatactaaataagagtctaaaaatattttttctcctatagtgccttgggtaggggtgttcgcggtgcggnnnnnnnnnnnnnnnnnnnnnnnnnnnnaccaacccgcacatgcggtttttcaaatttcccaaaccgcacc

SEQ ID NO: 118342 - DNA, 947 bp, Cannabis sativa
  modified_base (95)..(99): a, c, t, g, unknown or other
aagagcattccattggaatgccattccaatactttaaaatacaaccaaacaaagaaattgaatgaaaattttttccattccattccatttcattnnnnncaaccaaacgccacctaaatattaatctcccaatcttttacactgacacaagcttaacaagaatcgatgatgaaagtaacacaattttcttctttttattatgtctgcaaaggacacctagcaattttcttatagcatattttccaatgagagccataaccatattttacatgggaacatgctagaaatagcaaaacttctctttcaaagcaagtgaaattattaggagtgtgggactattaagtgagcaactacaggccccacatcacaatttgggtgagttccctgtgaattatctatagatagcctagcctaaattgacacgaagttctcctggcagtctagcacaattctgaaggctcaaatccaaatatttacttggggaatctgagctttaatggccagtgtcaatgtttcttgatcaagagagcatggtttcccatttctgtttcactagagactaccacaggaggagcattcacgcgcctatagccattacagaaaaaccatgctcaatcctttttctttctagtagccagcttaattgatctgaactttgggtgttcataaaatatctaatccaatatgcaaagtgcggatatctgcacttgtgcacattgaatgttgattgacatataaaaataacagatctaattcaatactcgtatatttatatatattttaaaaaaattgtatatacaattaatattttaaatagtgactttaaaatataatacatatatacaaatatggaacacttcttaataggtattatccatttaactataaatattaattttaaaaatatcaaaccattgaatttagatctaataatgaataatgaaatc

SEQ ID NO: 118343 - DNA, 682 bp, Cannabis sativa
aatataaaccacaaattactcagcagtaatgttgttttttttttttgaaaggatgaacattcaattaaataaaacatagttgggaatcacaaaggggaaaccctcccttaacttaaattcagaaaaagactcgttacttctcgcaagctttgcaagtgcatcagtttgaatattgtcatttcttttcaaatgaacaaaatcacaactagcaaaaaaacaaaacagactccatattttagtaactaccgcccttgatttccaacaaggaggaagttttcgagtcatcatggactgcaccagcaggagggcatcagaggcaattgcaatggaacgaaagccaagttcagatcccaattgcatcgcccataaaattgccaaagcttcggcttccatagcagaatcagcagccacaactttagcagaccaaaaccacttaccattatgtctatcctggaacccaactgcaatgccagccctaccttctttccaagaagcatccgtgaccagaaaaccatgaactgaattcgggatacaccacactttttccttgctgatctggtgtatgccatcacaatcctgcaagttatcctgaactgatataatgtaatatcccgataagttaaatggtaaataattagggtttatattgatattatgaattaatcaggtaataagtgggatt

SEQ ID NO: 118344 - DNA, 810 bp, Cannabis sativa
caaggatattcacaatctaagacatgtgatttgaggtttttttcccctaatttgatttcatgattgcttctatttttacatgaatattttacatggagattgcttctatttttctaggagaagaaagaggtgacacctgtagaatatattggcatgtacatgtgccaacacatttaaacagaaaatttaaagttctacaccattatttgactacctatcctgtaatccagcatatgttaaactatgatgaaaaggcatagagaaaaaaaaaatagtcaagcttccatgagggttgctgcactatgatctagcacaatgttgatatatatatgatctagcacaatgttgattaaaacccaaccattaaaagtatctttatttttcttttcttacatgttaacttgacctattaataatttagaaatgaaattttaatattttttttattttactcaaatttaaattgtgtatgctttatttttcgaacattgatttttggtttatttttgaattaacttaataacaaattacagttaaattatcaaaatttcttaaaaatttatatattgcattccctatttacttttaattattgataacattatttacattaattgaatatacatattaataatctcaaacaataattaataatatttttcttaaattatttattatatcattttaaataaagtaagagacacctaccataaaatttagtatacgtttgtgcgaggcacgtagcattctgttagtatatctattctatataaagtgtgactatataaccgaattcttggtttatgagaa

SEQ ID NO: 118345 - DNA, 841 bp, Cannabis sativa
tgcaacataaaatgatttctaatcttttattaattagtagatctaattatattgaaatatgttttatttagggcagacacaacccaacaatgatcacaatttaattttatttggtggggctcaaaatgtgttggggagtttcaagaattggctcgctggggtttgtttcaagtataaagggggcaagtggtacaaagggagttttgatgcgttccgccaccgttggggtcgttctcgttgtgcacagatgttgctattattctgggaaggggtttggtggatttgagggtgtgattcgggatgggcagggactggtttaggtggcgtgggtggtgggtgcggctggggacttccgtgtgagtgtggcggagcttcttattgtctgcttgggtctctctctttctcaatattttggttttcctatctttaaagttgggtgtgactctacagtgagtgtgagttgggttaatagttctcaaagtaatattgtattttattctattattttttatattatttctttaatagtagttataagcagttgtttttgtaatattatttattgttttgcaaatagtgttattcacgcattagctacttctgttactaatttttttaggagtgtttatttggacctttttcaagttctcatgtgatagcatgatctttaatttaaggggtattactatttatataaatatgagaaaaataaaattaatttaaataaatatgataagaaaacttaataggatttgtatttaaaataaaaacttaacatatataggattgaattgccataaaaaaaaattaaaattcccttcatattttttttttttaaaaa

SEQ ID NO: 118346 - DNA, 993 bp, Cannabis sativa
  modified_base (53)..(54): a, c, t, g, unknown or other
ttcttggagaaaatatgaaagcttcaaaaaattagaaaaatagaataaaaganntatagaatgccacataaacttgtttgtgcattcctttatatatatgttgatgattatattttttaatattatttttttaaaaaaataataagattcaataaatcaattaattagtatattgtgactggttaattaatcaatccattttttctatagtatctctcttgttcttccattgaagttgatttcttcacttacagatttaaaccctttattttaataatcctatttcagagattaaatcaaaaagaccaaaactccatttaaagattaaatccaaaagatcaaaatcccattttagagattaaaccaaaagatcaaaatctcattctaaagattaaacccaaaattcaactgagatatttaatctaaaaaacatttcataaattaaaaaaacttaaaaagtatattgagaagatcaaaactatatctagactcaatgcaaatgaacacaactaaatcaaatccatcaacacactatatcaaatcaaattattaaaaaaaggcataaaaaaggattcgaatatgaataagaaactactctctgtcatgccattctcatcattttcagataagtctaagagaaagagcaaagcctttagctgaagaaatgcaagagatgctgaaatcgtagagagtgcggaagcgtcaagagactttaatgtaaagaccacttagttttaatttggaaattagctgataaatagggattaattatgaaatctatgtttgattatgaatttatagtttatgatgatttatttgaattcagaatgcatttttatgtcacatatagaaatttcataaattttgtatattttgtgcccggcaacattggaacgcaatatatggctattagaatcacattttagtatttttagtatagcgagacaatatagttagacattgggaatttcgggaatagtcggaattttagaa

SEQ ID NO: 118347 - DNA, 2459 bp, Cannabis sativa
  modified_base (2092)..(2093): a, c, t, g, unknown or other
acagctgatcatcaacattgcaaatcaagcaaaggctgcaacgtctaaaaggccattgtgcctaagcagtgcctcaggtgaaggttcgcggcctcggaatgccacaaatacctggtggtgttcagaaaattgacttaataagaacagtcatcaagaatcggatggtaaacaagtccctatggcaaaccacaattatgtgtggatttgagtaaaatagcaagaatatcaaaatgattatgaagaaacacaacagttctccagcaaagaagaaaggttggattcacattaacaatctctggagagaaaggtctgacctctagtggtgcttttccacctccaagagcaaggacggtttctctgaacttgttccctgtttctttgacagcctataataacatgacaatacttagctacatgatgcatcaaaacaacaaagatttctacattgattccatgttatagaaattatagcaaaacacaaacagcatacaagttttctaagtctcacaagtattaagcacaattatgaaagtatgcaaaaagttgagccagggtattgtttacttcatttcaccattatgaataaagtaactcccaactccatatttacaatcaataaaactaagtttcggcaatgatgaatgtttcattttcccaatcctgcctcaggttctgaaatcgaatctttcattacccatcaggtttcaatatatactagtgtcgcaaaatgctatatacccaaaaaaacaaatccaagctaatgttaaacacacaaagtttaaagtgtattatttatttttactttttttattttcgccccgggaggcctcacagtggcctcaaggttgttttgagcctgtgagcctgtgaccctgtggggattcgaaccttaggaacaaatgcctaccaccactttccaagactcctccttaccactagaccacctcttgggacacaaaggttaaagtataaagtattacgataagaaaaaagagccttctgaggaattcttctgcatttaccttgatgtcatccaatccagcatcctcaaaggcagagaaggcatctgctgacaaaacctcagcccactgagaaagaaaaatagaaatttgcctcaggagacatgagagaaaaagatatttattgctcaaagagctacaagcctagaatcttcttggaagttatatattctcatccccaacctgctacctttctgcaggtaccctttggaaaaatgaggatagaaaaaataataacaatacaatgctccaagatcagttacagatttccaaatgttttgttattggcttttttctttctttttccgccacctctttctgtaggtaaactcaagaagaaaggtgggcggaatattttcatcataaccttattggaagcaatatataccttgtagctgtagtacccagctgcataaccacctaaaagttgcaaagagacgtattgataagtagttgctaagacgaaaaatttcttgaatttgaaatcaaattagggaaggaaaaggcaaacctgcaaagatatggctaaaaccgcaaagaaatctgtcttcaggcagaggagggatcacttgtgttctttcagaaaccttgcgatcaatatcgtaaatggattctgaactaccgggaacatactttgtatgcagctccaaatccagacttgcgaacttgatctggcaacaaagaatatacttgtatgagagaccttaattttaaaaatatttgtaacggtaatttttattatctagatatttgaaaagcaattaagtgataaaacaagctagatgtcccattctcgcaagattaaatataaatatcaaaaaaattatgacagttcaactgaaagaaaaattgtacaaacctgacgaagactaagagaccctgcacggaaagtcctagctgcaagaagcttcaaatatacttcttcaggaagactttccccagtttcgtaatgttttgctatacccattaaagtatccctaccacataaagcaagttttaatatggttaacgaaacttattacctaattcaaccatgttgattggaagtccataaatttatataaatatatatnnatatatatatataaataaatacctatgataacaccagttttccatgaattgtgacggcaattcaacagcatcccattcaactcctcgaataccagcaaccaaaccctcatcctgcttagtcagcatatgctgaagtgcatgaccaaattcatggaagacagtctctacctgcaaaagatatcataattcctaatcttacatcttgatgatcacacatagaaacatcccatgcttcaatgccgttctagagtgagtctacaatacatcctaaaatgtgattcactgcaataaatatgtacataaaaaaaaaaaaaaaaaaattagtagcagatctggtccgatgggatccgatggtcacctgatgct

SEQ ID NO: 118348 - DNA, 1589 bp, Cannabis sativa
  modified_base (216)..(219): a, c, t, g, unknown or other
  modified_base (633)..(635): a, c, t, g, unknown or other
ttataattattaaatagatatatttgacatttatagagttaattagaattaaaatatgacatttgtgaaagcaaagataagctcttaactaaaatagcaaaattgaaacctgtagggcccattagtgttcgaccaacaagggttaagttagagccattatttcatcttttatattttcatataattctaaacctaaccctagatgaaatcctatannnngaataagatgctcttattttctaaactaataaaaaacctaatcttcactttgtcagacaacttaaaaaataaagagagaacctcttagctagagttcaaaaccctcttcttcttcctctaaaatttttcgaacccttagtgaattgaggaattgccctaacaattcaagtcaatactcaggcctttgtagaagattgtgaagaattctaaaaacagaagaagatccatgtttagatcttgatcatactctgtgacataaaggatcaagggttagagatctaaataaaaggagacattatcttccgctgctacgaatgtaaattttcctataactttatatgtgtttatttcattattttaaaaaaattcatatttaggatgttggattatagttctataatcaacatacatgtnnntaaatctagatcctgataaaataagttccaacaacattatcttattggttcatgtagcatcggctcgcttgatgaagcgtgtgtggcaaagtgaacgaactgatgactatttatttcggcacgagtctcgagtagaattttatcatttgatctgcctcggttccaaatgcggcattcaatgcctgactgatggattccgagacgttggatctactttgtgtttttgaaagatgaaatttggccattgaccttggctttacacggatcgttcctcgtaggtataaatacttaatggaaactattgccacttttacctaaattttcaaaatttcttgtttcaaacctagaaattttgagagtaaaatacaaactggaaccaggatcaaacacaaaccaaaccattctatagcatgacatcaatttttgcattcaacttcttcaaattagagctcgagaattcccaggtgcaccacccccagttatctcgactacgtcacgagaagaagttacaactctggatttcatttctgaaaacgattctctagatgactacgccaatgccatcgcagtaaggattgattgtctagaccatgttgttgtggaaagagttcccttacaactgtcaatcgatgttagcgtgtgccctcccagaccatatttctactcgagtccagaattattgactaattcatcatcatgtaaattttatcctttttttgatttcttgaactgtattgcatgttaaagatatatggattatatgtgatttacttgttgtttgagaattataactttaggcttgtgactaaaatatagttgttgataggagtaagatgttttgaatatcatctgttaggctatttttagcctatattttggatctattttgtgtgcgttttttgctgtgttgggatagaattatgcttgttttctatgttttcaggttctttagaa

SEQ ID NO: 118349 - DNA, 1479 bp, Cannabis sativa
  modified_base (44)..(44): a, c, t, g, unknown or other
aaatttctaatggtgaatttgttcatattaaatcataaagaganatgtagatagagttacgtacgtggaaacactattttgattttttttatatttcataacagttgcattatagttgcataaatattttcctaatagttatttcctcttattgaaaccttcatgtgatgcaaccttcggccaactatccagcaactacccagaaacttttgtgtgattgaaatcttcgtctgatgcaaccttcgaccaaccacccatcaaccaccctgcaaccatcatctaattgtaaactcgtctaatgcaaccatcgcgcaaccacgcagcaaccacccagcaaccatcgtctgattgtgtaagtaatagtgtaagaggtattttgataattaaaattacatcaaatgtataaatgttgtccacaccttatggaggtattcttgtaaataaagtatcaatttatatttttttatgtaataattacaaattattataatatataaactttcatcaattaattataatataactttaaagaattatatgatcttttgccttcctataatgttgagtaacaactatcaactaaaggataatttatgaaataattatatgtctcatatgaaaaacgttttcatgcaacagctaaaggatagcattaaattccaattcacaaaataaaaaaaaataaaaaaaaaaaataacagttgaagttttcaaatacactattattgtatgaaaaaataacagctaagtaatttattaaataatgtcataataatacctcattattgtatattttcattttttccctttccgtaaagattattttatttctcttctgttgacaaattatatttgctggcacaccattaaaataattgtgaaagactactttgattaaatagctttaactctattttaaaatttcttgtatttctgcttttatggactttttttctctccaatctctcatatttatgattttatttacttttctcctataataataatatagctttaaggaattatatgatctttatttttttattgtattgagtaacaactatcagtttctttataaatacacattaaaatactattcaatataatgagtgataattcatgaaatattatttgtctcatgaaaataattttcatgcaacaactaaaggataatattaaattccaattcacaatataaaaaaaaaaaaacattaaattagtttataataattcaccatttttctatgaaataataatggtaaagttgacaatgaaccatatctaatgcaccattattgcatgaaaaaataacagctaagtaatttattaaataatataatagtaatactttatagttgtagattttaattttttttcctcattgaaaaatctctgtatatatagattattgttatgaaataatataaaataatataaaatagataagaagaaagaagaagaagatgaagagagaaagag

SEQ ID NO: 118350 - DNA, 1004 bp, Cannabis sativa
ctctattgcgccttgggtccttcactaaaagaagtcacaacttgaagttttctgctgtcattacctcctaggtccaggggacgttccttttcataataactttgactaatttatgtcgctactgtattcttcccttcgatcgcgccacgtgtcttatctgtgaaaacttaaataacaatccccaattgtcatattagtattattaaatcaatatttagtaatttaatattttagtaataattcatcatagatatcattaactatattctctaagaatatctaatatctaataattactactattatccatattcctagatgcccgatacgtggtaatcacgaaaaggtgccacgacagatcatgcacgcatttaccttccacctctcaccatcatggaagatattatattcaaggagttacttgaaggttttccatatcagtgaggacggaaaggatttcaagactcccactactaatcaacttttaaaaagtatcagaagctataggtattcctagagggtagctggttagtctgattaaagaaggctattgccagatggtcctagaatctaattggatgcatcttactcggagctcaaggcgacagttacatatcttctgacacccaatcagatcttgtcccctatgtcagaccctggcagtgcgcgtacgtacctctaaagctcctttttgtccaacgacttggctagacaagaactttgcaagatgaatccttttggcgacacatgtccctatccccacaaaattccttgcaacagctggacaccataagatgagaaggcttcctaccaaccaacagtcaagtcaccattttgtagtaccagccattgtagcgtgttgaatagaaaaccctaggtgggtgaaggatatgtcctcccccacatacatgcctatcaatacccttatttttcatgtccaaagggtgaacaatttcatacttacaaaacctctgccaaaattcctattagctttcttcttaaag

SEQ ID NO: 118351 - DNA, 1451 bp, Cannabis sativa
  modified_base (1377)..(1419): a, c, t, g, unknown or other
tttatatcataattgttaggaaaattaaattattcctattcacaatgtaatgatgaataagaacttaaactagccaagtaaaataatgttgttgaaataaataatgctattgataagaacattagaaatttacaaggtttggtacgcaaaaattacctacattctcaagtagcgctcataacttaactatcaaattgaatgaacttcaaaataactacagagcaaggctgagtaaacaaccaccctgaaaaatataaattttgggattataataaatattaaaaggggacatatttataggcttcagtatgggttaaattatcatttacaatcaatgtgggattttttacacagttactcacaaaagagccaaaatccaacaaatctccaccttaccgactttacaaacaaattcctttaatttctaaaatttgcgacaccatagccaaatcaaacttgtaagttattaaacattgtttgaacttgccttttgtctcaacctgtcatcatatccgttggattatcaattattttcatcttcaaaaagagaattttacattcttcaacaatcttcctcggaatatctatatgttttgttcttgcatgaacgacttgattctttgctaaatgaattgcaatttgactatcacaatacaccttgatgggttttttccctaaaacctaatcatcaaataaactttgtagccaaatagattccttcattgcttctataactggccatactgcctttatggtagaaaatgcaactgttgtgtacaaagtagactttcaactcacatgtgcttttgcaagagtaaaaacatagacagttgttgattaatgcttgcctaaataagctaccaatcacattagcatacataactttttccatgtattctcattcttcatcaatcttggagatactaagcattgagcttgaaatgaggaataagtggagtacttacaggttttatttgttcatttgtaccaaaacgctacagtatttttttttttcttttcaaatattgacttttagtcaaacaaagctttcctttctttctatttttacttatatccatgttgagaatttagaaaaagacaaggtttacttagaaaaatgggcatgtaaagaaaagcgtgtgaacagagaagcgatctgggaaccttaccctaaaagcctggtggcgaagagcttgagtcaagaacatggcattctcgctagtaattatggctaacctttttggcctaagtttccccgtaatcgtcctgatttgatcgagaaggtcaacaaaaaaaggggtaatatcgctctcgaatggctcggtgaatctggatgtggctacaaaccgatccacttgttggaatatgttttaccannnnnnnnnnnnnnnnnnnnnnnnnnnnnnnnnnnnnnnnnnnatgaatttctaaaacaatgaaatatacacata

SEQ ID NO: 118352 - DNA, 895 bp, Cannabis sativa
  modified_base (821)..(828): a, c, t, g, unknown or other
tatccatacatgggtaatacccatgaggcatacatatatatatatatacattaattgtctaaatgctaaatttggtatagtaactatacgatgcctacttctcgtgttaaaaagaaataattaacaccagctagataaataatagactcttacttgtttttttgtactggacagaagtaaaaggtaattgttgtatcacagaaaagcacctccttttatattgatctgtgattctgatctagggcagagccctagagtaatatttgtaactatttcagttgtaactgtctttatttgtattagttataaaattgacactattattttgtggatacataaaatactaattttagagaaataccaatttgcatataatattaattttttttcttaaagtgtgttggttagaacaaataatttccaacagtaataataattaataaaataataaaaaaatctatccttaaaaccatcacatatttaaactctgcatgcatgtatagaaaagaaaactatcctctaatttatgtcattttatgatctttctattctatgcattttgaatattttgtactccatagtgtcatgaataacagctataattaaagataacataagtaactgaactaattttgtcaaaaccaaaagaaaaaagtccgaaagagaaaatgatccaccaaccaactgctaataaaatttaacatgttcaggtattgtagcagaggtagtcttattaaaggaactgtccccaatatatattactatggagcttcttatatatattaattatcaattatcaatatatatatatatggaagagnnnnnnnnggttacatttttattataaccatcatggttacatttttttaagtcattggattactattgaatggtt

SEQ ID NO: 118353 - DNA, 1424 bp, Cannabis sativa
attataatcttcttgttccgatcattgtcttgagccaacgaagcaagctggttagccgcctcaattcgataagggagttgacccatttgaatagaagctatcgatgaccaaacccacgagatgatcggatcattactagcgattggaggaagagaaacgattccaccgagtccatcaccgccgttatcgaagtcgaatattccgactagccatttcatatctccgacggaagattctagaaggacgaaaagtcttcgaaaatcggcggcgctggtaatagtaacgacgcggcggagcacgctctggcgtttacacttccggactaaagtaagagcccgctccaaattcttggaaacctcggccacaacccgccggaccggacgctcgtacaaggaaggcgttgtagtcgagaatcgaactaaagttcggagcatttgggtaatccggtcgacatgtttacccacttccatgcactcgagcttgaacgattcggcttcatctaccgccgaccgaactcgctccgataagagtatcggatacgacaactcgtcctcgattcgcttctcctctgaagccatcaaaacgattcgtttctcgccagtcggcactgtaattttctttcgcgagaaaataggtttactgggttttagaatggacgagtcaactgagtcccacactgagtcaatcatccgagttaataaaaaagaaaaggtttttgagttcaggaaaggaatggtttttcttttctttttattttattaacttttctttttttgtttcgatatttctgatttcgcatgtcttgtctgtgtgtcgagaaagttttaaacaaagtttttgtttggttttggggttcgtgcgatggacgcgcttttaaagacgcgtggtggattagtaaatggaaatgacaagtcaaatgagtcttttttttttttataaccggtggtttacgtaatgtaataacctgtacttttcatgtcccagaaggggaccggaaattgttgcatcactcgccttgaacgagcgtggaaatttaattctaacgtcgactttattttttgagatatcttttgcactttcattttattaataaaagactaattagaaatttttttccctaaattttgacatgtatttgatgacctagcaatgaaccaagtacaatcaccatcatcactacattatgagctcatctgccattttaagaagaaattaattgtagagaaaaaaaagtacagaaaaagaagtaaatcttgtaacgtccccgcttcaagccttcatttgggcccttacacccacggaatgatagctcttatgcacgagtacctcactttggctgcttcattgaatgattgaccctacaaaccaacacaagtgtttccaatatgctttgtcctcactcgcacgcttcctgggagaacttc

SEQ ID NO: 118354 - DNA, 1050 bp, Cannabis sativa
  modified_base (44)..(46): a, c, t, g, unknown or other
  modified_base (1018)..(1025): a, c, t, g, unknown or other
tctttattaataagtaaatatgattatatgaaatgagttttatnnngggcataaaacccaacagattagccattgcactaggatacatgggagacattcctcatccaagtttcaaaccttggagacaaatttggaagaaactgcaccagggagacatcgggagtacactaggcgtccaggtgatcatccagtcgacttgagcagcacttgggcaacacgatgactagagtttaggtatttaggaatttattgtgacccgtattcttcaaatccaacaaggaaaaatgccaaggtacgaattttcaataatgacaccccgaaggagcaattcctaaatcatgagtattgtggtttatatgttaggccaattataaagttcctctaatagtagtgtgtgacacctcaattcacttttagtcctaacaaatgaaatatattgtttttatcatagggacataattatctcattaaatgacaccccccaaattcacatccttgatcatgaaatgcattaccactgctactttcaaattcaacctcaatggccactctctagggcacgtggttccctccaggggcattaggcaaggcgaccctctctctccatatctctttcttctttgttctgagggtctttcatccattttaaagcttgcagaacgcattgaggagggttctggtctcaagattgcgtgtactgcacccaaaatttctcatcttctctttgccgatgatagcatcctattttgtagatcgaatattcaggcctgcaatgctatcaaagaggcacttgatcagtatcagaaaatttcgggtcagcttgttaatttccaaaaatcctctatctgtttcaccccaaatactagcctaatgtaccagacccttatccaagactatttgcagatacctaccaccaaccacatggataagtatcttggattgcccaaatgctttggtagatcaaaaagttcttccttcactccactcaaagacagaattgttgggttttatgccctannnnnnnntccatttcaatgtaatccattttat

SEQ ID NO: 118355 - DNA, 1623 bp, Cannabis sativa
  modified_base (1468)..(1473): a, c, t, g, unknown or other
cagccatcagatcaaataactccctcatctgacggctgccgtacatcacaaattacaatccgtgaaagtacaataacaagacaaaatcatacccctatatttatatatagtgtacgatcgactctcctagagataaccagcttttagatttattcattttctgtataattgatattaggtaagaaaacagtgtttaaatttttcttgggaggagctaacattgaccgtttgccatgcatgcatgagttgaaaaagtagtgcacttttatttttgaataatatatctcaaataaaacactaattattaattaataatgtgtatttactttttgaaaagtaattaagatttttatcctcttaattattgtaattattgaatttaaaattttccatttatttttattaacaaatgcctgtatggaaaaagttaaggacatatgatttgctaccactactacaaaattagttttttctaataatttataactgtcatttatactaagatggtagttatgtgagtgtcatagataatcattatgttagtaaaattgaacgaaatattagacaaaagtttttgatctaataatcttaatagtttgaaagaaatttttaatgacttaaaaaatttgagaaacacaatttgatacatattaaaatttatgggtaaaaactataatatttaaaattagcctaaaatatataaataatattttatatattaagtaattatttagagagagagagagcatgtatatagatatagtatttgctttgaccaaaataatcaaaacatcgatatatggtggtgttatatgatataatataaattaattatataatatacttaattaattaattattattattattaattagtgtcttcaagaatgcacgagtgtgtgtagttgagtttttttagttcccaatgcatctctgtctatgactcatgttgtttcaaagttttccaaaacaattattataaatataaaatattataataatatataaaccaaattcaaaatttaaattaattactatactctttttgtttctttccaaaacatattttgttctttttgtacccttatcatcaattgatgtgattagaagaaaaaatacataatatttaaatggtaatttgtgtcaaattctttatacttttatgtttgttatagtttaactttcttactctaaaaaattatagttaaattttttgaactcgacaatccttttgttgtgtaatttttcggtttattttggtctattaagtgttaaagtataggagtattcattaaaccgcccaaactgctcaaaccgcccgcaccgcaaaaaaaatgcagtttgaaattctttacggtgcggtcgcggtttgaatttttcttaaaccgcgtggtgcggtgcggtttgcgattttgaattgttaatatacggttcaaaccgcaccgcatattataaaaatactaatttnnnnnnttatttaggtccaatatgtgaatattcaacttaaagtctacttttctttcaataaaaaaattaaagtctactaattattgtattgttgacacttaatttttttttttcatatttattttcaagtcttatggtattttgacaagttttgct

SEQ ID NO: 118356 - DNA, 1273 bp, Cannabis sativa
gtaataataataataaatattacagtgagatctaatttaacaaattccttcaatgttcttcaagaacagtcaaggggggaggaattggagctcattcaacaacaagtttgtgatggacacactagttagttggaacattcatggattgaataaaagagaccagcaagttgaagtgcttagtctcctgagattgaataaagtgggtatgggtgctcttttggagaataaattgaaagaggacaaagttagtgatatgatgaactttgtgtttcatggctaggaattttattgcagtagtgttactgaaggaagaattttaattatctggaaaaaatcttttgtcaaggttaacattcttcaagagaaccaacaatttgtctattgtttggtcaggattgtggggttgcaaattgaattttgcttgacttttgtttatggattcaatacagttgaggagcgtgttaatctttggaagggtcttacgaatactatgttgtcggtgaagccttggcttgtacttgaagatttcaatgcattgtttcattatgatgacaaaatgggaggtaaagctatatttgctttagctttaaatcaggttgatcatctgaaaagtttgggttccaaatatacttggacaaataaacaagatgggagtgatagggtctattcaaaaattgaccatgtttttgaaaatgaagattggcttgatactatgccaaacactataattgtttatgaatggagaattgtatctgaccattgcctttgtctcattaaaactcaaaaataaggtaacatgcgaagaaaaccttttaggttctacaatttatagacaactcatagtaattttaaagcggtggtcaagagtaactaggaagaacctatgaatagaagaggtctgaattgtattattaggaagttgctaagactcgggttcttattaaggtgttcaacagagaagaaattggagatgtggaataagtctatcatgaagcaaaaggaaagtaccaacaagccatttcaaaggctcatgcctctatgggtgatacctctcttcaggatgttgcaattaattttcaatatcatgataagttgtacaggagcttctttgtccaacggagcaagatcacctggttacaaaagagtgatgataataatgcttactaggagtgttcaaaaaaatttacaaaccacccaacttaaataaattgcccaaaccaaatcaaaaaaatcgacaaaaaatacaactcaaaataatacaatgaaaatccaa

SEQ ID NO: 118357 - DNA, 1174 bp, Cannabis sativa
taactaagcgggctttacaaaacaggtgtggcatcaatggattcacttccctggattgcatctttcaaggataacttcactttcagatttcatgatacatgtctccactatcctttccaaagaattgtttgagctctttataacaattatgtggagtttatggagtgaaagaaatgctgaatttcatggtaaaaagactaagccagtgcagttcatttacgattatgctgttaagtatttggatgattatcgaaaagcacaagatcgatcatcaacatctacactgcagcctgtctcttcttcttgtgctcaggtgcctgctgctacttcccaatccatcaagactcaagcacagtggaaagctcccccctccggtcaatttaaactaaacactgatgcggccataaatatgtcttcaaatgtgattggtttgggtgctcttctgcgaaattcccatggagatatagttgttgctatgacaacatcactcataggacgtttcaaaccagaagaaatggaggccatggcaatatcctggagtcttaaaactcttcttcggcttgaattaccggtgcatttaattaaaacagactcgtttttggttattcaaaatatgaagaagtcatctaccaatctcactgcttttcatgcccttcttaatgatgttcatcttttagtgtccaatttccctcgagcacagatctctcatgtttatagatctgctaataatgaagcccatttgttggctaagtttgctcttacggtggatactgaatgtatttggttggaggaaattccacctccacttatgactattatgtaatttgtgttcaagttaatataatagtcttttctcaaaaaaaaaaaaaaatacattttatctattgaagaaaattatttttaatttatcatacaatgtataaatagtaagtattttaatattgttggatttattctcactcataatattaatgaatgatgttatattaataattattttatatttatatataattttaaaaattaactattattataaatattgaaagtttgtatttagattaaatccttatataattcccccatataaaaccattattcaaatacatactatatctaaatacaatattactcaattttaaacatttagttattttatttttttttatttatt

SEQ ID NO: 118358 - DNA, 1212 bp, Cannabis sativa
ctcttctctattttctttctctaaattataatattacataatactaatatttcataatactattattattattattattattagtcatttttagggatttgattagagggaatgaaatagaaaagaataaaaaggaaatactttttattctatttttgtttgggtgcatattaaaaactattttaatgcatgagaaaaaaaatttaatacataatttttttaattaattttatttatgaattttaaattttattctttctctatttttaattctcatttcttatattttgatatatctaactaaaacttaattatatgaattatttattataatgatcatttctctcattaaaaagaattattttcttgtttcatatttgaatcttttaattgtgatcaatgagtaaatctagtagaaaaacaaaagggatttttctaaaatatatgtaaattataaaaagattacaaaaacaaatgttgtgagctatcttctgctttttatttttttaaaaaactatattttatatctatctctgtctctctcctctatgatttttggaaaagaatttcaacttcattattaactcttttgactagagtggcatcaacacaaccttaacctgatgatcatacgagaaaattacgctcacagatgtaattctcattttatttatacaaataactttaggtattttaatcataaaaatatcacagcggtataccgtaacgaaggagaagtagattctctcgtacatctatgcatcgtaaagaaattatttctcaaaagagacccaataatatctttctttgtgaaactaagtgttttaaggtaagagtggaatctttggcaaggttgttgaagtttgaaggtgtttttgttgttgaggctgtgggtcaatcgggtgggctggctctactatgaaagaataaagaagaagggacactgctgggtttctctaataaccatatagatgtagtggtttttactccccatgttcgagattggaggctaactgggctttacggggaacccgatagtaacagacgtcaacaagtgtggaggcttcttggtactttgtccaatcaatctgagttgccttggtgagttataggagacattaacaatacaacgcggcatgaagataaacgagatggtagacattgttggatatattttaccaggatctatatttactaacaagtatgtttcat

SEQ ID NO: 118359 - DNA, 1464 bp, Cannabis sativa
  modified_base (94)..(94): a, c, t, g, unknown or other
  modified_base (1206)..(1219): a, c, t, g, unknown or other
  modified_base (1426)..(1430): a, c, t, g, unknown or other
atgtaagggtattttgggtataatacatataaaaagaggtatatttcaaataaatataaaattagaggtaaatttgattaattgataaataaangaggtatttttcaacttatcccataaatttttggtgatttcagtttaacatttactcaaattcctcatggccgatttgtaacaagttaaacttaggaggccgcctctcacgaggccgttaccgacaaccggtgtaatctcttcccgaagcagttttgagctaattttacactgtaaactaactcaaaaccataacatgttaagaagcctatgcatcttatatatagttttatatttctacaccttagcaatataggactctaacatccccttaagatggtggctagtttttgctcaccaatctttagtggttcttttagctcatagccactcttatttggcttatcttttttggaccagcactttgggctcacaacatatcacatgcaactcttttatgactcactatctcaatctcatggtttagacaacttagagattccatatctcaaggtttttattcttgttccaaaaatataaccccatcttttttccttttagaaaagttttcatagtattttaattctaatgcgaataattttttccatccaaaatttcacattgatcgcttgaagggaatcatgttcttgttctaaggtcaagatcgatgatgagtttgtcttgggagagctgccctgtctgtggtagcaaatttctagtttaatcttatgatagtttacttggcaaaaataaaattagtgtcataattattgttatattggcaagtttaacaattttatgattgttatagataatattaaatattaaactaatttgcggtgaaactctttatgttttaatttattacatttaatctctttattttttattttctttgtaaatttgacacgccagttaattattatcgttaaatatcaactgaatgatcattgtatatacctgtgtatatgtaacagtaaaagctcgaagtcgatatagtagtaatctagttagtatttaacggtaatatttaactacaactttaaatttgcaaaaaagtaaacttagggattttgccagcaaaaaaaaaaaaagaaagttaggtgccgtttggtaacacttttttaatcagttttttgttttaaaagtagaaaagtgaaaatatttttcaannnnnnnnnnnnnnaaactgtttttacttttcaatttcataattagaaatcaaaacttttaaaacaaaaaatattactttcaatattttttaaaaagtttttttttcttaatcaatcttttggattacgaccagacccggacccaaatcccctcccaacggcgctggcgttgaacccggcttttgactgaatccgaccccggacccgacttaaataaaatnnnnnaataaaaaaaaaaaaaaaattttacagaacacac

SEQ ID NO: 118360 - DNA, 1099 bp, Cannabis sativa
ttattttgttactagttatgtgaagaaaaaaaatattttttttataaatattaaataatttaatactaaaagtaaccaataaaaaataactgttctaattcgtatttttgcggattgaattggattggattggatttgagctattgtgtggattggattaaattaaaagaaaaagaagtaacagaattggattgaatgaacacctctatttatatggattcgtgattcaatttacttactaatgaagtattgttttaccaagggcgtgggttggtcaatttttactaattatacaattacgtaattgaatttggtagtaataagtaataacattcaatttaattttactgtgcatgttggtcaatttatttactaattataggattacgtaattcgatttaactgcttcttacagacattaaactgaggctgtgagcatcgtactcaagttatatagctggcaaatatacgtacgtgtcatcatttaagaaaattaagtacaaagagatatcgtacgtactcttaaatggtcaattgattttttcaaaaaaaaaaaaaatggtcaattgattcacataacttttttttttaaaaaatctttttgttttgtgaagaagaaaagagaaagaaaattgggctgaactaactagcaagtgtattcatttaaaaaaaaaaaaaaaaactaggaagaaagtgaagaaattatagattactagatacaaaaacgaagtcataaatttatattaaaattgttattaattaattgttaataaaatgaagttcatgtaactaaaactcatgccactatttccactctaattattctagtaatttatctgttgttgttattatattttatttttcaaaatcataaataccttcattttcacattaattattaataaaattattttagtagctacttcaagtacaattagaatcagggaacaaagaattaaatgataaatcacaaattcatataagtaacaaaaattcacaagtttgtaattagttgatgtttatattaacttagtggatatatgatccattagttgtgatttactaggggtgttcacaaagtatccgatccaatccaatc

SEQ ID NO: 118361 - DNA, 784 bp, Cannabis sativa
tcattgtcaaaaaaaaaaaaaagaataatacaatatcgggaaaaaattagtgcaaaatttaatgggaaaaaaaaagggttattttttattttttataagataaaatagtatatatttattataaaaaagaagttaaaagaaagacgcgtcagtatattatttacatagagaaaaggagaaattaataaaatagcctaaaaaaaataaacaagtaaatgatacatattttaattatcaataaaaaataaaaataatataattataactatacttaaatattattttaaaagtaacatatgtcactcaattgtaaagagtacaaaatattatttttcttaacactcctatgtaattaactatgtcatgtatagtataagtacgtacttgcaaattacaactagtactctgatccatatcataatttgctcgtgccaactttacatataatcataaacataaattattagcattattagaatttaaatatttataaatattcaaatttttatatcacactctacaaataaattcatatataattttcaaatgaagattctcctgtatgaagattctcttgtggaacgtatttacaaagcccgctactttccaaatggtaattttcttacggctgagataggtctgaacccaagttttatttgacggggtgtgcttgaatcacaacgactggttcatgatggtgctagaaggagaatcgggtctggtgtgtctacccctgtgcttaatgtcccttggctggtttctgatgtgaatccttgtgtcattt

SEQ ID NO: 118362 - DNA, 864 bp, Cannabis sativa
  modified_base (799)..(799): a, c, t, g, unknown or other
ggtatttttgtaatattttcattttgggctgtacaaatgttcattgggccggcccacagtattgttgtaatatttttccatttttagaatattcctgtttttttccctaaaaattactagaccaacttaaatcgtaaattaaaaaaattttaaacataatatataaaataatatccctaattattataattacttattacttcttacggttgatgttggtgacctactcaaattaaagagctatagctactcaccaatatttataaacatctatatattgggtcattgattttcccttatccttaaaattaaaaacaaaaaatattggtctaaatattatcattataataaaagattttaatagatattttttaattatattaatattgttattattataattgtaatccaaatataccatagcttgaatttagcagtatttaaatattatgctaaatattataatatatatatatattttttttgaaatggatattataatatattaattatgcaaaatttagcatttttttaagataatttgttggaaatggtctaatctatatattagttttaaccatatattcattatagttactaattgtactataaatctacaaaacgatcaatgttaacctgaaaatagttacaacttaattaatgttaaatttctaatttcatataattaagaagaggactaaatttccaattaagtgctaaaatagtagtgtattgtattttagtcatttttaaaaattagctcttatagagcttgtttggaacgtcgtattaggtcgtnttgtattgtattgtattatattgcattggattatatatcatatttttatataatactatgttaaa

SEQ ID NO: 118363 - DNA, 1258 bp, Cannabis sativa
ttatttaatctctttgttggtccttttattgtattacaatagagttgtaatatcttgattttcttctattgtaataaaatctctaacactctattgatacctccttgttttcaaagcttgcaggtgacgtggctgtacacatctagcgtacacgccttgtccatgtgatcgtacccttgctaccttcattttccatacataggaaaaatttcactaaatatagttatgtcattatagaagttacatgttaaatggcatgcatagcttgcatgccgagtgagctcttgaaaactgcatgccgagtgagctctttaaaagtgcatgctaagtgagttggaaatgtgcatcccgagtgagctttgaaggagtgtgtcgagtgactttgagcatgaagaatgcgccgattgacttgagcatgaagtgtgtgccgagtgacattgagcatagagtgtcgagtgattttgagcatggtgcatgcagattgacttagcatggagtgccgagtgactttagcaaagtgtgccaagtgacttgaacattgtgcatgtcgagtgaccttgagcttggagcatgccaagtgattttaagcatggagcaccgagtaacttgagcatggtccatgcccaatgactcgcatagtgaccatgccgagtgacttgcatcactactccgaagtgactctcttggtcccttcccgttaatgttaacagtactaactagtcaaatgtttccgtaaaaataagagtacatatgtagagggatgttaaattgttatagatataattaaacatgtcaataaacaattaacttttattattagtcttatgctcactttcttaatttcatttagaaaaactaaacttaactaaacaaagaaagtaatcttagaacaaccaaaatgcgcagaaagtaaattcaatgagatcttgttaaaaacttccttttatttttttgttgttgttcatatgacattttcaatatctcttctttttttctttgcggaaccattctttataaatctttcaacgaaattcgacatataatgaaaccttctttcgtgtgttcggattaaattcgcaatgaaaccattcttttcatctgaaattcgaccctttcgttgtcagttaccattaaaattgtttcttctgcgaaattgaacacaacaatgccaaaacagcctacaaatctaggcgaaaacatatccaacaaactgaaagatattgctccaaaattgggtactaaaatgataaattggatt

SEQ ID NO: 118364 - DNA, 2023 bp, Cannabis sativa
aaaacctattaattataaactaaccatgaacatgtgatggactgatggtgtctgttaggactaggagtggcaatttgtgtgttgtgtcgtgtcgaggttattacaagcaaatgtaaaattcaaatccgacttatttattaattgtgttaaaaattaaaactcaagcccaatttatttataaagggtagatctgatccaacttgtttattctgtttatataaaaatcatgtttaattttaagggttttttacacttaaatattgaaattttaattaattaattttttttttttttttgttaaaagaatattgtctaagttttatactgtgttaaattttcagggttgttctacagttattttttagttgttctactgttattatttgaattgttttattttgttgtttttataaaaaaaaatatttttataaaaattctaattataataaattttttttgctcaaaatctaatatttttgtaagaacccttaattttaattaacttatcaattcattaacatgtttataatacatttaaaagaatgttacctttaaccttttattgcaattttcgtgatcgaaaatacatggaatatgttttttcaaaacttttttcatggcggtgttctttataattacaacatgtaaatttttaaaaaatttggaatagtttaccgtaccaaggatatgtttgaaatttttttaacatgcgtgctatattagtatatcaagaactctattatcgatattgtaaaccatttagaattcttcaaaagtttacagggataatattatatctataacaaatactgctaaaaaaatttgaaaaaaaaattccaaaatgctataatatgtggttaactaaatgctataatatgtggttgtaattaacactcataaattcaatatgtgtacaatcttgttatgaaatatttatgagcaattaatatgtttatgttctattttactagaaaaatatgattttacatataataaatataataaatttaagagtacatactcttaaataagtctttatcatattattttcgagtgaagcgtgtcaactcgaaaatgaccaatttaataaatgggttagttctatcaatccgaaatgacatgtttaataaatgggttagccatatcaacttaaaatgacctaaactcatttaagggaaatataaatctgtttatttcgtgtggattttgaattgtgttatcgtgtttaacttaaattgtgtcggtatatgcgtatgctaaagtatatacatatttatatattgtaatattggttgattattcaaaatttatatacgaattagtaattacacatcaaatatggaaaatggattagagtataccgccaggcatcgttatcaacttatataataattagattatctctataaccacaccaatgaatccagtgccaaagcaggttagattcaagtcttaaaagtgaaccattgtgatgactacaatgaaaggaaatttgccacctgaggattaggaaactaatgaagttcctctactctctacatttttttttataataagataaagtgttttctaaacaaaataaaatagcacctttcttttttaatatatatataataataatgataaaaaacttagcttccttacaaatttaaaaaataaataatataaataaaaattgccacccctcgttaaataatatatcttggtcatatccaaaaaaaaaaagaaaaaagaaaaaggaagaacatgtagaatagattgacttcacaatgctacaaaatggggcctgtaactttatggatgactggaagagtacaaattaattatattgacaattcttcacatatggtaaaattacaactaccaatgtatatacatagttttagtttgccttctgaaatatgaattataaagctaattgtacaaactatatacatgtatatttgttaacacaaaaaatttacacaaacttttaatacacgtcctttaaaatgttatttctagttatacttgcttttttttt

SEQ ID NO: 118365 - DNA, 1738 bp, Cannabis sativa
atacaatactctaatttttttagttttcaaataattataaaaaaattttaacttattttttttttaaaaaaaaataaagttcggtacggtcggtttaaaccgaccaaaccgtggattaaaacggtcggttttttttacatttgtataatggtcggtcggttttcggattataattatgaagaccgaaaaccgaatttcagatttttttgtgtaaaaaaccgaccaaaccgatcgttgctcacccctacaaaaatattttggggagaagctttgatgacaacagcctatttgataaatatgagtccttcaacagctatcaacctcatgacacctgagcataattggacaggcaaacctcctaatttgtctaatttgagagtatttggttgtatggcttatgtacaccaaagtgagggtaagctagaatttagatcaataaaaaatagtatttctaggttattcccaatgtgttaaaggttataaaatttggcttaacaatgaaaggggtttcaaaaccataaacagtagggatgtaatatttaaagaaaatgtatttccttgcttgaaaactacaaataatggcaatgcaggaaataagtctaaccctacaggtagtattgaaaatcagattcaaatcaatacaaaacaagtggaagaaactgaaactgattaaggtacagatcaggtgcaacttgtaggtactgaggaacaaattggaaatatagatcaggtggaacctgatcaggaggatgtaacagatgcacaggactatcaattagtcaaagatagagataagagggtttcaaaatctacacaaagatatgaattctttgcttttacatatatgttggcatatgcttttgtcactgcaacaaaacttgttaagattgaaccaaagacctattcagaagctatctcaagtaaagaagtaaagtattggaacaaggctatggatgatgggatggggttattaaaaaagaacaagacttggatagtagttccaagaccgaaagggaaaagagtgattatagttgcaaatggatttacaagcacaaaccaagttttcgagttgatgaaatgccaaggtttaaggctagacttgtggcaaaggattttagctaacaagaaggagtagattttaataaaatctttgcaccaattgtgaaatacaagacaataaggataatgttggccttggttgctcagtgtgatttagaattggagcaaatggatgtaaccactgcattcttgcatggagatctagaagaaactatttacatggaacaacctaaaggttataaagaaaaaggtgacaatgatcaattgtgtctcttgaagaaatccttatatgggttaaaataggctccaagacagtggaataaaagttcaatagcttcattatacaacatggattcacaaggagtatgcatgatacacgcttgtactacaaaggcactaagatattacaagctgaataccttctactatatgtacatgatatgctactaattagcaaagaaaagtcaaaggttgaaggaatgaagaaaattctaaaatctgagtttgacatgaaagatctaggggctgcaagtaaaattttaggaatcaacattaagagagataagagcaaaaatcaactatttccctgtcaaaagaaaactattaaaaaacctaataaaatattaaattaattaaaaatattaattttacttaaaaaaatctaaattattcctaaaaa

SEQ ID NO: 118366 - DNA, 814 bp, Cannabis sativa
  modified_base (26)..(32): a, c, t, g, unknown or other
gtataataaattatttaaatggctannnnnnntttcataattaatcataattaaattaaactaagcgggctttacaaagttgatcaacactactcttcccgcaaaagaaagatgcctagtactccaggttctgatcctccctttcatcttttcagctagtattgcacagtcttcactcgaaattttttgagccccaataggaatccccaagtatgtaaaaggaagtacctatttggaaaagccagaagctgaaagaattcttgttaaatccccatcaggcatattactgcaatatatagcagatttggttgcatttgggaacaacctcgatgtcattgagaaaagcttaagaccctgaagaagatacatcacactgctatagtcttcaaacagaataaaagcacatcatcagcaaagctaagatgattcaatttcattttctcacacctgtcatgatacttgaagccaattttctttccaatcttcttcataattctagacatatattccattcccaaaacaaaaagcaaaggagacatgggatctccttgccttaaacccctctgggatgcaaagaacccatgtaaagctccgttaaacattaaggagaatttgggggttttaatacatttcattacaagttgagtgaattgagtaggaaatttaaaagctactaaaatttcctcaataaatccccaatcaattgtatcataagccttttgaagatccaacttgatcatgcagctaggcttgttggccttccttccataatgtctgagcaaatcttggcaaatcataatattgtggccaatga

SEQ ID NO: 118367 - DNA, 2004 bp, Cannabis sativa
  modified_base (38)..(57): a, c, t, g, unknown or other
aaccatgcaacataaaaatgatttctgatctttattannnnnnnnnnnnnnnnnnnntgaaatgggttttatttaggacacaaaacccaacaaagttttcctaggaattgtgtgagtgaggacaaagcatgctagaaacactcgtgttggggacaaagcacgttggaaacactcgtgttggtttgtagggccaatcgtcagtccagattgtagccagagtgacatactcatgtataagagccataaatctatggaaggtccaatggatgcttgaagcggggatgttacaaaatgttactagagccttgacccagccaaaattgtggtcgacgaggacgtcggaaccccaagggggggtgattgtggcaatcagtcccgtgatccgtaagggtaaagactggaagttgtgcaatcccacatcgcttggagaaggttaagtgtgatgattctgagactatgtaagtatgggactacacagttgaagatggcttaaatggattgattagtactatctatatcaataaggtgcatcttattttctggtagtccatcacgaaagaacttaatagttaagtgtgcttgactcgtgtataagagccataaaactgtgggggaaggctcaatagaggtttgaagtggtgatgttacatgagatgagcgccacccagcctgagcatatttataaccaaaaagtacatgtcctattaattcccaagctttatgacaaatcgagctagtggagtctgtgataattttccttcagaccaaagatgtagcaactgaaagagcatcatggaggactcgccacacgaaaattttgattttttgaggtagacttgccattttttgaaatcatattgtaattaaaaaattacaaaataggtaaaatatattttaaaatataagaaacaattaaaaactatatttattttacttaaaaataaaagaaactaatttaattaaaatgaaaataaaaaaagtaaaattaaatctaaaactatacttattcaaaatatacgaagattagagattcaaactcaatcctgtataatcaaagattcattaaagaatctatattagaaataataatatttaattagaactgtttaattaaagtaatatttaaatttattagttaaaatttatcataagaaatagataaataactaataaaattaaatcataaattatacatttatatatataaacatgattcatacaaatatttatgtgtttttgcacataaagattgttaataacaaatgaatctaattcaattaattaaaatctcaataaaactgacaaataaaagaattaattttaaatgtcaaaattaaaattttaataatcataaccatcaaatacagtaatagaataaaatttgtttttaaagaaaaatagaatcttattaattactttagtccgagtatattactcactaaaatagtattgaacttgaaaatgattattatcataattaaaaaaattaaattgctcttaaccaagataatttatattttttaaaataatcatgaatccaatgaactataaagatctcaataaataagatttattaaaacacatgatatatcttgaatgattttaatatccaactaatttaaattagtgattattttgtaatttaaaaaatcaaatcataatgagaaataaattaatgggaaaattaagactttctaatttcgaacaatagagtcaaaatatgattattctataatcattcattagtagtctcattaaatatattcgatacataaagatgatattcaatatgaagttttaataagtgatggtaatcattatacgtatatgagatagttcgaaaagatatttactgatgatgcaataacatagtcattgacttcaagatatatatatttgattttgtgataattacacaaggtactattttttgtgcaaaaattacacttttatgtttaaataatttttttttttttacatttttacggttttctatacaaataa

SEQ ID NO: 118368 - DNA, 1593 bp, Cannabis sativa
aaaaaatcgtacagaaacctctatggcaactagcgctgcaaccactttagaaaccaaaaccgtaaattttaaaaaaaagtttaaaaaaataatatttggggtaattctccaaaaagaatctgttaatgtgttttttatattttatatattttataaacttttaacttttttttactaaatttaaaatatacttacgtcaacagttttttttttttttttttacaaattgtcaatacttcaatagtattattaagtaataagtattaatacacgtgcttttgtttccgattatttttttattttaaaccgatacatttctcttattaataattttgattccaattacagtttaataaacgcgccataaaatttcctttcatatattaaggtttctcttaatatattttaaactattttgtataataatgtgtttgtgtggaatgtgtaacattttgtgaaatataattggtcaaaataatttgtgtataaattatgtgtacatatatcattacttatttatttatttgaggtttttttttttgggtgaacatttatttatttgagttgaggtttataaaaaaaaaacaacatttattcaattggcaaagccctataataagcttaaggtttggtagcaactaattataatataaaaaccacatgagtaatgtaggacaaactttcaaacacacacaagtttttttgtttttttttttaaatcacaccttaagtcctatttaatctctatcatcgttcccataaacttatactaagtgtatctcatgggtaaaaataaaaaaaaaatgcattgggtttaggtctttaagatcagggaattgccaatcaaagatatttcttataagggacgataacagcttaatgcatgacaattactcaagctaatatcgattctcctttcttgggtttctcttcagccagttgcaatttggtccattgtgtgcacattattatcaacatgagtgtgaatgcttggcacaacataccacatgccataccagtccacagtccctgtacccaaaccaacatagaaataataattaataaacaagcaaaaagcaatgaatgatgttagattttgagattaagacgtatatgagtttctattttaaaaccaattcaaaattagaggagtagtttatgtatgttatatatagtattattttttcacatattaagaatatgagactatttttaataaatgatatatatatttattaccttgacatataatttaaatttaaatgcaagaatggctgcactagtcatgccaatgaaataaaatgttcccaagttcacatatacagccgtttgctgccaaccgcatcctcttaccacaccttcaattaatgaaacgtgaacaacaaatcttaattataatcttaaaaaaaaaaagtgaaattgaagtagaaaacatattgaaattgagtagttcctaatccttacctgatagaataccctggagagaatcaattactatggatattgcaagcaaaggagtcaaggaagcaaacaacttcaatatttcagaactgtcactgaataaaccagcccagatgttgtgtccgaatccta

SEQ ID NO: 118369 - DNA, 1015 bp, Cannabis sativa
cctaaactgtttttcacttgatgcagggattgttggcaaaggcatcttttcatgttagctacagggacaaggccttaattaagccactccaacaggtataattattaattagtaatagtgtttaatgacttatcagtttaaatcatttggattcaacaaattaaccccgttttgacacttttgacaggttcttgctaacagcttgagatacttcctaaggcgaccctcaaccgaagaggctagtttctaagctccctgcacacaacatttattaaaaaccaaaagcttttaggtgggattttggtacttcccagaactaaaatgaggaaaaaggctgggaaagttgtttagaatgtttttccctgatagaataatgttatggaacttaaatttacttttaatcttcagtaacagtgtaaaatgatggcattattaaaattgttgtaataattaataaaccaccacccttacaataactactatctcttgccttgcttagaagagaagttaaagcaaaatatgtgcatgaacgaatcaaatgtctagtttgtacttttttatttttggtgtttaaatcgtacaccatcgagttttcttcatatggtcatcaaactatgggtgattcagattaacacactttttatttagtacttctaaagtttttttttttttttttaagaaaaataaataaataaataaagcaccttcacttccacaatgtttatttatttatggaaaaaatattatatattcttcaaattgaatttgacatcatgactcaatctctttacaatggtgggataaggtaccgaccaatctaattttgattggagtggttggttggtcaagtgatgttgaaagatgatatgtattattcaacttttcttaattttggtcacgtttgggtatcgattctattcaacatttggataggataacattcatttaaaatatacatataaaaataaaaaattaataattgaataaataaataattttccaataggaaaaaaaa

SEQ ID NO: 118370 - DNA, 954 bp, Cannabis sativa
  modified_base (886)..(891): a, c, t, g, unknown or other
aatggtaaaaattttaaaaactcttaagaggtccaaggttcaatccttcataactagacattaaatattttttaaaaaaattaaaaagtagaggttgggaattgatcccagacctaactttaaagtaagaccttttaccactacaccaaacaatttttattatattttcttcttatttaatactttatctatatattaatagttttttcacaatttcagggcccaaggcgcacgcctaacccgcctaccctcagggtcgaccctaggtacggactaccccatatgatagtctcggacaatggcaaacaatttgactgtcaagcattcacagaatttttcgagaaatacaaagttattaaaagtttttctagagttgcaagacctaaggcgaatgaccaagcagaagccgtgaacaaaatattaaaggtcaccctcaagaaaaaaactcttggcttgcaaaaacaattggtcgaacgagctaccgcatgtactatgggcgtacaagaccacaacccgaacaactaccggacattctccattttcaatagtgtacggatgtaaagctatggtccctttggagaatataatcccctcccatagaagaactacttatgatccatccacaaaccaagctctattgcaggaatcaatggatctcgtagaagaactctagaaggcgtcacaaatacgcatggcagtgtaccagaggaaagtggcaaaccattttaattcaaaagtcaaagatcagaagtttgcatttggagatctagtcttaacgagaatatttcctgcttctcaagaaccaggggtgggagtactcgacccaaattgggaaggactatacgaaattgaagatgaaataggtgttgggctttgtgccctaaannnnnntcaatttcaatgtaatcttttctattcatatcaataaataaacagatttaatttcattacttg

SEQ ID NO: 118371 - DNA, 1029 bp, Cannabis sativa
gataagtaattatttgttgtaacttaaagaatatcactataggggatcatgatgtctaacatcgtttagctggtgttttatgaatagttaacgattttttataattattattaaagtaaaataagtaggatatgatattaaatacattatagtatgtgtggataagacacttcataggctgctacgaccaaaaaattacatcataaatggttcttaataatcctaacatatatatgacactacaagaactatgggcatcaatgaggataacgtcagtgaaaggtacattttccgttagtaatgtccaacaatagtgacatttcgtttgtgaaaagtcgttggagaaagttcgtcagtagaaagtattatcaataacgatatttacagtcgttaacaaaaataaatatcaataacgacattgttcttatttttttttttttactatattggaagaaagtgaatgaatattatagatttattaatgaagttagaaggaggatcaaaagtttctgattcctagccaagttgccttcaaaaggataaataaatgaaagctaagatagaaatcagccccacattatacaattcaataagataccaaaaatgttaaaagaacacatcaaatgccactacaatttaaagtaagggattaaaatgaaatatttcatgctttttttttttgttcattcaatattaatagggaaaaaaaacttgatttggttgaatagtagaaaacataaatagctttggtatgtcatcaaaagtgtgttacgcatctcaatttggtcacattgttccttatgtcatattccatttgcacttacatcaagtgagaaagcataagtattttaagggaagggctatttttttttcttaaaaaaattgttgtgaaaagtcaaatgtgtaatttgtgagattttattgtaggaacattatttttattgatcactactacaaaattaatttttttcaacggtttataactgtcttttatattatttccctatggttcctaaaaccgttggctat

SEQ ID NO: 118372 - DNA, 2484 bp, Cannabis sativa
  modified_base (1410)..(1411): a, c, t, g, unknown or other
agttattttcttcaatatcctatgctccaatatatattcaacttttcatctgttgttccactgttattttttagttgttctacttcttttcttttttgatgtcttctcctgtgtgttctcttgttgtgccacagctccttctattttgctgcatttgttatgttgtctcttttcccaccaacttccatcctctctctctcttttttttttatctttcagtgggaggtaagactaatactgtttataattctttcataatggttacctcaaccaaatattaagtggttggtttaaccaatgtaatttaaaataaatatttgttaaacatacgaaacaacagtggaacaacccaaaaacaacattaaaaaaactatgacaactccagtattaatgaatttaatatttctacttcatctcgctagaattaatagttgtttttcaactgttcaggtgttgctgtggtggttctgtctgtggttgtggaagatggaggccttatttttttcggtatttacagtatagaagaaaaaaaaatgggggaggacagtataaatataatttctactgtgtggcagtaaaattaaaaatttttgctcaaaatttattatttttataaaaatccccttaaatcatgaaggtatcattgagagagactcgatgcccacctcttttgagtgaaaatgatctattattaaagtttgggtttttaatagtgcgaatgacatagctaaagctggaattgatccgaaaaaagtaaaaatgagggaacagacaaaaatgtagactatgagatggagaggaaatatcttcacaaggggaaacaaattcaagctaatggtaataccgagctcatgacagtggtaaattttgttcaagggacctctcatgatgaatatcagaagctttcgaacactatggggccaagaaataaaatttctatgaagactcgtgcaaggttggaacatgtggaagtagaggttgtaatgatgtttgaactggtcatgggaatgcaagaggagagggtggcagaccagtttgttttggagaaggaggaaatatgggtcacacacaaccaactattgagaatgctactactgaggtgagtctttttgattctttggatttaccatctcaattctcttttagtgaaacagcgagccttactgatcaagaccaccgaacacaataaaaattttaagttgaaatatctaaggcactgggaatcctgggacattacgtgctctacaattctatctccgagaatttagcctgactattattttttcgctgatgtaaactaaccaggtatcaagttgaacgtcttagcagtactcttcagttaatttttagatggtggattgtgtgggtcttataataggggactgtttgtaaagaccgcttagctttaanntagaaattagcagataattagagtttaattatgaaaattatttattagtattgaattacatgtttatgatgatttatttgaattcagaatgcattttatatgtaatatatagaaaattttataattttgcatattttgtgtccggtaatattggaacgcggtgtttgactattagaatcacatcctagtatttttagtatagcgggacaatataattagacattgggaatgtcgagattagtcgggattttagaatttctcaaaatatcccttagtgccattttatgacttttagtgtaaaaagggcaaaatagtcattttgcctaaatgacttttgtcctttactgaatttattattggtttaaatctgatttttaaggttaatgttaagctgatatttagtagataaaaccaaattctttttactcatttttcaaaaataagaaaaaatcaagaaaagggttctctctctccttgcctctctctttcgaaaccccatggaagcagctagggttgctgaattttttttccttcattttaagcttgttgtagcaaggattgagtgtccttgatctctaggtaagtctcttgcaacttcctccctagttcttgagtttcaagtttagagtttgtgcatgaatggatgattttcctactgttgttgatgtagttgtttgatattatttttagaggtttagttatgatgtattgtgttgatttgagcatgaattaagggatattggtagttttagtcaagttttgagttttagaacttaaacttggagctttaatggtgtttttcaattttgagcttgagtagttgttttattgtttggaaaatgtttattggggtacaatatgcaggtctgaaaggtttagttaagtttggaatcgatttggttagggtttggatgtttttgggtttacactgcttgtaaaaccggttacccgaattttgcagtagggtgtcccgaaaaatctagctcgtcgattcgttctagtttcaggtttctagttggttgattccctgctagtttagggtattgccatattaagttgcagtagataggttt

SEQ ID NO: 118373 - DNA, 575 bp, Cannabis sativa
agtattaaactagtttataaaatcacacacgtggcgtccctatagattaaggcgtcacagacatggactaaggatcaaagcttgggcggcagccagctatggagggtccaaatctggtttgtgggaggatcggagcttcaaagctagaaattttgggttttggttctgagatttggtttgataatacgaagacaaaagtgtagttcagagacaaaaattaaagctagagacctgtgcgcccacttggtgatccctctcaattagtatcttcttttttttttttttttgctaatcagagttcatattggttattgatttttttggtaatgaagcatttttgctgatttaatttttggcttgagtttttggtgtgagtggggctgtggaatgaacattgatttgtactttgtttgaattgattatgaaacttttttttttctgaataacgaatgatagtgtttgagtttttttttaatgggaaatttgataatccatgctaaaaaattagacatggtgtttaattatacctaattataacacatagaaaaaacataccaatctttcatttttcttcc

SEQ ID NO: 118374 - DNA, 1168 bp, Cannabis sativa
tataatcattctaaatttcataaacttatactatgtttaatttaattttttttttttaaaaaaaaaaatcattattaataaggagaaaataaaatcgtttcgaattgatctttatcctaacaaaaattcaaagtccaaaataaggagtcgtataattttacttacaagaggaaactttcttttaatatccgtctcagttttttatctgtaaattacagtacattatagtcattttctcgtgcaatgtaaaaatcattaattaataggtactacatcaatttgagtttttaggggcgacatattgtcgtccctaaagaaggtattagaggcgacataaagttgttgcccttacagaaactgagttttttttaactttataaacttttaggggcgacttttgtatattgaaggggacatttattgcccctaaaaatattgaaatctatacgttagaaaaagatagagtttttcccgccctataaaagtcttaccaattttatgattaatggtagtgtacaaggattctttaattctaaaaggagtttgaggctagggatcccatctctccccttttctttatctttggcatggagtatttttaactcaaattcttaataggatagttgagcatgatgagtttaaataccatgaaaagaataatgagtttaagcttactcgtttattctttgttgacaatgtcatagacttttctcatggagaatataagtccacgtttaaaaagatatttttttatatttttgtttacaattttataatcgttctaaatttcataaacttatactatatttaatctaatttatttttttaaaaaaaatcataattaatgagaaaataaaatcgtttcaaattgatttttatcctaacaaaaatccaaagtccaaaataaggagtggtataattttgcttgcaagaggaaagtttcttttaatattcatttcattttttatcagtaaattacaatacactatagtcatttttctgtgcattaattaataggcactagaacaatttgagtttttaggggcgacatattgtcgtcactaaagagggtatttgtaatgaccgctctagtaatgtggattagtaaaggcaattagcactaatttttattattttactattatttgtgaattaatttaattgtgga

SEQ ID NO: 118375 - DNA, 1660 bp, Cannabis sativa
  modified_base (1487)..(1489): a, c, t, g, unknown or other
aggtgatttctctattaatgtggcaaagctgcttgccattcgtttggccctaactcttgcacatcaatatggttttagtatctccactattaatagtgattctacagtaacaattgattggattaataaacttcatatgaattttaatattcagtctaactcggttagaaggtcactaactcggtcagacaagtatagacataatgaaaattccataaaatgtaataacgtgacaataagaattaccggacaagagatttttgtcaatcaagatccacgaagatatcacttaaaaccctaaagacttgatcatcaatcgatcctatgatctaaaaatttatagttgcaacctgaatatttggattaatgataattaattgtaatccaatctataaatatgagctcttctcccacatggaatggatgtatttttatcttacattgcaaaaattctgccaaaatctctcataatttttttttgcatataaaaactagtttagatattgtgttagaatttgtgaaataattaaagttaaaacgttatgttagtaaaggaataaattatttaaggttaaaagcttaaggtgaaaattccaactagaagggatggagtttcatcttacatgcattcaaaaaacttattttttgtgcaaatttcaatcaaaagatgttttaaaagtattttaaagcataacataagcattataatatcatagaaacatgtctcaaaagatacaaaaatcatcatattgtatacaattcatatgaaaagttcaaaaccattcaaatcacacacaaaaaaaaaaaaaatacacaaaacatataatttcattttaagcatatttatacatgaaaataaatattaccaaaaactttaaggctagttgttgaaaatcttttacaatggtcttatttattagggttgtatataaatttttgtaaactgcccaacccgaacaatcgactcaaatcaaaccgagataatccgacaaaaaatacaaactgaaaaacccgacgaaaatatagtccgcccaatttttatattaggcaggttaaaaataatatcaacccacctaatcaacccgaattaactcgaccaatctgattaaaagggtttttttatatatatatgtgtatttttattatatattaatctatatattatataaatatatattaaaaaaaaaaaaaagctcaaactactatattttttatggcagatgatttgaactttgtattcaatctgtatatttgtctcattatcacaattaattgaaatatgtacaattgaatgtaaaaaaaaatattagtgctcggtttagacgaattaacccgaccaaaccgatcaattcattgggcgggtttaaaatttattttttcttaattggacgggttacacttagatttttgtaatccgatctttatattgggttgaataaaatataacgtaaaccgaccaaactaaaaaatttcatgaagcttagaannngcaagatgaaagacagacgttacgcagttcaaaaaacaagcagtatggaatgtaaaatcacatgaagctacgacaaagaagaatcgcagagtttctgaacctagggtttcctaaatattttctacagcaaagtcgaaggcgcattcaaaatgtaaacatgcaaaaataagc

SEQ ID NO: 118376 - DNA, 975 bp, Cannabis sativa
  modified_base (884)..(887): a, c, t, g, unknown or other
aaatatataagaaatatatgtacacttcatgaaatttataaaagataatttttataaataagttttcattattattcaattcttcaagacatttttaattgcattactcttattcctcttctttttttcgtttcttccttcattgattgactatatatagcttgttttacttgatcatgtcatgttatcatctgcttcaaaaatatttatttttgtaatttttagttaccattttttgtagtcatgatgtttttgccaacaaatttttgtactggtaaaaattgggtattgtactgaaaaaaaaaagatttttttcaccgcatttttgccatgacaagagatcaacaaattaacgtaggtgttacaatttttgccagcgcaaaataaaaagtactggcaaatatgactattactgtcgtaataagacgttggtgcacgccggtaaaaaacattcgtggtaagtgtggttgtaacgtgttttgttggcgcattaacgccgagggaaaaatcttacttttactagtgcattaaagtgctagcgaaagtatcatttgatagatgagtatttgacatttgcgagtgcaataatatgggccggtaaatatgaactttttctagcgcacttttgcactcacaacaactggcctcttgcagttatcacatactaaggtataatgcatcggtaaaactttgtattttgaattatttattattttaatttaatgttttatcaaatttaaaataaaaatataatttaaattattatagatacataatatagctataattgtctaagtaattagtaaataaccatgtctaaatacaaacataagtatattgtcttaactaaaataaaaataaatactaggggtgaaaatcggtcnnnnatggtcggtttttacaattttataaccgaccggtcggtaacggtttttattttacgaaaaccgtaaccgaccgtttagaaattataac

SEQ ID NO: 118377 - DNA, 1528 bp, Cannabis sativa
gtaatattttcaatgtgggctgtaaaaatgttgattgggccggcccatagtaatattgtaatattttaccctttttggaatttttcttttttttttccgataattaaagtaataactatatattttagctatataaattgaaagaggaagaaaaaatttaatgatattgtcaccacagtatttctttcgtagtcggcactacatttaaaatcgtttccatcaccgtatcttacttataatcaccactaaaatcacaaaatcaaagaaagaaaactataactaaacaataggcaacaattttgaatatattggaatttggaaagaagcaaaagttgaattagaattggtaaaattagagtaaaaaggtcttacttagagaaaccaaaacaattatactgaaagttttcaattataactcttaaactctactttttagcaaaaagaaaaaaaaaacttaaactctacctcagttagtttattatggtggtagagatgaagatttctgaccattagatactattacaatatttgcaaagccaaaacttcgtgaaccaaagtcttcaactctcaaaaatacattcaccaatataaataaataaaatatttgtgtcaattgcagttcagaaaattttctcttaattaaaaatagatgtaaaggagttgacaaataaaatatatatcaagagaattattacaaataatgcatcgatcaaaaacgaaaccgaaccaatcccagaaatcactcacaactaattgagaatggacagaaagagtaattaaaccatagttcattatgtgttagatgtagatgcatgcagagaaaaaaaatgatgaaaaaattaataatattgataagcaatcaatatatgaaaacagggtataataatgtcaataatatttgataatactatcataataatcaatattatctttgatattgttcaaaatataattgttgtcactacatcagccataccaggtagcaattagcaaagacatgagcaagaaaaattactgaggctgagaagaaaaaaaaaccgcaagaaaaaattattgcgactaagctgattagggttagatatattgacgattgatatataaatatatataaatttgaaaactttgatttttttaaaaaaaaaggtgaaaaatatataactaaattaaatctaataaaaaatagaaaaaaaaaggagagaattaaggaaagaagagatagttagattaaaacgattttagagtgacacgtcactacttcatacttctcctttatatatctcttctatatattaactagagaatttagccgcgcttcgcgcggtgttgaccaatttttgtaatctttatatatatatttgtattcattgagtgatataatctgaagtataatattttaatatctgtattataaacaaaatggtattattataattgaaaatatatttttatttttaaaatatataaaaaaaattattattttagaacaaatattaaaaatcgtgataaaacaaatattaaaaattaataa

SEQ ID NO: 118378 - DNA, 2755 bp, Cannabis sativa
  modified_base (1396)..(1401): a, c, t, g, unknown or other
cgctcttccgatcttatttaatctatatattatattattataaataatataacatggtgtttgtcaaataattttcctttctcctactaaggaaatgagatatttttttaatgaataatgatcattttattgccctactaacgaattacaactcaagaacaaaagcttaactatagctcatatatgctcaaactaattacaactattatgactagttttctcattcttgaaaagagaaaacctattacaaatgcttcttttaattttttgtacaatactatcaatactattcacattctcattctacaaagatttatttctagcttcccaaatattataaacaaaactattaacaattgcaagataaacctctcttttaaacgtagaatgcttagtcctctttatcttcttaatgcaagcttgaagctctatttttttcagattaaaactttcccaagaaaaaaattatcatagctactatagagttgtagtggcagctgaagaaaagatgagtccaaatggtctccacaaagagacaatttgcttcagcaatgaagccaattttaaggaccttctatctactttgtaacatgatcaaacaagcaagctaagtaataaacttgtgtttaggaaaactttaccgattccagttggaagagaactaactcttcctaccatcaggcttcagccagagataagaacaaaatttagtaacgctaaagtttatttgagtgaagacatcttcttctacttttagctctaatcatgttcttggccatgataatattgagatttatgccctcaaaacaagttataaatggataatatattagaagaatatatcaaatacaattataagataactgatatattaattataagagtataattattaaatatcaaaaaattccttattcatatggtgaaagtatactattaagattatacaatatgaataaaacaagtcgatagtatattaaatttctgggaatctttaatatgaaactgctaagtacggtttactatacactatacttctagtgtgtgtgtgtgtatgattttgattcgatcacatatgaagatggacatgtagtaaaggtattgtgtataatattatgcatgattggaccgatatgtaataataaacatctttcattaaacttgtcctttaccaagaaaagagtttatcatatcacaatgatgatcattagtagatcagcctaagttctgagtatacatgaacatctatttgtgttcattgagttctttgagtcactcgttagataacaagagtttaacaagccaataaatagaggaatgaagcaaagagaaaataggatagatattttgctcctttctctctcttcctcacgcctactctctctctctctctctnnnnnnctctctctctctctctctttctaagtctcacacgtgtacacactagatctaaaccgtaatctcgttacatgtctcacgagttgagtacagtactgtaatacctaaatctgttcatccatataagatctaatagttactactacaaaaatagtttttttcgatatttttaagcagtcgtttaaagtattatcgtcagtttctataattgtcgcctatacgaccgtcgtaaaacgggcaaaataggcgacagttaaaaatcgtcgctaatgtggactttttgacggtttaaaactgtcgtctataacaaggtataggctacagttttaaatcgtgtcctaaaccctacaccctaaaaccgtcgcatatagtatagggcaaagtctaaaaccgtcacctatatcctattataggcaacggttttaaactgtcgggaatgtaaaaaaaaaagagaagaaaaatctctattttctccctttttttttacattagtttttttacctaaattaaaataaaataaataattaattttattacaataacaactaactttaaaacacattcaatttatacaataacaaaataaatacataaaataaataagaaagtatataaataattggtcattctgggaaacacgacaatttttcaattcccattgcgtacaatcaatgtttcctaacatgcctaaaaaatcgcgcactttatccttttgaagtaagaaaatgacttctcgttatctaaaatattcggtccttaaaatctcattcaccattcgaaaaaattaactaggtaacaatagtagcggtttcaccaatttgaacatactcgtcaccgtaatcgataggtgctccatatgccaacatacattcgcttagttgcaatgcacttttgtaatgtcaaaagccctcttctacttaatatgaatttggacaactcatataattaaaaataatatgatcattttgataaaattatattaatcaaatttaaatttaggggtaccaaatatgtatgatattagctatagatatcaaataataattattcaaaacataataaggtatcaaactagtaaaatagttctataaattttgcgtgtcacgctagtccgacctttattttctttattttttaaaatatgggttgtgtcgtgccctaaaaaaatatggatcgtgtcgtgtttgttgattttgcggtactaaatcacttacacaatgaattaatgtgaaaatcatgtcatatataaaatgaatgtaaaatttcaagtgcatttggtaatactttttgaatcaatttttttcttttttaatctattttttttaaaaaaattgaaaactgaaaatatttttcaaaa

SEQ ID NO: 118379 - DNA, 1694 bp, Cannabis sativa
ctcgtgacaagggagatgatgatgctccttgggtgttacgacatcgcttcaaaaatttcctcatagaaagtgaatcattttgtctcttaaaggtgctggtgggtggcaggttttcctttccaatggaaacaatggctgttgggtttgttgcataatgttgaagtgggatatgtgatgtgggaggggcggtattggtgtaaacatcattggtttgtggtgatggcgggtaagtggcaaaggtatgactatggacagcgggcatataaatgtgtgaaaggtcagcaattgactcacttggagattgaatggcagctggtggggatgaaagagatggtgtagaatgtggaagactgctggtatgtgaagaaagttgctggtttatgttgctgtagtgagaaaaggaggcctgtgaaatgctcgggttgctgtagtagactcctttgagtttattttttgaattaaaagtttggggtagggtcgggtggtctaagatgtgttcagaagagtccataacttgcttgtctttggcatttctggtggtctgattagaagggctggggagtgtgttaagttgttggtttatttgtgtgttggagctatgtgtgttggtgagtgggtatagtatggaagcaggggaattggtggactggttgttggtagtgttcataatacttcaacaaggtgaatgcattgaaggtggctgtaaaagatgattgctattgaggttggatgttggagcagagaaagaaggcaagtgggaatgttggaaaggcataggaagtggatgttgagaggattctccttcaaagagtgtttggggagggggttggcttcgatttttcagggatggtaaagcggtagtgagagtagttcgagccaaccgagtaatgagtggccatgcatttcctttggcaaaatcagtccggtatcgatcataattatgggtagggagtttagcaccttttaaccacggcccatattgaaaatcatcatcgttgccgctatccattcgttctataaaagcaacacaacgctcaaaaggatgtcctaaacaaccgcattcaaaacagaattccgggagcctttcatagcgaaagtctacccaaaactcatcttttatccttggcagccgaatcatttgacctctaagcaatggttttttcatacaaagtttcacatgcactctcaagaaagggccccaaccttcattggtagaatgatcaaatacttcaagaaactcaccaatgatattaccaagtgcctcagccagcactttggatttacttaagaaaggcagccggtagatttgaacccaaaatggtgtgaagattaaatcgtcctttgagacattttgcagagcatctggcgcgcgtagaacaatgagatgattctgaaagtgccaaggttctttagtgagaacccgtcgtttatccccttcacagccaaatttgatgtgaaataagccatctccttgctgatattcaatgatgacaactcgaaaacgaccttgcaaatgtcccgacatttggtgaataaaagcttgcttataaacattctgatgtgtgaggactttggctaagagcacgggttgaggagtgttatcaggcaggggattatactcgggtatacaaaacacagatctttcctcatcagtaagagaaagaaaagaatgtatatcattagaaatggaatcc

SEQ ID NO: 118380 - DNA, 1981 bp, Cannabis sativa
aacatatgtcatcgcctcaaacgacttcggttgcgatttttaataaaatccgaagataaactggcctaaaaaccgaaaataaaggccctttctctagtagtgcattgtaatcgtaacaagtggtagtgttcctttcattaaagcattataggatcattacttgatctgagaaagagagtgaatcttactcatctatttttcaaatgccattactgtaaagaaattgtgactcaaatacttggttggattgatattagttctcagtaatatcaaatggagagttgaaatagataaagaggtgtaaacattcaaaattgagaagtgtgtgcatgacaacaatgaatgcttttgtatatagtgcttagctaaatatagaaataattatttgttaggctaaaaatatattatcattatttaacttttttatgtaatgtgtaatattattacattttatcaattaataaaatattgttaaaaatttaatatttaaatgaagtagagaaaagaaataaaaaaaaaaaggtttttacattacgtactgaaatttttatttatttttttattgtggggcggaatttttttcaaaattactgtgctttttttaaaaatattgtgtatgatttatactgtgtactgtgtttttttatactgttgttccacagttattttttagttgttccattattgttttgattgttctgttttgttgttttatggttgttttataaaaagatattatttttgtgtaaaaaattccgtgtgaaagtaaaattgtaaacttttactcaaaatctaataattttataaaaaatccctaaaaaaattaatgtatgataatgcgacgtaaatagatagataaagtgagaattttgataaatattttaaaaaatagagtagaagctgttagaagtggtctacaaacatccatagtaggcaacagtaattattattaactatatataagaaatagtagaaaattttatataatatacaaaaatttgaaaaaaatttacaaaaatatgttagcacagattttttattttttatttttatgctttaaacttttttatttataaaaacaattaaaaaaaatcaagagaataacattgagaaactaattaggacaattatgttcatcaacctatcctctcttttaataccttaatgcaatttacttacattcttattctttttaatcaattgacaagtcgataaaagtagttcataattatttggttaagacttataaactcaatctatgtgaaaactctttatatttctatgacaaagtttaatcacaaaaaaagtaataaacatagcaactcttaaaaatcatacaatcaacctagataatttcattctaaattaaattgcacaataaccatagcataatcaaatctcactttttcagattttgattcgaaatcataaacaataattataaatgaccaataaataattactaaattaacatagatttcatgcaactgaatagaagatgaagaaacaatttaaaactaccttaattcataataaaagagattcaagtgagtcacataacaaccctaaaattgaatttagctcaaaatagtcatcttaaacatttaaagattcaattaaaaacataaaagattgagataaaacagataaaacacaaagtggagtctccaatggtgtcctctttttagctgtcacccttagtcctcaagacttagaaaaatcgaatggagcccccaaacctaacccaagcttattttattgaaattgaaaagttgccaaaaatagtcaagcgcctcaactctctagtagagatggaaattggacggttaatatacggggaatgcaatcccgctcccatccccgctacctatttatacccccaatcctcgtcccatccccgtctaataaccaacggattcggggtaggggaatacccatcggttatggggaacccatcgggtatccattaaggtaaaatgaa

SEQ ID NO: 118381 - DNA, 1454 bp, Cannabis sativa
  modified_base (29)..(30): a, c, t, g, unknown or other
tattttctaacccaatctaaagttcaggnngctaaaatttaagtgcaacccgcccaatttaaaaagaaaattgtaagctgaccaacggtttggacggtttggtcaggttaacccgcccaaaccgaccaaacttttttttctttttttggtttcaaagtcaataaaaattaaaaagataaattaaaaatattaaattccaccaaagcacaccacaatatgtatgactttaaaactaacaattaagtatataattctatattattatatatttaatcattcatgttatatataataaaaactaaaaagtaaaaaaaaaaataaaacccaaaatcgggttggtcgggttattcagtttaattgggcgggttggacctattttcaacccgcccaattaacagattgggcgatttgtaattttttcgagttatttcggtttgtaatttttatcggtttggtttgggcgggttattcggtttgggcggtttacgaatttttttgtacagccctagattagggacaacaattaaatgtcacctctaaagaaacttgaatttttttaatctgtccaacattaggggtgacacatgtcgcccctaaaactattagaagcttagtcgcccctaaaaatttaaaacccaatagttacaaatagacgggaattttcccgctcaaactataggggcaacttttgtcccccctaatgccttgccactaacatgatcaaggcattaggggcgactttgttgcccctattgtcgcgtctaatagtatgcctattaaaatctcaaatctacttctttcacgagctactttacccatttttttagatttctctcttcttcttcaaaataccccttcttcaacccacaaaaaaacttcattaacaccttcaatccaagaaatcgagcaagaagaaaaagaagaacagggtgcggccattaacgccattaacttcgaacaaggtttgtttttgtttttaattttttttttcaattttttagttttgatttggagtcattcatagttttggtatacttacaaataaatctagaacaaagttgttctagactttatttgtaagcatacaaagttatggatttattgataatagtattaaaatttagatttttagtgtttgtatatgtgtaagattatgtatttttacaaatatatgcacatatatatttttaatagttgtatatgtatatatttgtgtgtatgtatatttatatgtgtatgtatatatataaagagatatatatgtgaataggtgattattcaatggttacatttttattgtaactatatggttatattttttttaacctgtaatagcaggttacgaataggcaaaaattacatttttagaattaattaattataattaattattttttaaataattaaataaatatttaacaaaacctttttaagcaattaaaatttataaataa

SEQ ID NO: 118382 - DNA, 1158 bp, Cannabis sativa
  modified_base (37)..(68): a, c, t, g, unknown or other
  modified_base (220)..(223): a, c, t, g, unknown or other
ttcatcgttttagaaatttcatatttagggtgttaannnnnnnnnnnnnnnnnnnnnnnnnnnnnnnngtaaaataatttccaacactctcctcataccaaaaggggtatttttactgaagaagatagaagttgttagtttattcacttcctggccagaccaaaaccaacacctctccatgcaattccagacacaattagcttcatttagattggccctnnnnactaggataaggtcatctgcaaagaaaagatgggtaataatcggatcacccctacaaagttttattccatggatgttgccctgcccaagagcctcttccaaaagtctcgagaaaacctctgcaccacaaataaacaggttttaaatagactttcctatcacgttaataatttatctcaaagaacaaatttctcaaagttacaaccacacgttccaatgaactccctctacatccatttctcattcctcaaatcaatgaaagatagtttctttcgtatcataaaaaaaaaaaattgcgctactaatcaaacatattttaaaagagaaatattaaaaaacattagtagtgtctagctagtactatttaaagtatcatattgttaatagtacaattaaagtatcgagcctcatataatttaatttaataactattatgaaatatcactatctatcgataatactgtataattttaccccttcgctcaagaaaggggtcatcatagggcggggagaggatcatctacaagattagcaacaatagataatcggatcaaatttcgttaaaactaacaggtcaggatacctaaaaaatgacaaatgagaaagaatttcatcacttatccacaatgcaaaaatcaagcgtcaatgttggatgtctttccaaggggaacccgaatgtgaagaaccagtattcctagaagttatgggtatgcctactagggctgtacataaatttttgtaaactgcccaaaccgaataacccgcccaaactaaaccgagataacccgataaaaaatacaaaccgaaaaacctaacgaaattataactcgcccaatctttatattgggcgggttaaaaataataccaacctgcccaatcaacccaaactaatccgaccaacccgattaagagggcttttatatatatatatatata

SEQ ID NO: 118383 - DNA, 2702 bp, Cannabis sativa
gtctccaagcctttcaatcacaaaggaaacaacagcctcttccactgccatatagtaaatgaattgtaacaaactctatgtaagaacttctactgataaaactaagtattttctctaatattatccactcactgcaatgaaattaaattaaatataatttattttctcgattaatttctactgatgcacatgctggtttgaatatatctatgcaaatgtcttcatctttttctttttcattaaatattaccactacacatgtaatagatttgaatatttttatgtaaagttaccatgaatccttttttcttttgatgttttcgatggttattattataatactaaaattaagcatagtttgtggtttgttttttgttttttctttatatgtattattttaattttaaactgaagatggtggtagtgagagacagtagaatcatttcacaggaatattccaaattgatcagaattgagatattttgcatatgtatacactgagttcagtactcaaagatggcaaaagataactgtctctttggtgacatcaaaagataatatttttttttcttcaccttaattatggtttgatgcacatgtgatccttttgttgggattctaacttgaattccccacacaactcacaatacaaatcaaacagattaatgtggaattagaatgaaaaactaaaatgacagaaaaattagaacagagtatagagatcaaacatagaaatttttgacaaggtgtacctcaatctttgggctacgtccttgtgagctaccctaaggaagtttagctctttccactttatccaagcttgaacaattacaaaggtattggagattttatgtccattctttgatagataatctcaataaactctctctttacaaattatttctcctcattctcttccatagaacacacaaagaataactctctttctttcctctctatctcgaccactaataaccccttcaaccgtagagaacttgttattcccaaccactgacaacgatttgatggagagcaaagaagataaactaacaacgaaacaaaataaaacaaatgtcacataaacacaacaaatactcaaaaccatatcatagaggcaagactattcgcagtattaaaaatctaatcacaataacctaattgcagtagcaaaatcacaaaccccaaccaagcctaaggagggccggaaaaaaatgacaaccatcggttgctaagaattttggaaccaaaaaatcccttctgcaacaatcttcatccatatccacatttcttctgcaacaaataatctcatgtagcaccactccaaagctacacatttcttctgccaatcaccagtgtgtgtttgttcaataattaatattcagaataatgtgatttctattttctaataacaccaatatattaggaatgtggatatggatgaagattgtttcttacaaaatatgtaggggtattaacccaagtcccacattagaagaataacctcaatattttaactaacactaactttggattttgattagaagcaaatgtattctcataatatttctaaaaatcttgttcaacattctcatactaaacacattaatatgaagcatcattttattaggaaaattgttgatagtcaaacattgcagttagaatatgttgataccgaaaaacaattggcagatattttcactaaggccctagattcaagtcggtttgactccctcaaaaaatctttgggggtttgcattgtttaattcttttcatttggttctctattttgtacaaaaattttaagtacttatcttgcatccaatttctttcatccttggtagacataacatgcttatgcttttaagagataattagcttatttattgtcttttatttttcatatttttgaggttggtttaaaagattcaagttacttacatgtgtgtgtgtgataaattaaagtaataatatagagttaagcggtttttgtttcagtttcttgttaggctccttgctggaatagagctacttatattaaagtttgaaagctatattttggataagctgaaactttataattgaaagttatgaagatgatgcactaccatagaaaatgactaccttcagtatggtgtgacaacattcagttgcaggatcaaattgaaaaggcgaaaaatgacaatcttgccatggacaatgatctgcacacactaatgtccgacaagtgtatactaagtctcctctactaaaataataaaaaattctagttcacattttatgtaacttgtttattttttttctcaatatctggtaagtatggttcgtatttgagacattaatttttttatcatctttaaaagcataacatggttattagttcctttgatgaaacaaggtaaaatgcatgctttaaaataacttgatttttgtatgaaatattttagttccttgtattttttttttattttcgatatttgaaaaaaaaaaacagggagccatgtggcttgacttatgagctaagaaaatttagtcatttgcctttcttttggtaagtatcaacatgtgctttaattggtaaatttttttatgagttttgttaggctatttttagcctatgttttgggtcactttttatagttgtttttcttctttattattatatttagaatagaattacgcttgttttctttggtttcaggttt

SEQ ID NO: 118384 - DNA, 1931 bp, Cannabis sativa
caatgagagattctttaacatgtgtactgttgacaaaaattacagcaaagccagcctcatccctgactacagaagcatcgaccctgaagcaactagtatcaatgaaattctgctggcaaagcacctcccctgtccttttctggtaaaatatccataacaaccgagtagtgagtcgattggagctcactaatccttttcctgcaatctgcataggtgtcctccaaaacacaaactcttcccttgtgtactatatcgttcctccacctccagatcgtgtcacaaacgaatgctgcaaaagtggtcagatctccatctttaatgctagtccaccactcgccaaagtccttaaggttgttccaatttagattatcgattcgaagtctccaaggacttctaaaccagatactacgcacaacggggcatttacagaaagatgaaaagtgaattcctcctccgtattgcagaaattgcacaaagattgatctcccctatcaacaccaagctgactcttagtcgggagtatgtcagaaatgatcttccagcataaaagttgaagacgtggatgaatcttcaatttccaaagcttatcccatgtcttgcaaggctccttgaatctcttttgttggcttatccagtaggcgcttttgacaggatttagaggccttccaaaacaagatatcagatccttcatccatagggctgatcctaagtatctcagctgcaatattcgagttgaaacaatctcgaatcagctcctcattccaactttgtaagccatctataaacaagtctttaatctttcataatgcatggttatttatgaaattgaaattagctttcaactcctccatgtttctatgggggatccaaggtctatcccataactcactgtctccatctgcaataattatacctgcaccatcaatacagatttggcgagccttaagaatactcttccaacaacgtgaatcactgactttcttttccattgaccaaggggacatatgctggcaatacttatctcttagcacacgaacccagaccttattttcatctttcaacaccatccaaaaaagctttgtgagaagagccaagttcatgttagcaaaccttctaaattcaagccccccactctttttcggttggcaaatatcactccaacttttcaatgcacaatacttgttcctttccgatataccaagccactagaacttagataaaattctatcaagttcactgcagagagtcttaggtacaaggaacatagacataaagtaatttggtatactttggagtactgaaccaatcaaaacagatcgccctgcttgagccaaatggcaagccttccagcctttaagtctacccaaaattttctacttcaggaattggtaatcctctttttgttagctgtgaaaaagaaaggatttccaaggtatttttcctttgaatttaagctatttattcccaatcttcctttgatgtcctcacggcatctccgggaggtatttggtgagaagatcagcccactcttttgcttgttgaccctctgcccagaccaacactcatacttttggatataatacatcatgtggtccacattcacagtcgtggcttgacaaaagaagatggagtcgtcagcataaaataagtgggatatatgtgctgcattcctagcaacacaaacaccagtaatctccaagtttctttcaactcttacaatgagcttggacaagacttcactacacagaatgaaaataagggggataacagatccccttgtcagatgcctctattaggtttgaagggagctaacggagctccattaagcaggacagagaaactaattgtcgtaatacattgcataatcaagctgacaacctttgaactaaacccatttgcttgaagaacctgacgaataaagtcccactcta

SEQ ID NO: 118385 - DNA, 1083 bp, Cannabis sativa
  modified_base (616)..(631): a, c, t, g, unknown or other
aattaaaaatatgaaaaaaaaaaactaaaaaacacataaaacaatacaataataacaaaattaaattagcaatataaaattatctaccaattcgatcgcagtacatgtattcgcataacctacttcactacggatgaatatttaagatattcaaactcttctaacatgcatatatattctacccatccgaccacagtacaattaatcgcagaacctacttcactcaggatgaatatctaacatattcaaactccactaaacaaagaattataaagttttaaagattatactttactcctataaagatagcaaaaattatgcaatcttcaatcaacacaaagaactcaaaacctgtaaaatatttcaaatattaaatgaaaagcttactcgaacaatatcacactaatacctaaacataattacctaaacatagttgtaattaacaatccgaaacacttcaatttttctaacatttctaaaaattattgaataaaaaagtttaaataaattattaaatctaatataacgtctcaagtttaaactaaaaatatacaattaaaaatgttattgaatcaaactattgaaaattaaacttataacaataataataataatnnnnnnnnnnnnnnnnataataataataataataaatctccaactatactagacttaaaccataaaatttatttacttaaatttatacaattatatatttttactaataccaatttataaatttacataaactaaattaaattaacgaatttctatacaatatcaaatgttacataaactaaaatcttttgtgggattattattttctattgtgggaaattatgttaaaatgggaaattttagggggttttacccgacagtttataggggattatttttttttttacaaaaaatcgtcgcctatctatctaggcacagttctaaatcgtcgggagtactcatttttcccgatggttataaatagttactcaatttttttcttagccacagtcctcgaaaaaaattattcttaggaccgtcgtgaattgtcatttttgtagtagtggcattttggtaatttttaacatt

SEQ ID NO: 118386 - DNA, 1828 bp, Cannabis sativa
cccccatagtggttgcatgggcatctactggtggagggagtcctacaacatcaacaacagggtttttagcattgttacgtctcatttagtcggctggccacacaattgtttttcttgttgctatcatgtttgtagatgataaaaaagttgatggctttctttagctctcaatgaaagtaccaaaatatccaccgctttttcaacaactaaatataataatgattaatctatagaaagtatgattataaggaaactaagacaaggtttttacgtggttaggcattaacaagtcttagtccgcgagtcactattattaggctcttggctataaaatttacaatgtattttatggtttttgaactctagaaatttaactaattacatggagagatgatgccatatgtataggcatatattcttgatgggtcggactgatctgaaccaaatagggttaattttgtgtaaaaagcccactgatgggccaaaatccaatataatttgagctattgggctaggtaggtgaggtccaagttggattgagttacctttcatacatggtcgtactattgacagtgacatgtgaggcatgagacatcgtgggaaggaaggaatttcataatagttggtgccatccaaaaaggtgatttcctttttgttgttgcaccatctgtttgactttgaatgttcttgatgaacgagccaagtacgttaaccacaatgaatagtatatgatgtcacttaataagttacactgcactagcaatagtaaacaggctttgtcgtactcaaagagaggcaaatcgcaactaaatattagtttagtaaataaaaaatagtagcaatgtgaatgaattaaaaataataaaataataaatgagaaagagggtgattagataaattttgcttggtaagatagaaatatagttatgaaaatcttattttaataccaatattaattcaaaatacagttataattctacattattagttataactgaaaaatgtatataataaaaatacaaattaattaatcttacataaattgaatataacttttaatttgatagcatatcatattatatatcttaaatcgacaaaatacgacttttacataatgcaataaaaaacatacaatataataaaaccttaaaataattaataaccaaacttacattagaaaaacatgactgaacttatataaaagatactataaaatttagagcaaaaagtagaagaaagaacattttaataaatgagatttgaagatgaagcactaataaatcaatatcaatattgagaataaaaaatataataactacattctactctcacaaatattattactccaattcacttattcttgtcaccaaaataagtaagctaaaataatattaagagaatcaaagaaatgattaagtgtgattcttttactctaaaatctaatgtctttttacaatgtaaaataattgtatttataggctcaatttattctaaaagctttgtatttttgtgcagaggatagtgaaatagtggctcaaaatgttgaacaaatggtaaataatgcgaccataattgtgtcatttctcttggacaagagtgggcggcaaacgaggaaagtcctaacacgtggggtctgtgttttattgttgtacactttgttgttaggctgttaaattaaagagtttttggctgttaaatctttctaatagttaacggtaaaacccttcaaattattgaattgatagcgaatttaaggtgtcattcgggtaactgccaccataaattgcttatgtgtatattattatacatgtgacacgtttatattagt

SEQ ID NO: 118387 - DNA, 737 bp, Cannabis sativa
gtgtaccattatatataaattctagactttgtcttactatactacgaatatctctctcattagagagagaaaatatcttaatgaagaccccattgccaaccctaatcttgggtgtcatgaaccattcaacttttcacccaaaaagaactaaagaataccaagatttggaagatttatatatcactaagtttttctttttatataaataatatatataatcatgttcatgtgtgggtaagaagtaggcttatatatgtgatatatataatatatttaatatttttgttgcataatcttgaaatagtatctaatgtgtaacaccttgccaaccctataataagcttgataatctcaggtgccattactaaagcattcccttatttggcaaagacacccacaacaacattaaacaaaaccacccttttcctaataattattataaactaagcaatcatcaaccaaatcatatgataatttattgtaatgtaccaaaaccaaagcgtttccattatatctaaagtattattattagttgtttaaaacaattttattggtagtttaatttcattatgtagtattataaactatttttacaattcttttaaattgcatcctaactatgttacacatgtttgcaaaaatttgtagtagtttataattaggaatggaaaggaatggaaaaaaatctctattttattcttttgtttggttgcatattaaagtattggaatgttatt

SEQ ID NO: 118388 - DNA, 1518 bp, Cannabis sativa
ttttttttttctttcttcatatataatactttctgcaagggaggtaatacacaattttttttaattattggcacttgaatatttttttttcgataataatatatttcgtcgcaattattaaatttttctgctcacatattaacatatatgtataaagtaatttaaaaattaaaaataattaataactaataaaaaaataattaaaatgctttaattttttttagctatgtattagtgtttaatagtttttaaattttaaaatgctttaaaaatattcatttttttaaaaatgcttttaaaatatatattaaatattatatgctaccatattagcaattaagcttctttagataaaagaccatgcatgcttgttaatgttttaacgcattcatctctacaaacaactatagcttcaaacattaatatttgctttagctaacaatttcctttataaatatatatatatataataataagaagaagaaaaaaacacatacaaacaaaataaaacagctgcaaaaacacaatcaacaaaaccatctttttttagctcttccgctttccatgggaaatgtttcaatcttgtatatatgggcaccacaggtgagactggaaacatagacatacatgcttattacacactatcagcaatggtctcttgtgtcaaaggtgtcacttctatgaagtcctaaatagagagaataatgtatgccaaaagcaacctacttctccccaatcaggaactgtttcatcataatttcactcattcccttggcaaggggaaacatgtgtccagcacctcctagttcatggtacttaatccatggaagcttattaacaacatagcgttgcagtgctaccgggacaagcctatcttcatcaccctgccatagatggacagaaccttcattgttaggaaaagggttcttcaaatcagtcattggatcaaattcccaactcccaaatccaactcttaagtcccgatgtgcagactcgaaatctccttgctgtctgatttgcatctgtataaaagtagtaaaagaaacaagaaaaagaatatcatcttgatgacattaggaagtgaagtatgcatgaataaacttaaacatgtatatagttataaggtaccttgtacttgtctctgttaagttcaggctctgaaagcctttccatgacaagttgtagatcttgaggagagaaagtttcaagtttctcaattataacacttgatgaaggaaaccacttctgagtgttccaccagtaggttagccatggtaggtagtgagcaactctgagtgtccattgatcttgtggtggttgtaggtaataagtatcagacaagtttgaaggaaaagaaggccaccagtagttgaccacaggcgcaatgagtcctgctcctgcaagcctgtaaacatcccaagcttctaactttaaacatcaccaatttaaaacaggacaacaatttattttataaacactgccatacctattgggaatatacttgaggcaaccccatat

SEQ ID NO: 118389 - DNA, 2196 bp, Cannabis sativa
tgggtaggtttagttttggtgagggtgagatgttgagagagaaccgagagagatagaagaagaaagagagagttgaggtttgaaaatgagaagggtattttttggatttattataaagtggtcatattttttaaattttgaaatgtattagtttaggcgtaaaattttaaggtattttatgcatattttttcaaattttccttaaaaaaatatgagaaaataaaataattaatggccaaaatgtgaaatggcaaaaattatataaatagatttttcttaaaaaaacccataaatttttcgaaacaatcaaaattagattctctctccacaattttctccgatttcttctctgttagaatcacattgttttctaacgaataaaaataacaattcgaactcaaaaaccagcaatcttaactgattacattgaaaacgacataatcaaaacacagatcaccatcactgattaccttctccagccccggtgacttcgccaattagttctccggtaacgataatctgcaaatcaatgaatacataattctttagctagaaaacttaaatcagaattaatagtgatcatacacaacaacaaaattcgacaacaaatatcgaaaaatcaacaaactaggtaaatacactcaacaatcaaaattatttatgataattatgatttagaaacttacaaaatctaaaaatatatatcatctgaactaaaaaccagattaacaaaaggatacaacaaaaaaaaccaattctaccaatcaaataaaaataagaactaaaaactagatgaaaacataaaaagaacagcaatacagaaaatttaaaagaaatcggtttcaattataaacttataattagattttaatattacttttcctttaaaaatgcaacaatggaacaaatcatatgtgtgatcaaatatgaaggccaatgaatagaaaatataagttatgatgactacaaaatgacaggattctaattccaactaattcttcactagcaaacttgtggagctgataaaaactgaaatataatgcaacgaaaatgacatagacatatcacaccagatttcaccgggaacaacaccaatgaagttatgagtgacaatttcatcaggttctacattgagctcaaaaagacattgactggagtaacttattctccactatgcatcactactatagaagagataggtatacaaatagtaaaaaatctatcttccgaacaaccaatacaagagcaaagcaacacaatggaagaactggttctacaaaaacacaacgaaccattctaccatcaattgataatgaaggatgttatcccaatttttacactctgatgcggcattgcacgatggtgacacatggaatcaattttgtatacctgctcgcaagagatataccaaacaaagcactatgtatatttgctcggacgaagtcttcttaaccgggtagtgagccatccgaacaacacgccaacacttagcagtttcagctttcgcatcgtgagtcactgaagaaatcgctataattttgggatcagatcacggagccccatcttttcataggttgatctgaaaagaatgttggaggaagctccattatccaccatgcatctggcaaccgtcattttcctaatttgtacagtaatgaccaaggcatcattgtgtgggaaggttacttgggcagcatctccctttgtataagagatggcagactctccaagcttgagtttcttagagcctctttcttcgatgaccaggatgtcgggtttaggctcgtgacaaagagtctgagcataacactccctaaccttacttgtctcgcctacaatgtgtaacttaccatatatttcatatgtcgtcgcattatgggtaccttacatgccatcattctatggataataactgagataataaggcactcaattcaattcatatcatatcatcttagtgagagcgactcacaactttcgctaatttcttatcttatgggtgttctaaacgtagagagagagagggtttcggtcctaagaggaagaaaaaaagaagagcaacaccacacaagtacttctcacctttgctttatctgttagggtttataaaacacttaagaaatatataaattacagatctaaacatattcctatagtgctttaatatagaaaaccctaaatcacaaatctatagaa

SEQ ID NO: 118390 - DNA, 2050 bp, Cannabis sativa
gcaatttaaacataaagaatgttctatcttttacaatgcttacttatcgttcgctttactgggcaacgatagtgacatttgtagctcgtggataacgagtgataagggtgctttatgatgcactgagattgtctcgtcttattgacgtttatttaattatgcattgttgagtatatgttgaatgttgagtatgttggttacaccgtgatctgattacttgcatttcatattgcgtgtaaatttattagcttttcttgctaagtttatgtgactcatgtgttgcttcgtggtgcaggtaaagggaagggtaaagcagagcaaccatgagttagaggttttccaacaatgtacatatcaaccgcggcgcttcggctaccagtggctaggatccacccttttgattgtattttgaattgtaacccttcgatgtaaaactaattttgaaacagagtgtaaaatttttatgcaggggatccccgtatttagcagtgatttatcttttataaagttatgtttttattttaatttaaaagttttaattacacagcactttttgtaaattaataaagttagttttaaaaaaaaaattgtaaaagcacacacgtaacgttcctgtaggataggacgttacactaacttatttattagtgtattgtaatctcttttattcaatcaataaaacaaactctattattcacctctgttttttgttctcttcaactcagcaccttaattgtttcttttagaatattaatacttcctttactcgtactacaagtaaattaagattgtatagtaactaaaagttgttaaggtgttgagagacatgactctctcgaatgcaatgtattttttaaaggaaattttgaagggtatttattagaccacatccaatatttttaggcctattcaaattcgatcaaagtatatattattggatgttagattttaccattcgaaccaatccaattactttcaatcatctgatcgatcggttctatccattgaatatattacttatgtaaatttaattattaaatttgttcgaatttatttaatattttaaaattaatatttttttaattaaatcgaattcatctaatattctacgtctaatatttgaaactccctcttcatatacttgaaacattatttaaataagttagaataaataattgtcgagatttaattagtttttaaatcaagttgcacacagatttgttttttctttaatttttagaggtccaaaatcattggcagccaccttttatttcttattatatatttatatttatatatggatgtttggttttctttcataataaactaatgggtttgtttatctaaaaaatttccctttggttattattttattagaaaaaatcttagctagcatcaattataggtttgtatttataatacttgaattagtagctatcatcacattaattaaaaaaaaacctcccactttatagctttttattttttaccaagtcaccatctcgaatgaaatgaagttatatatttttattttaatttatatatttatttatttatctttagaaggaacgctacaatgaagttagcagccattaaaaataaactcaggtacttaaaaaaataatcactaacgtttttttcatatttttttaaaaaaataaaaattgatactcacaactagtactataaatacgggttgggctttttgatacggcgcgagcctgaaaagtacgagcacgactagacacgaaaaaaatataaatttggtcacgacacgacacaatgctacaaattagaatgacacgatacgaaaaatatgtctttaagcacaacacaacacgagaagcacgaaagacacgacatgtaaacacgagcaaactaacttgaaaaacatgacagacgacaagttcaaaaagtatggcacgatatcttaaaaaaccttataatttaagaagaagaagaagaagaagaagaagaagatatgaatttattagggctttttttagttttaaccaaaaaaaaaaaaagtaacaatattacaaaaatattt

SEQ ID NO: 118391 - DNA, 596 bp, Cannabis sativa
catttaatcgataagtgatagtggggttttttgtattttagtccaaaattatcctaaaaatgaataaataaatttctttcttgggttgttcaaaatctactgtaaaatgaatatgaaataaatttacaaatttttgaacacatagttcacatattcttttttgaaaaataagaaaatatataatttaataagagtgataaaatttctaaatttaaatttagaatatataatcaagaacttttaagtcacaaaacattttaggctcatttctgattttgaaacttttagttttatttattttttattttttaaatcagtgaaccccataagaatttataatgtttctccttctcaaaaactaaaactctgtttttcataaagataataataatattgttttgcctgccgacaaaattaaaattgctttgatatatttcttttgttttctttctaaaaacaataataattcatatggaaaatgtttttgttattatctcttgtttgatgttatcgacacttgggatgggagtttatgcatagaaagctttttttttttttaatttttatattttaaagtaatttttttttttgttttt

SEQ ID NO: 118392 - DNA, 957 bp, Cannabis sativa
cttattggcaatattattgatatggatttcattattattttccgcattttcatatcattgtatatgctatattatatacactatatatatagtctaacatgattttcttttttactatgatgatgagaaggaagaagtttaataaagcttagaaaatgatattgcggattcttcaagctagacatcaaggacaaagacatttcattaccaaggaattaatcaatatatattattcaactttaatataattaaactaataattaagaattgaactttacaaatatatgtctatatttgacgttagtgttttttttttcttttttctttttctttttccactttctaaaatggttgtgaagaaaaagttccttacatataaaaagtacgtatataattttcactctatattatgtcactaaaccattatttgcatgctaactgctaagtacctatatcaacaaccatttatgtgaaaatatatatgcaatccactctaatattgaaagattccaaacccccactataaagaaaacaaccttaccttacaacataaattttttaattaaatatccctttaaatattacaacaaaaaattgcttgtcatgaatttactggaaacgtcgagatcaacttttaacttggattcgatcttccaaattttttttttttgggttctgttgctacgtattctactttttatgaggtctagtgtgcactagaaaagaagttttctaggcaatcaaaagctcgattacctcagataaagagttaactctctaatatttagaaaggtaacttgctcatttttaactacgttgacaaaatcaaatccctttgtgatagtcttagtgtatttggatgtgtgatcagtgatcaaacactacaccaaaaatgatgtataataacacttcaaaatgtcacaattatataaatttagtaacatttatagcttttgt

SEQ ID NO: 118393 - DNA, 2443 bp, Cannabis sativa
ttaatttaactaaattaaaaaaaaatatatcaaaaaatatctctttttacactatatcaagaatatgttcatacaaaaatatttaactcaaagttaactttttctattcttatttttcatgctattttttttttttaatttttttttaccgatggaacaatctcagcccatatcatatgaaaatgagaaatttttttgattggatagaaaaatcaagcataaaaactcaaaattttctatttttaatgtgtattacctattagtaagcagtattaggaaaaatttaaatttttatacttaatttttttatctaattagaaaaatctctcatttttacattatgcgggttgggattgttccattggctgaaaaagaaattaaaaaagtttttcggcaaaaaaaaatcattttcgagaaaaaaaggataaaaaaagttgagtttacttaaatatttttttatataaactgtttactgagattttcaaaaatcaataatttaagtgtaagagcgaaagaataataattcagaaataaaagagataagaacactccaggtttttacgtgattggggcgttaattagccttagtcaatgagtaaatattattaagttaggctagagaagctttagggattacaagaaggtatgcgcactctctcttttacctggacatgcgaataatgaaattccaactctttgcatgtagggtttatgtagtatttatagagtcataatagttacaattttccctctaatgggaagttaacaagtaaaatattaacttgcgcttatctggtgaagcctggcccatgtggtgctttgcgtatgctgacgtggatgccacatcacgatactagttgtcaaaatcgtatcgtattttcatggaaaattaatgacacattaattacttgattgtcaattactttgcttccttatttagtgagatatgatctcttatctgagattgtaggagggtaattcctcatcttgtgtgatttggtagaaaacaagaaactacattgggcttcttaatacatgctgaaaggttttttcgattgtgctattacatgtcttctggatggtgaccatgctggatgaaatcacgcttagacgagttaatcgttatttactaggaaggactgctgatttatggggatccagctcagtgacgttgtttgggcgcacgattgggccttagatatatatgatatgtatttattatttggattctacgtttcccttgccaaaaatacggagaatatttacccctaagcatctaaaacactctgggttgttgaggcttgctttagactgcatggatggattggcggaggctaaaggtgaaaccttttcaatttccaaatatttttcatggatggaagacaactttcttttttttttttaattaaagtgacatgtggcattgcttcattagttcgtgggatcaacgctcactgagaatactttggagcgcgaagtaaataaactagtggctatttactttagcgcgagtctcaaggggaatatcatcatgcggtttccattgatccgaaatatagcatttaatgcttgaatgatggcattctagatcgttggatctatattttttattcttaaaaataaatctgatccattgatttgggtatcacgcggatcatttctccaaagtataaatacttagtaagaccaccatttaccatttttcagactttttcaaattttccaagttaaattagaagttttagagagtaaaaactagtgaagatttcttcagtgaatgaacgaactctttgacaaagccatcaaactccttttccaaattagaatgagagagtacccagacgatcgaccccttgtaatcttttgtgaatcccagaggccgtttataacgctggatttgattgatcactgttatgaaaaattgtaaaacaagtgcacgtaatcaagtagtactcacacaagtgaggtcgaacccacaaagaattgaattgaatatcaccaaattagacttatttttctatttggtagacaataattttgataaaaaataacaagaaaataaaataaagcaatataagtgtttaatcaaagaaatctaaattagggaaatgaatcatgttgtttcaattacccaattattaatgctgactactattcttctttccttaagtgaatgatagattataaaattaacctaactcttttaagattttttaggtcctaaatcatatgttatttattgcatctctgagattgactaacatactgtaaagtcctttttggcaagttagttgacaaaatatttttttggcttttatggtaagattcttgtgcattcataatctatttcttaccttgtttatttgatttgtagtttctcttttccttgttaggagagttgcacttttcaactgaactttcctttgtttggaaacttcttgta

SEQ ID NO: 118394 - DNA, 1896 bp, Cannabis sativa
gcttaaaataccttgtaccgagcagatggcctagggccagataccggtagtgctacccactgatcataatccaatactgattgccaattgttgttctctactatccccatttcagaattctgcaagagggaagctcaaattcataaattcaaattgatttaacagttaattacactataatttaactgaccaaaaaaatatagtaagacttgatcaatcccacatgaaaattctgagtaatagaacaatttatgagcaacagcaatgaaaggcattcaacaaggaaaagataaaaccaaataaatagttaatcaaattacttaacacaacaatccaagctcattgcaacaaccacgcaaaattcaagcactctgattctctgagccatgataaacaaatataataaagaacccatattgtatgacacaaaacttgaaacaaattgttatcatcattggctgcttcgatcaaaattgaaattcctataaagtaatcattagaacataagagctaaaactttctcagtaaccaaacaaaatggcgtagtaatgagtgatgagcttctcacctacctgaaatgatgagatcagagagtgaagagttgtggcctgagaatcgggatctggaaggatggacaatgtgtggttaatcgaacggtgatgaatctccggttgcagagaagaattcaggaccaccgtagatctctctctctctcacacactctctcgagatctcaagtagtcggtagtagatgtcgtagaggaagggtccgttacgtccgtcgtcctaattttgttggcttttaaatttattaatcaaattaataatttaataaatacagaaaaaaaattaataattttataaataaatgcaggaaaaagaaaatacgttagacaaaataatctgagctgttgacggttttgggtcccgcgggcacggacggttgggattggacatattggtatttcttataattaaataactaaaaaaaattatttaaaccgaaaatttgataaaataatctcattttgttaattttatttcatatgataattttaatttttttttttttttgagaaaaagaactgttattataaaattagagagttttttacaataacagaatgaatagctgagggaaaatcctcaagccaagtacaaatattatccaacactaaagcttgtttagccaaaccatgtgcggcttggttagcatcacgacgaacataattaacacaaactgaaggaagatagaataattgaatttgaacatcaaaaattaaatcttgaaatgaagaacagtttgatgttgactttttgagagaatttgcaaggatcaatgaatctatctccaccatgtcaaccttgaagttaaactgtctagcaaatttaaggctataaaagagaccctttgcttccatttcttgtggctgacaacaaccatggataggatgagacatagcagctttaacattgccattggaatctcttatgatagccccaaatccaatctttttgcaggctgcattgaaagcaacatctatgttcaacttgagacagtttggaggaggaggtttccattccttataattggaaggagttgcagcaggtgattgtgctagtttaccattgttggaactttgtatgaaattatgtaaaaatagaaaagtgaagggtgtgagtaagagtcccacatgggatagaaacactatatttgtagtgtatatctaatgcaagtttgaaatatgggtttgggcctcaagggtatccagttttgtgcgtatgggtaaggaccactacacgcgcgcgcgttgccgtccgaccgagtcgggttgggttggcgggtgaggtgtcactttattttttaaaaagaaattatttaattaaataaagatt

SEQ ID NO: 118395 - DNA, 997 bp, Cannabis sativa
ttgtaacataaatattaaagtttaaaatattcatcttaacccaatgaacccaacccaacccacccctattaggttgtacaataaaaaaaaattgaatggtttatagtttatccaaaccgcaatcattgggttggcatattaaaatacctctaacccagctaacccacccccatgtgcactcctaagtccaacaatattcttgttgactatttaatacatgtgccttctatatttccaaaagttgagttggaatttattttctgtatgatgtggtatatttggactgaaaagaatggagtggacatggtcatcaagttaggctagccattgctctccctttctatgtttgctgcaatatgttgctttctccactcaagcccatgttgcacaaatacccagtaaatcgcttgtaggtgaaaactatcgtccgagatgcaatatagcttaaccattacattaaagttaattttatttttataaatatcatcttttattacaaatatatgttgcaactaactaaaatatatacattttttttaggggccgactgtccctctcacttcaatgtgggttcgccccctagtccaagatgcatctggctggtagctgctctttcccaaacacttcctgggtgttataaatctaatgagaggcctactttcatagtctcttgtgtgcttctaaattacagttagtcatagtggaaatgaaaacttatgctctcatcatagtttctagagaagtgaatttgtcttcatctgcatctttatctactttgacaaatattattgtagaagttattaatcatttatttctttttatttttttttggagttgttgcctctcacaattaggtgggacgctaattattgacaaacatgttttaaaattgggtaaataccattttggatcctgtattttgcaaaagttacagattggaccctgtgttttgttaaatgacaaaatggaccctgcattttctaaaatagtaaaaata

SEQ ID NO: 118396 - DNA, 1774 bp, Cannabis sativa
  modified_base (1707)..(1707): a, c, t, g, unknown or other
ccgccccgaacccgccccgatatgatatatgtatatatatttaagttttaaaatcataattactacaattaaaataacttcatgctttaggctttttgttcattatactcttttttttactttacacactattccactcaaatttattgttttactaagtttttatgcttttttttttaattctctttgaaacatcattttttttcaaaaatatatatatatgtaataggtacccgatgggagtccttcccccgtcgggtaatccccaccccgcacccactttaatttaaacgggtattggggcgggtatcggggtgaatttaagaagcggttatgggggtgggggagcaatccccgcacctgccccgccctgtttacatccctagctgcaagaagccaaggtctccatgggcagctctgaggcgttcccatccacttggtccaaaagtttggtggaaaagggggcagtctctctccccaccttgaatgtcagtcgcttctctaaggcctcaacgtccacagttggcaaggggcaaggtgtgcgtgtcgtctgacatttcagccctgtgaaccgccgagagcacgaccgcccttctacggacttgttgcttctccccatccaagcccccctttatagccctgttaacctccctctccttctgcatgtcgagaggattaaaaggaacggtcttcctggggaaagtgaaccccactgagtggtacttttggcatggtcgaggggtggtatgactgaggctagcccagcctcaatgtggatcgtgacactgaaggtggccccccgttccaaaggtggatgcctcaagtctctacctttttttgtcaaaagtaatgccacctatctcttcagaagaacagattctctccattgcagacctaatatacctattagaagtcaatacaatagcaaaacgggtcaatgcattgcatgaccctagaactctcaaagactacagacacggtactagtgttcctagggcagacggtcgcacgtaaaatgcaacctcacaactccctcaaaaccctacaacaagtaaacagtgaagaaaacttaccggttgttaagagaagtatggggctggtgatcctggtgcagcgtccttgctagcaaaattggtggcagattatgaaggtgtcgagaagatcttgcaggacaggagaagaattgaaattaaaagacttctagtgtgacagacaaaagaaatgaaaagcgtgaaatggctgctaaaggtatttaatgggtaccaggaagaggcgccttccacaagaatcgaacggttcgactcattcgccttagaggcatctgacaattggataagtgggaagctgagaaggtgtatcatctcccaatagttggcttccatcattgcatgcatcataaaaagcacttgagaaatggaaagtcgtctcaaatccaatcactgccgttttggggcatccctcaaaacaagttcccagcacacgcgtaaaactcaaaagtcaacacttaaaaccctgacgagaaaatagaagtaattatgccctctaaataatgacagttaaattggcggctggtgacgtagtgtaataaagagctcatcataaatcccatgtgctctaaaccactcaagagaagatactgcaagctcttggaccatgttaagccctggaaacttggggggtaaatgtgttggaatatgttttaccagnatctagatttactaacaagaatgtttcattaacatcctaatatgaatttctaaaacaatgaaattaa

SEQ ID NO: 118397 - DNA, 2353 bp, Cannabis sativa
  modified_base (27)..(31): a, c, t, g, unknown or other
  modified_base (2285)..(2287): a, c, t, g, unknown or other
aaaatagattacattgaaatggagttnnnnntagggcataaaacccaacactgcttctatcatggctccgatcatctatgactgaaggtgttcttggatctgttgccaacttcaatactgtgtactctgtttggagagctttggaacagaggtttgctagtcaatctcgtgcacgacttctgcaacttaaaggtcagttttctcatgttcataaaggctctctgtcaatcttagattatactgacaaagttcaaagtctttttgatgccatcactattgctggttctcccattgacgagcaagatgtcatactccagctcttaaacggtcttggtcctgaatatgactccgttgtctctggtattacttcaagaagtgatctcttgacttttgatgaagttcaagcacttctcatggcccatgagagtcgccttgaacatcacaacaccgtcaatgatctcatcgataaaatgcaagccaatctcacttttggtgatttaaaggaaactggcacatgacctcctccaaatcgtggtaatttcaattgccgtggctatggtcgtcctttcaatcaacactctagattaatctgtcaagtgtgcttgaaaatgggtcacacagctgttgtgtgccactaccgctttgacaagaattgggtcactcccaaaacctcaccaaacaatcccgaagcctttctcactgaacaagattctagaaatgatactcaagaattctctccccagatcttacctgactttggtgatgattcaagttggtttgctgacataggggccacaaatcatgtcaccaactttgttgacaagcttgattctaccatgacttacaatggttctgagacattagccattggtgatggtaaaaaactcataatctctcatacagtttaccttctcttagtcatactcctttgcacttacagtctgttctcgaagttccttctatcaaaaagaatttagttattatatctaaactaattgcagacaataatgtttatcttgaatttcacaagcattgctgttttgttaaggacaaggactctggacaggttcttcttaaagggacaataaaggatggcctgtatcttcttgggaatggctctactacaacatctccaacaatattgccgtgtaatcttgttgctacatctacttgtcctttggacaaaaattgaaaatcatgtatctcctcatctgatgttaagaccaataattgtactgttgttgatatgaataaaacatctcattcttttgcttactctcctgcattatttcacttagttgctaagttagatgttaacaccttacactgcaaatttggtcatccagcatcacagactttaaataaattgcttactcaaatccctcatactggatctattaatgacctgcaattttgcaatgcttgtcaatagggaaaatgccacactttacccttccccatgtcccaaagtcgagcctctcagccccttgctttaatacatactgacctatggggaccctctcatgttgattctaaagatggttacaaatactatgtacattttcttgatgattacagtcgatatacatggatattctccttaacattgaaatctcaagccttccatgttttcatcaaatggaaaagccttgttgaaaagcaatttaatttgcctctaaaggctgtcaaggaagattggggtggtaaatatagaccattcaagagatttctacttgatcaaggcattcactttcaaagttcttgtcctcacactcatgaacagaatggaagggctgaaagaaagcagaggcacataaatgaaattggtctcacaatgttagctcaggctgatcttcatctgagctactagtggcatgcctttagtgctgctattttcacaattaacaggcttcctacaagggtattagatttctcttctccccatgaaatcatattcaagaccaaaccagattacaatatcatacaaccctttgggtgtgcctgctttccacatttgagaccatataacaggtacaagatggaatttaaaacacactaatgcttgtttcttgggtattctcctcatcacaaggggtacatctgtgagaatactgaaggtcgaatctacatttccagaaatatagtctttaatcttgcctgttatcctgctaagacagtgcctaccccatctacatctaataccactcaggtacatcactcttcaccatctccattttccattacttccttttctcctacaacaagttactgttgggttttatgcnnnaaataaaactcatttcatataattagatttacttattaataaagatcataaataacatttaatgtt

SEQ ID NO: 118398 - DNA, 1691 bp, Cannabis sativa
gggggggggcgggagagagagaattcaagttggagttttctgcatcatggggtttgattccagagtcgatctggccaaggggtggttagagaatcaccgagaatgaagttagataggaaaaactgctctgagactgataaggctttaaggaggatggggagattgatactttgtctctgtgaaggaagctgtaactcatttcggtgaaattggttactagaaactacatcatccttctaagctctttcaacaacattgtgaggaacttagtgggatagtgcggctgagtgaggagaaggataaagaattaggtctctaaatattaggttcctaaaattagagtttttcatttttagtttttaatttaattttttttatttcttttattttttttaaaattatttacatggaccaataaaattgtgccatgtgtacacgttgtccacgtagatgtacacgtagacttgctaacatggtacttaacatccaaaaattgatggaaatattaaattactaactaaacacgaattttaagggtttttctgctaaaaaatagattttgggctctagttgcaactaaagttaaagttttgaattttttgaaagttttactgtaatttaccctattttttatcgaccatcaaaaaataagctgtatttttgtagactccaaatcattttcgaacatatatttatgatggttagtgagtcatatatctcaaaaaaaaaatataaatacgcttttcaaccaacttattattttggaaaaatgtgatcttagaaaaatgtggtaaaagctaaatttatttttaagaaagaagcttgtaaaatggtaattgatggaagggatactattatttgggaggatccttaggtctctcatagtaaagagttcttctagaaatctaatggctcttaccactgagtttagcaaagtggttgatcttctatcaaatagtggtgattggaatacccataagttaaatagcatttttgataaagagactatttctgctatcttaaaaggaggtagaacctctgattagggtaaagataaatgggtttggacttcgaaaagcgatggtcatttctcgtacaaatcggcctaccttatccaacaaatgcaaagggctcctcactatgaggttgccctttctccatggaacaagttgtagaatagtaaaatattagagcaccataaggtcctttagtggtgtatgctgtctaacatgctcctagttcgatctgtgctcaacaagagattccatattaatgatgcgggttgtcctattcgtgaggttgaaaaggaatctatggaacacatttttctctcctgcaacttggctttcatttatggtggtcttcaccttggggtatctttcctatctgtggtactggcattcgtatgtaggactggattaaatttatttgggacttaaaattccaaggtattaatgcagatgaagcttttctttatgcttcaattgttgtcgacaccattgggcaggtccgaaatgataagatacacaaataataagttagataatgtgaaatagtttattgactctattcatatatcttatactgatcatcatgcttattgttgcccctgattttgcccaatatatgtggaccaaccagacaaggacacgtggatcaaacaacttatcattcaaactatttgctaagtc

SEQ ID NO: 118399 - DNA, 1134 bp, Cannabis sativa
ttttttttttttttaaaatatgttagtagtttctagaattgtgtctcagaattgttgatttttacttagttgggaaatcagataaactttggatagttgatgtcttgtcttttgttccagatgttggaatcagctttatcttacatgtttgaagggcgtaacatctctgaaacggctttcaactcgttgaaaatcgatgatcccaaattgcattctaagttttggggtcagttgcagatacttttgagaaatatgttggcttctgtactttcagtaggtggaaacaaaccctcttctcctcaggctcaaccagctccatcaccctacatatctggagatgctgttaaacttcgggagctttatggaaagtctctcacgtcctctgatttcagtcaattaaatgccatgtacttattgtggacatcctaagcagatactggccttcggtagcggagcccaccatcatttcatggttgtaagttgtaagagaaaatgatatagcctttagattcaagtcaatcagtgccttgataggaaaacattaatataggttgttttcagttaatttgtggttccatttgagcagttgttccttttattattagaaaggagtaaatataagtaatttaacaatgaatgtatggacttactgatgcactgtgtaaaagaatgaatataactaaataatgagaatttacagttagtggtctcaaaatcaaatgagtgaattaggaagataaatgtcctttcattagaaattatagcaaaatgacaatggcggatgtttttagttggtgtatattatgattatagcatatgtttcattcggtctttttttctttctttcagaaatatctaactagtttgattttttttttttttaaaataatttttagtgccaaaattataatttaaaacagtaaattgtactttttttttgagtaaaaaacagtaaattgtacttatatatatatgttgcaattgattgtctctcatactatgtaaattatttaaaatatttaaaaaataatgtttacataactataatagatattgttgtcgagtgaatttcgcaacaccaaattatattgttttgttaatatcgaagagaattttatgagtaatgacaatcaa

SEQ ID NO: 118400 - DNA, 1432 bp, Cannabis sativa
tataactatatttagttataacctctcaattagaatataatttacttggtcccaagtgtattcttggatagaggttctactgtaataatatttttttttattaagcattgttaagacattaaaggtgttgctttataaataattagtggtattttataataattattaaattaaattatatagtagtcgatacttaattataccttaagtgatattaaatactactaatgttttttaatatttcttcttttattaatattttcttaaaatatttagtctaatttaaaagagcattactaatgcatgccacaacgaagtattttttacaagtgaccacaatgaataatgaggtggaagagagaaaaaaatatttttgtatctccatggttgttagtgatgccaaaatcaatgtcaacctaataaaatttatatcttaattatatggttattacaaagtgatactatgcaaacagtttgatacttaattatactaataataacagtataatatatctagagctaattttaagtataaataaattaggctcactactacaatttggccttttagtgacactatttagtgacacacattttagtgtgggtcactaaatagttaggaataatttttagtgacaggcacaaatagactctaaatattcagtgttagtcacatgtaatgcgggtcactaaaaatatagagtgtcattaaaaagtaaatcccacaattttttaatttttattaatgtgaaaaaatataaacctatagtgacacaccaggcatgactggataaatgtatcccaacacacatggcgcgtcactatatcataactaaattaaaaaaataaaaaataaaaatacaattacaattaatatacttttaataagtaaataaaaataaaaaatataatgggtaataaatggcttacaaatcaattattaaaaagcaattgcactaaaaaagacaattagtctcgtacatctaagagacagccattaactttattccattaaaaaaaaccctagatttatatttttcactttcatctctctcattttagttcttctcaggccacacatctaagagacatgccaaccaagggaacgtcggcgagattgacgttcaagatcatctcagagttcgctcacggcaagggaacgttgacgctttccaaggatctctaggtcgactacggcggagagatcaacccatgcgatggatgggtcttcggcgatcgacgtcttcaacgaagacggaagctcagatcttcacctcgaaattattcaggtacgcacttcctccacttcttcttcttcatcttctttttttgattctttttcaattagattttatttttctattctcaaatttccttttaattttctgtttatagatctgctatgtgccttctttctttctctctctctctc

SEQ ID NO: 118401 - DNA, 2965 bp, Cannabis sativa
  modified_base (1410)..(1413): a, c, t, g, unknown or other
  modified_base (2912)..(2940): a, c, t, g, unknown or other
aattggagctttcttttctcactccctttgtctagagcaaaattcagttgtttaattgcccaaaaggctctatgctctaactctacaggtaaatgacatgcttttccttatattaagcggtaaggtgacattccaatgggagttttgtatgcagtacgatatgcccataaagcatcagttagtctcagggactaatctttcctagttgagttgattgttttttctaggatgtgctttatttccctattggagatttcaacttgaactctagtttgaggatgatatggtgtagtgactttgtgtgtaatgccataatttttcatgagatgctcaaatggcttattacaaatagtgtctttttttttacccttaatggtgatttcattatttatcaagccaacatgagtgtaatgagataaaatcctatcttaaggacatactatggtgggaagagaaacttagagtgctatagaattttttttgagatagagaatgggtctaggaatttagaccaatttccttggatattagtaattagtggttttctgaatgtgtttcttggggatttactaagattaccataagatagggagatcgagtttttcattaatttgattcttagagctcaaccagtttctgttgcaatttactgcatggaacctatagagtttgttgaatggaaaacaaattatgggagataatggataaggtttacatcacacatagtacttccccaggcatattctttattttcaacaatgattaagattcaactatttctggggaccaagagaacttcccaatggcctgaagttggacccaccgccatagttgacatatagttaacttgggcactttcctattagtttcttgaaaaacgagaaatttttttgtcatcagaaataatgaatatacaagaaaactcagagagaacaccacaaactcgaggcctagaaactaagcccagtgcccaagttgacaatcaatctgatgtgcaggtttcgatcactcaaatgccaattctactctgagaatgctctccaaaatgttcaaaactgacgttggagacctcgtcttcaagttctagtaccttggaaatttcaaaacaacatcccagaagctctgacataagcattgagcgcccagttgaaaatggcctagtgcgctaggttttgcttatgccattctaattctatctcgagtgtttgtctagtctttcacaatcacaaagagccatgaaatcagaccagtcaaatgcacaacttcatattttcacattttcgacaaggtgattactcaaaaattaggtagttttgagtctctcatttctgcaaaatagcaacatctctgagaactggttaccaacttcgtaaaaataccaaaatggactaagtgatgtcaaaatatcannnnggcatcaaaaaatacatccccagtctgtattctaattcacccagcgtctaggataacgtcacatgacaacctgtgcactggatgtcaacttgggtgctgggatgtcaacctgggcgttgggcccacaagatccttcagtaaaatagccagaacatactcaatattgatccaattgacgtgatttaatttgattttcaaagctatttaaatgctctatccagtcaagtctcccacttcaattgcaattctgaagttatcaacttcaaatttcaccccgatggagttacaaatttaagccacaacttacccaaagcgggtcttgctgccgcgacccgaactccaaaaattagcgatcaacattagaagtttattttcaccgttagatcatcatctacggtaaaaaattagcaaacatgtgttttttcaatatttttcctctagttcattttagacattcagaaaactcatgagaataaaaactcaaagtagacgtagctctattattatcgctatttagggagtgaagtactataagttgttatgtgtctctatttatacttaacatatatttcattctcgtctatttagtgagcaggtgtggcttaggaagctctgtccagatttctgagtcaacattttggtactttcattgagagccacaaccaacaaagtcacttacaatatggttgcgacaagctcctcaagtctcaacataggcgccccaacaactggccaacaaactggaggcacgcaagttactaaagctggactgagactactacatctaaggtcccacgaggaggcctcagaaatagctccatagctcatccccaagtccaccgaatgctcccagtattggaactgatgagaagatcccacctagagagccacacgtggagttggaagaccccgacgaggccgatcctctggttgaatagcttaacaaaactgtggctaatttaacaataattgtgagattcattaacaggtaacacgagcattttcaatacgagttcatagaaatttgacgtaacatcaagaaccaatgagttgagtaggagcaggagagagctaacttgtctcaacggattagagaagcctgtcactctggtcgtagaactaccccctgcaggggtctttccgagttggtaagagaatctccccgtcgaccaactagtcacatgggagctagtgctcaaggagaaacccttaatgcatggaacacaactaccatggctagaaaccatgcaagtactaagtaaatacaaggtattgacgcccctcaaagggaattaaacttcaaacaagagttctaaaggactcaaactcgtggctctaaccaatgggccctccacctgatgtatagggacctcaaaatactaagagagccaacaggactcctccaccatgtcctagtcaacgctctaaggaaacttggcgccgagaccctactacaacaaaaactgtcatcaggtgtgactgttggaaattattttacnnnnnnnnnnnnnnnnnnnnnnnnnnnnnttattaacatcctaaataagaactt

SEQ ID NO: 118402 - DNA, 974 bp, Cannabis sativa
tttttgtttttattctttttgcaagaatgcttgtcatatttggaatctctcagatgtgtaactataagtactatgctcataatgtgtgttcattttaatacccttttctcaaaattctctatgaagtcatatcaaggctctgtagttttaacataatttgtattgatgggaatgagtgacctttttgttaaaaagtacccatcaacatcatgcaacttcttttttcattgaaacgtggagtagtagttataaagagagttggtaatgcatatgagaataattgtactttgtcattaatataattggagaagttataactgaactagcaaaaaattgctttacctccccacttgccttccatcccataaactttgccatctgttcgttttaccaattaggttcttatatttaatagacaaccatccgcacgagaaactcagccccaacatcttaaactatgggatcatgatttgattattcttgatatcttgatatgatataatataatggtgagagctcgtattcagtagtttaccatttggcaattctaaatacaaaacacatttaaaccccgagggtggtctagtgttaaggaggtgtgtttgttccaaggttcgaatcctaccctcaaaaacttttgggccacaaacgaagtgccacggccaaaaatttgggggaagaaaaacacaacacgttcaaatagacagatcttgacaaagtgaaaggtggtggcacatgaccacttagttgagttgtgttattagcacatgctactggtatttgttatcttttgaattttcatgcctatttttaatgtccctgaagcctatttctgaatatccattatctttttggtcaaggatttattgtgaattctaccttctaataattaaattttgttgcaatttgcagattccagtgcaaccgaagaccgaattagaagcattcgagacaaaagctgaaggttgaggatg

SEQ ID NO: 118403 - DNA, 1434 bp, Cannabis sativa
atgaggttccatcccaaaaccaatcggcaatgggaggagtagccctttcatcttatatatcacaatttatttccacacattagtaatgtgagactaactattaatataactacaatgtgatttttttttagggtaaagaggctggtagggctaagagcttcatcaccaattcaacaaattatttcggaggatctaagagccttctttgccaagtcgtgagccgccatgtttgcaaagcgataaatatggcgaagaaagacatttgggagtgtagagagtcgagccttgtgctgggaaaggagttccccaaaaatgttgttgtgaccgtgttcctttcgcaacgcatctgtgattgatttgcaatttgtttcaatgaaattaactgggagttgttcttcaatgaaccactgaagggttaagagaagcgcctttgattctttaatgtgaggatcacctatcccttcgcgggggattgcaatggctattgtagtatctccattgctatttttaagcactcctgtgaacctcgatttgtttgacttgatggcaatacagcatctgcatttaatttggagagaccaacaggagggggtatccaattttccaccccaagactgttgtctggctggggcgtctatctttgaatctaatgacttagcttccttaaattcgtgaatcaaagagcgaccaaagtccaagagattttgacgaattgctggaagtccttttgttgtggttgagtatcatgccaaattgaccaagacgtgcaaacaaacaactccacatcttctttggtgaataagtttgcaatgtaagaaacaattatgtcaaaaaaattaatatgagcagaatctttaagaatggagtaaaattgtgtacctttccaatgcttcctggcataattgcaagagaataaggcatgacaagcgttttcccagttaaatttgcaaggaggacataatggagatgggacaatttttttgtggtggaggttgaccaaagttgggagggtgttctttgatgctctattagtaaaatgtttaacttatgaaggaaggttgagcttctaaagtaacttttgttgacctcaaaaattgagtaacgacagcgggatcataccacgtgtttgcataaataagaataaaaagtaatagacaataaaattttttatagaggttcaacccccttgtgatagcaggtaatgacctactccccttttagttgtatttactgagggaattactatccagattgctataggtaggatctactatagtacccataggattacaaggtgtgaatcaatattggcaaaactcaagtgttggacatcactagggtaggtgtgagagagagaaagagagtgagggggagagagagagagagagagagagggttgagttatgagaggggtatttttgggttttagataaa

SEQ ID NO: 118404 - DNA, 1196 bp, Cannabis sativa
aattatatataaaaatgtatgagaaaatgataataagtttttttgcacatattttgtaattaattaaaataatatatacaaaattgtaaaatgcccaaaaactaatacggaaattaacctaattaatcccctagtataaaataattaacataataacctaaatttacaataattatttctcatctccatttatttcaatggttataattttgtttgctcattttttaattccaatccaatcttatccaactaacaaatcccatgcattccaaacttagttttgaagttttttgaacattttctcaactgtttgaacgggccgaggataaaaaaagacggatgcatgatctatcactttcaacatagagaattttccatctaaggaattccatataatgtatatatttctacatctctatatgtacggacggatataagatctatgatgattgccacttcttcacacaaacatgagcccaagctatgctttttatatcctataaaggtcgctatacgttgttgaatttttcaaaatatttactctatccacatggcaaagtttagtttatttatatagataaaaagaatttctcaaattgccagagactatactaatgtcccccattgcataataataaaatagttgtactattcacatatatctaatgggccgacaaaatgaacatagaaaagaatccatgttcaaacaaaacagaagagaaacccatgtatcctttttctttattaattgtaattgaagctttgatcaataattctctgtattagctaagctaagacttgacatagcaaaagcttgacaacccattcccttaattcgaaaggttaagagtgggacactcttcaccaaaagtttatgccttaaaaccattttgattctctcttttgatttttattaaaccagcaaaattaattaaagtaaattagctagaaaagcaaaacctcttcattgtcatatttcttataatgtccccaacctccttaacatgccatcattgctaatgcttccttacactttttccactcttttcttcctttttccataatatatcgaatccaataccaaccatgtaagcttaattatataaagactgagttgatgagcttggccactcactcaaaatggcgccagctaataattcccctgaatctttagcggccgataaccatatcaactt

SEQ ID NO: 118405 - DNA, 1833 bp, Cannabis sativa
  modified_base (1780)..(1791): a, c, t, g, unknown or other
gagtgatattccccttgctcttcagtcctttgtattagcgtatatttctgtctaataaagattattttccttaaaaaaaatatatatttttaagaaaaaaataagatatttaaatgttatttattttattataatttattcattttaaataattttttaaggatataataaataagtaaatatatttttagtataaataaatttactatggagtcttttgatcaaaataattttttctaaaaattaggttggaccagctttagccaataagctattttttaattgtttaccaaatatttttttatcacatttttttcaaaaagaaatctttagctttttcaaaaaattatgccaaataggcctaagtctctcttagtcatgtattattttataaaattttatattgtatatccctaattactttacactagtcagaaaaaaaaaatcaaatttaatattcaaaataatgttctaactgtatctagttaaaatttgacacatgtaataagtgtatttagtgcactagttttttgttttaaaaaataatatttgtatgcactactgtcttttttttttttaaaaaaaaaaaaaaaacttcagaattttctctcttacaaacatcatatagtatgtagtaggctttctcaggttatctttgcgaggcttgactttctcagtcctagcattttttcttttggtgttcaaccttgtccaaagatcattcgtagaaagactttcgctttttttatttgatagcggatacacttctttgacattctcatttcgactaacagaatcactataataatttgtatccttccgagtagtaggctttttagctttagcattagatatgtctttctatgcagctttacctctagaatcaatctagtcgcctcgccctgagagatgggttcttttcttcttcttttgaggttggttggcagatttagatttcttttgttgttcattatgtaaagctttctttgtcgtctcgcctaccttgcatttttacttgtccttatgaggatcataggttctaggaactttgggatcaattttcccggtagtattatcttttggggcatcatgattggttttgcttgtagcagataataatgctttaattacgatcttcattctcgtcattttttcgtgcatcatcaaagagaattgctcttgcagcgaccatttattttcaatttctttcaactttttgactatggtgactataggatctgactcatttgcatctccttccttttcagcatcatcattaacaggcatgtcttgatgattattttcaggatcagcaaaatcagtctcctctgattcatcgtcttcattcatagggtctttaggaatagaatccttgtcagcttggtccttcttgtggcgactggttacctcagttggatcttcttcgtcttcagtcttggcattgagatttgcatcacccttttttgggtcaatgaagtcaagaccaaattttgttcgggtgagtaccataattattgaacgtaatcttgaatggtatcactactttctctagatctcaatgaaaatatcaaaatatttaccaagatttttagaaaactaattatttaagagctaaagaaaatatgattaagaaaataaaatatgaagaaggaactcggagtttttatgtggttggggtgttagcgagccttagtccacgagtcagtattatttaaaaaatagctagaaaagcctaagaggttactgttgggttttgtgccctaaataaaatctatttcannnnnnnnnnnnttactaattaatataagatcagaaatcgcttttatgttgcat

SEQ ID NO: 118406 - DNA, 2243 bp, Cannabis sativa
aggcttgtatgacttgttttgggtgattatagatcgatttaccaagttagcacattttttgacagcgaagacaacatatacagtggatcagtacacaaaattgtatgtaatggtgatagttagtcttcatagagctctgaagtccattgtatcaaacaaagatctaaaatttacttccaaattttgggagagtctttataaatctatggacacgaatctgaaatttagtataactttccatcctcagactaatggccagtccgagaggacaatacaaatactggaggatatgttacgagtctatgttatggactttgtgggtacatagagcaagtatttgccattgatagaattctccaacaacaatagttatcaggctattatatggatggctccctatgagatgttgcatggaagaaagtgtcattcttcgattcattaggacaaaactggaaaaagaaataatatttaggtccagagccagtttcgaggaagaatgatgctatcgagaagatcagggctcgaatgcttgcttcttagagtaggtaaaagagttctgcagatccaaagcgcataaatgtaaaattttaggtaggagatcatatttttttataggtttcacctatgaagggtgtaaaacgcttcagccaaaaagggtaagttgagccctaggtttacagtaccattcgagatactagaaagggttgcctaggtagcctaccgattagctctacctccagcattgttagtggttaataatgtcgttcgcgagtcaatgctaaggaagtatgtataagatcaaattcatgttctaagttatgaaaccctagaactggagctagatttattctataaggaacaaccaatttagatcctcggcatgaaggataaagttttaagaaataaatagccttggttaaagtactatgaaggaacaagaaggtggaggaagccacatgggaactagagtccaacatgagcatgtaatatccagagatgttcaagttagattttggggacaaaattagtaattaattaatatttacagtaaattaaatgaaactataattaaatataatattatgtataaacattatgtttatatattattattgatcaaatttattaattattaatctaatatatttattatgaaaatatatgtaataatattcttgatataatgtatttattaaaatttaatatataattttataaataaaatatgtagatttataagttattttttatatatgtatatctattctttatttttatcatatacaatttgtatataaaattataaatatgttttgcatagttaataaaatgtataaattatatataagtttttatgtgcctacaatgcaacttattaatataaaaatatatagaattataaatttcccttaagatattttgtattttatgatattcttaataactataatgaatttgcaaaaaagtaaataaataataatcactataaagaatattgttatgaataattaatatttttgcaattgaactttttaaactattaagttgtgctctctaagatacattgaagtttcaaattactaagtttgccaactacaaaatctatactagccatagccatctcggttgctaattgggagagatcaacttggtactaagaacctgcctaggaccttttctactcaaggcatctactactacattagtctttccaagatgatacagaatttcaaaatcataatctttcactaatttcaaccactatctttgtctcatgttcaaatattttttaaaaatattttttaaaaaaatatttgagattcttgtgatcgatgtaaattttacatttctctccatagagatatcgccatatcttcaatacaaacaccatcgtgactagttctaaatcacgagttgaataactgttctcatacttctttaactgacaagaagcataaacaactatcctatcaccatgcatcagaacacacaccaaaccctctctaaaaacatcactgtatactacaaatttttcttgatctgatggaaaggatagagttgttatcaatcactgcattgattcttgaaaattagtttcacacttatctattcatataaatctctgattttttcgagccaattccgttaagggtgtaaaaatcttagaaaaccctttgttgaccgaggttttcggcaactaataaaatattataaagttagagagctgtaagaaaattagagaa

SEQ ID NO: 118407 - DNA, 1241 bp, Cannabis sativa
aacggccaaaaaagttcagaggcacgatttagtacatgtcaaagtttaaaagaaaaaattactagttagcctttaattactaccaagtaatttatgaaaattaaaaaaagaaagatgattataataataataataatcgtgtctaattttggcttgtgaaattgctgaaccaaaccaacgatcttttaccagttccttttctttgcacgaaatcttgactactcttttttgtaatataataatactaaaaacccatcaaacttcatatcataataaaaataataatgtaaattaatagaaataagaaaaatcccctataattagggagttcttttttatcatcaaaattaattaaaaaattatttatatttgtataatattatttttacagctaaaccaccaccgccaaacaccctcagaccaggtcccacactttagctcctctgatgctcagacacgaaatcaacgagaactacggtcacgtatgcatattcaggacgcgtggcgctatctgagacgtccgtcattttaaatatatccgcggcagttgttggccttttttgctaagtagaaaaagaaatgggccccacggcccaatcttagatgggccacgtaaaacccactggaacaaacctcgtggcaactctatatttactactctggcccactatcgttggcgtgtcaattactgtgtttctcacttgtgttaagccatgtgtcccatgcaattaagagaaccaaaatgcgccacgtggcaaaaatggaatttcctggaaccatacctggtgaggtgattaactgtgtagggcctttttggactttttcacttttttcgtttttttagttaatgttagttggtttggctaaaagggagagattatttattattttgtagtgattttgtacacaataattaaatcaaggataatgttgattgaaccgaccattattaattacatttggataacgttttaaattctgtagtagattacattacggggttattagataatgtttggattttggggtaagctaagctaagctaaagccaacctaatttccactcttaaaaaccttgactaatgactcttgccttgggagaatattctatttatattcattcgtattattttggctaattaccttattggtgaatcttttatccctgaaattttggatttggtgatggtaggtatggccttagtaaactttattaatataaacgctttttctaaaaaaaa

SEQ ID NO: 118408 - DNA, 953 bp, Cannabis sativa
ttattttatttaataattgaaaaaatatagatttttataatatgttggaaagtgggaacacgagcaacctggtttacatggttttggtaaagacaaattctgttcaaactttagctcagaaatagggaaagaggaaaccctagaaatcttggagacctgagcccaaatttattcatatattaatatattactaattaattataatttaatttattattatgtataattaatgtagcattgcatggcatcgagatctctgcattttgtgtcatcaaccaaatttttttaattcatcaatccaaacaaaggcatatcataataagagtacacacacttgttcatttatttattattagtgttaatgtcagtttggattaaaataatgtctgagtttaatgtttaataatttttttattattataagtttatagctttgaagaaaaaatattataaatattatcataatatcttattattaaattttatttttacaaaaaattaattcataatattaaattattattaaattttaactacgaaatacaaaattattattaaatattaccttgataaaaaattatggttttattttgtatcattttaaaaaataaattattcattttactatttagcaaaacaaaaaatccaattacaaaatacatgatttgaaatagtatttatagttattaagtattattaatactaatttaatcaaaagtgaacgtaattaacggctttaataagtgttttcttctgcttcttcacttaggctatgtacaacccaagattctactcattgactttctgaaacagagaagacagagtaaaagaaaagaaacacacaagagaacaagattccttaacgaggaacagaaaaaaccacagatacatacatacacatatatataatataaaatatatatatagagagagaaagagaagagagagagaaa

SEQ ID NO: 118409 - DNA, 665 bp, Cannabis sativa
  modified_base (559)..(566): a, c, t, g, unknown or other
tgcttttcttactgagtctgtcgactgaaaaatatgcttctatgtgtaggtaaaggcaaatccaagattgaactgcagtgagagtagagcatggtgaaaattgtacatatctagtcgtctaaacctggaaggttgtaatatttgagacaccgtcgacacctttttaattatgtcagctaaaacttttgagattgtatataatgtgtatgttttattaatagattttgggatcccaaattgtaactatttttcataaatattttatgtttagtaaagttttaattattacgtaaattttattaaactcatttttatcttaaaactctttgattagcaaaagttagtacactaattaagaaaatactataacatactttagctagttgggagttacatcaatgctccacttgattgatcaaaatcaacataattcttgttgtcttattatttcctatctctcttaatgtatgagatgagataattttttgtttaaaatgtaaaacaacaattttttacatattgaacaactagtgtagtgtaggggtgaaaatcggtcggnnnnnnnnggtttttaaaattttataaccgaccggacggttacggtttttattttacgaaaaccgtaaccgaccgtttagaaattataaccgtataaaaccgaccgt

SEQ ID NO: 118410 - DNA, 1313 bp, Cannabis sativa
taacactcgtactatttatgaattttttcgtaatattagtttattttattattaattttttgttaataaaatgtacttgttatattttaacaggggtaaattttttggattgagaaatagtaagtctccaagtcttcaaaaataagtttattttttaactttgagcaaccattattttttgctaattagttttatttttatcatcatcaattttcgtgtgcttattctcacttttatattagtatttttgtggttgtatatatttctttgttttgaagctttttgcatatagagatatatatttttaatttagattgttcattttagttgagattctaaggtgacatttttttaatcaagaagttttcaaagatcaatttttttacatgttaaattttatttcttgtaaataataataatagtttgggcatttttataatataaatttttcataacattttgttgtttgatgtgttaattctactcttatttatttattttgtaggtttgcttaaattgattctgtagaccggatgccatttttgggtagtcttaaattgttttgcttaaatttttgtagtaacttagttttattcaagttgctttttttcatttttttggagtgattcatattttgactttaaatatatcttagctaaacaattgacttattgactggaaactctttgcgtctacgttttgtactcaaatcactctatcaatatatatatatatagtacattttttaatgggtattacccattgataattattaaacaaattaaactataatattaattttaaaaatattaaattattagattttgatccaatgacaaataataaaagagaaatttcaatatctatgcttagtatagctacataattaaaaaaaatcaaaaaaaaaaaatatctctttttacactatatcaaaaatttatttaaatacaaaatatttaagccaaacttaacttttttttatttttattttttttaccaaaaaacttttttttttaatttttttccaactaatggaacaacctatatgtaaaaaaaaataagagattaaattaagcttaaaaactaaaatttactcattcatgggtaatacccgttaagagtatactcacatatatatatgggtgcactcttaatgggcattacccataaatgggtaaaattagaaaatattgagtttttataattaatttttttgtctaattaatatctcaatatatatatatatatattaaagccaataaaatgtaaaagattttgaacaatacacatacttgattcataaaaaaaaaaaa

SEQ ID NO: 118411 - DNA, 2421 bp, Cannabis sativa
ttggttgttgtttataagagtttaatttcaataaaaaaaaaatacttaggaaaagccgtatatgtgatgtgccaaatatttaaaacatttaactcttgtactggtcttaatgatgttttatcaactttttttagagcctctcgtgaggtaataaattttgtaaaatactaaattttgtttttccctaatacttctcaagacattaggaacatttttttagcacttttcgtattgaagataggccttttatagtaaatacatagggtttccttagtgtttgtttagatctaagcatcactcatttactttttttaaggataaagttacctttgtgcttcaatcttggcgttccaaatggttctttaaggcgagaaaagaaatcatccttaaaattgtggttcagaccattctagcatgtgttatggcttgctttagattgccaaacaaactctgtaaggaaattgaggttgcgatggctaagttttggtgggggtcctctaaagactctaaaaaaattcattggaaaagttaaaaagttgtttgccaatctaaatttgtggggggtttaggttttgggtcacttgtccatttcaaccaagctatgcttgctaagcaagcttggagaattttcaaataccctaactctttgcttagccttactcttaaagccagatattttcctaactcgtctactctagaggttgttctagtcacaatccctcttttttttttttggaaaagtatcctttggggtagggattttttggcctcgggtatgatctggaaaattagagatggggagaatgttaaaactactgaagatcattggattccaaacaacaagtttaaatgcttttgtgatggttgcacaccaacttcgaataaacttttatatttcattttaatgcttttggatcctgggatttgaataagcttaaggattactttgatgattgttatgattgatgacattttagatgttccagttattgggtaaggatgagctagtttgggaaagggagaattttggttttttttagtgttaaatctgcctattatctagctctctttggacaggatatcccttcgtcctcatcgtttcaagcttctaaaaaattctggagtaagatctagaactctagagtccctccttaggtgaaacattttgtttggaggattatctctagttctattcctatggctactttgctttctcaaaggcatattatttcctctcctttgtgccctttatgcaatcttgctcctaaaacgttacatatgctttgctagattgcgctagatccaagaaagcttggaagtcctcgggttttgatatttattataatatttataaacatttagatattatggattttatatataacatgtttgctacactgtaaaaagaatcagttgatctattgttatgtttcttgtgggctttatgaaatcaacagaacaatgtcttttatcagcataatgttatttctcctaatgaaatttttgattggtgtaatagttttctcctcaaatatctggatgcacaacacgtccgatcttatcataacaaaacaggcatcgagtctatttgtaaggttatagtagacaaacttataaattataattggaataacagcactcttgatgatttgttgatttgtgttaagaactcattatccttcagccatgggcttacaattgattatgttggtcgagagcataatgtcattgctcacaacttaactaaattaggtctagggttagatagtgtgttgtttagaatggttctttaccttccttttgaacctgttagttttgtatctcttgttctatctaatgaagcttcaagtttgtaaaagaaaaatatctaaaacactttatatttgttaatacaaatttttatttttctctaataaaaacttcatattctgtaaatataattttatattgtcaaagagtgcaatttcatatttatagtagagtaataatataattaattatgaattagattattctattgatgagatcgataataatcaagtgtttattggagctttgaaatataagtccatggtcccaagtcacttctatacaacattgtacaaggaaatattttaattttattttatgagtatgagtaaatttgagtgagaattaatttctattagaaataatttttaagggtaaaatagtcatttataaaaattatattttgaataattatgacaattataaattgtataattaaatattatttaacattaatttttatttgataaaattatattaactagttaaatgtaatattattcttaaatagtattaaagagagaaaatgtattatattagtgaaaatagtattttaatccttgtgaaataagagattaatgagagttaattaattattatttattaataaaa

SEQ ID NO: 118412 - DNA, 1047 bp, Cannabis sativa
ttttttgatgcattttaaattttattccattcatattcctattctcattttcattcttattcctatattttcattcctcccaaccaaacgtctccttagtgtttggcaacatggctttggttctatggtgtttgggtgtgtgggcggagtggggtggctagggtgttgcgctttcaatgatggtgtaactcatcaggttgtttgttgcaatatatagttagtctttgttttgtttgtgttttagatatgtgcttggtttttacttttgtttagtttgtttgggattattgttgcaatacttatgttttatcttctcatcctttgtttgactttagcttgtgtcttttgtataattcttcctgtagtttacattttaatttggtggtattatcgatagggccgatcctagaaataaatgggcctttggcgaaatgataattgggcctagaaaagaaaaaagaaagagaaaatttggggccttttaaattaaaataattttgtaaaagtaacatttttgcaaatcaattaacagtgttgtgaaatgatctatatattaagttttgtaatacttaacaaataaactgctaacatcgaccattatcacatcagtcagcgccaattgtataatttaaaataaaaataattaataattaaaaatttgcatttaaaatcattaaattaaaatttaattaataattaaaaaattaaaagtaatattagaaacttttaaatcattttgtttaataatacatgtggcaatgacgtaacaataaatttaattgccttgttaattttatgtttgctacttgtaacaaaactgacaaaaaagctacttaattataatattgtgaataattaaaggactatatttaaccattgaaaaaagaatcaaagggtacaataatgtataagtgattgttcaaaagacaaaaatcttcctttaaaaaaaaaaaggggacaaaaatcttaaatgacttttaaaaaagggtaatttacatggtgtactaacttttgtcatttttttacaaaaatactgccagacggtat

SEQ ID NO: 118413 - DNA, 3057 bp, Cannabis sativa
aaaaaaaaaaaaaaaaactaactgatgaaatacatgttttaattataatatagaatgtaatataaataaaattgagttatatattaacaacaaaagtgttactagtaataaattctcttctatttataaaataattaacttatatataatacaatctgttggccaccatacactaacataaatatagagttcatgtaataatttaatgttttgaaatccttttgcatatatgtgtgtacgtagtttatgataaggctctcattaaaatgcctcaaaagttgtggcaagtgcaaagacatgataatcttcacaagtacaagaacaacgatagtgaccagatttacacccacaatcgtcccatttctttttcttcattcccattttagccctactacttttctccattattacttcctcttcattatgatcctctgtcgaaaccctaaccctaatctccaccttcagtttagctaatgatggtactgcaccactaatgtatctaccactagtacggcctatattcacccacttctctaagaccatgtttggagactcatcaataacttccttccacaaaatctcagccctacccaaaagttgggaaccccaaaaactactacttctaaataatgttgatcttttttttctccaccttagctcgaaaacaaaactctctaattgcttaagttttgtgatcatgtccgtacgagtatggccacctgtagtgaaagaacactccaaggagaaagactcgttccaaacgtggttgccattgatggaaatttctttggttttgagcccaacttttctcttgtctttttctcctccattaacatagtacctcacaaatatgttacctttggacttgggttctacgtttattgcttctatgattttcagttcgaggctcatatgagaattaggagaaaccatgctctactatactcgtgtgtgttttttctttctttctttctttcaaatctcaacactagctagtatttatatagatgtgttatacgtagccaaattatctatagaagagcataatccaagagaatatttggatcttattgttgaaaataatactatattgtcatattggttgtgaagtgaactaagtaaaagattgagtggattattgaatataaattatatacgacctagctacatatatatatataggtcccttagattcttgaaggggtagatatattctaaaatgactcttattttaattgtttaaaagaccaattgtatatgtcaaatcttataaatatgtttaaatatgatgtgtgggttgcccactaatataaataatcataattaagttgtaggtagattcacaatccactaatacagtccggacacgattaaacttttcttctaaaatgggagtaggtgagtaagtaaaatatagtttatttagaattttgtatgatggtggttgaactattcacattattgtaaattgattttttattaagttttgtcacacgtaacaaacgaaataatgatataactgtctagttagttatcacgtcagtatcatgccaatgctttttaatttagttttacgtaattttttagttattaattaattttagtttaataattttccaaaaatgtatactttttatttttttttaaggttaaattatacacatagctcctgatgtggcaattagttaagcatctatgtcattattttatttgttatgtgtgacaaaacttaatagagaatggccaatttacaatattgtaaatagttacggactgaaaaatttagaggtacaatgatacatataatatgtcatactttaagggacaaaaatcctaaatatccaaaatatgtattggaagagaattacaatctcctgtatattacattatctctcaatctccacgtaaaatttatgttggattacttttttttaatttttttcataacagttatgttatttacaaaatcatctctgcaaactttttaaaaaaattatgaattgtttacagtattaacaacaaagtttttgattattctaatttattacgtgtgtccaaaaaacttcaaaattgtttttgatactataaacttataatttatcaaaaaatttacagaaataatattgtaactatataacaaaagtcataaaaaaatatttcaacatatatttccaatctaaaggttgagaaaaatgttatataatctagggtcatatttttatattttcggtatctgttcgtgttagaaattgtcttcaagttgattgtattaagaaaaaaaagttgtcgaaaattaagctcaaggtcatatttttactattttagaaaatatagggtcaattttgtcatttaacaaaacagagggtccaaacggtaacttttgtaaaacacatggtctaaaatagtatttaaaaattatatagatattttatataaaaaaaataaatttaaaatattatatatattttaaaccatatttttaatttaattattatttattttatattttaaattgaaatggttgtaataaaggaattgattgctttctgttttagttatggtaaacagattcacacactatatttttcgtaaagtttgagaataaaaaatatttatatcaaatttacgaatccaacttatatacacatatatacactcaaaattagttatgtgagttttgattaagaatatagtaaattacaatgtatgcatgagatgcgttacttaattaaaaaaaaaataaaaatttaaaaaatgcgtatatataatcacattcaaatgacacacaaatgtaacaatagttaaaaaaaattctaaaagatcaaaatctcaaacctcatttcaaaaattaaaaaaaataaaataataaacatacatgtatattgtacttaacatcactcttaattaaatctaattaaaaagaaaactaattatacgtgcattgtactaatatcaacataataataataatagaagaggtttcaatggttacatttttattgtaaccatcatggttacatttttattgtaaccatcatggttacatttttattgtaa

SEQ ID NO: 118414 - DNA, 1326 bp, Cannabis sativa
aaaaaaaattaaaataagctaataccaacaacacaatatttaacatttctcttgtgtaaatggtattgtccattagattggggaagatacgtggacattacgtgtaactacttacaaagtttacaacaacacaatcaccaccaaccctatgggcaccacctaccacaaaacatatttgaattcaattcaactctaaaccaaacccaataaattatgactttgcattttggtttcagtgtgcttttgtatagcttttttatttgaacaataaaatattcaaagaaaaaccacacataaatatcttttggttttctataaattacaaatttaaagagtgaatatctttatggtgtattagggctagttcgatacagttatgctgtgggaaaaaacaactatagcaaaattgtggaaaaaagttaagctaagtgtttaataaattataaattttaaagtattgtgagttgttaagatctattataatgataatgataatgatataatctagtttattataatcacaaatatgtaagaacatattttatataatagtttattttttatatatttttaattcttttttcaaatataaatttatatgcatttaataaaaataatttatagtatttttttattctgttttatcaaatgtaaaaaaaaaattagaaactcaagtatataagaaaaattctaagttgatgttctttgttaataataaataaaatataatgagtttattttaatttattttaatttttttaatatgttataaataagtaaatatgtttagtaaaaaaaaattattatagttttttaatcaaaataactttttctaaaagttgggttggaacagcttcaacttttagctgtagttttttcaaaaattcttcaaaaagctattttttgactgtttaccaaacacatttttatcacagtttttttaaaaagcagattttagtttttccaaaagctataccaaacggaccctagatcatttttaacagagagctataaatgtagtgcattattattttttagaatattttgctaaaacttaactctaatagtgatataaaatgtatgccaaattcggtcaaaactaaaaattgtaccaaatttggcacaaaagaaagcatgggccaaattttaacacacaataaatactatcttttttaattacctgtttgccacttattaatactattcattgactttgaataagacatattaataagatttaaataatataaataaaattaattattttgtatattttgaatgagcattaatggtaatattgacttttataattacagtagaacctct

SEQ ID NO: 118415 - DNA, 874 bp, Cannabis sativa
acataaactaacatactcctatgatttggggccatttactataatttccctttaaaatgttaatgttatactatataccataaattgtagcatcatatgattcatatcacaattttcaggatttttaatttcaagcaatttttagcaaatacaagcttaataaagttgtataggtttcaactatcttggtattatggaagttataattaccagcaatttagagtactcccaataatttttttactttatctttaaaatatatcaattttattttttatactttacaatatactgttatattatatcatacattagattctttaaaatatatcactagagtctcattttttttctaaattttattataatttattcatttcaagtatataatattaatatatactatctctatgcaaaagtaattattaaaacttaaaataactaataaaataagtttagagcaatgaataatattttataaatgtagaacacgaataataaattttaaagaaactttaaatgaagaaagaatttagagcatctaccatagcgtatttttagtatggttctatgaaatttttaaaacttttctattttagaaaaacttgtgagtattcttagtatataaggctcaatttttgtatgtgagaagcaagggagggtggtcaaaggtgaaaaaataaaatatggacttttgaattatttaccaaatttatttcctcctctttaatttcattaaattttattatggtaagtttctccgccaaatctatatataatataaaggaaagcacaagaagagtttatgtgtcattttataaaattttcttcctatttttcttaatttctaacacattttcttattttgtttgaa

SEQ ID NO: 118416 - DNA, 1616 bp, Cannabis sativa
tttttttttttatctaatttacaacgattatgaaaggtggacattttccatgcttcatatatttttatctaattggcaagaaatagcatgcaactacattcaaaataaaataactgccctatatgatttggtctttgtactctataacatacgattgtcaagatacttgattgtttgatgtgagctcctcgagaaattcgtcaaccctaggaggcatgtcttgggcacatgttcctcaaattacatactgattgtattttctgaagtaatgaataggagcaagcttaagcacattaagcctctcaacgttcacaatgtcaacagaaagaatattcctaaatgccttaacaatcttagcatcttctattatatattaggaatatgttgagtgtctccgcatttaatgttgtaaatatttgtttactccaagaagaacatgcataagcttcatattgtgaggagactatttataccttgactcttaaattcaccaagttaatttattccttttgtcgtacatgtgtcatgcatccaaactcattatttactactcaaaatatgggtataacaattgccccctaaaaagtatttttaaaattgaaaggagtttttaataattatatagcgaactgagtcatcctttatgcttattgagtaagcttcatttctaggcgattgtacttttttgagaaattattcttgctcttatattaatgaatttatcctttcttttgaacagtgattatgccaaaacctgaattgactgaagttgtggtgggaagcaatcaatagtaagttaacttgccatatggagtgagggcgatcgcctttcttctttacgagtcacatttgaggaactgtggccttctcggctcagaccaatctccaatggatgtgaaggttttaaagtattcaacttggaattcattgccagttttgacaaaggaagaaggaaaagattgtgttacccgagttgcatttgttcaggcttatgttactcgggaagctgcccaaactcctgaaggggctacttcgggtaaaactgaacatttttatgggtggtcgcctattttccttagagttgatcccatatgtctcttcaaattctgtgatagccaatataacttttatatttgaaattatacagatctcatttcccataggtttgatagttggtattcctagttttatgaccaagtcactagtaacagcttgtattatggtattctagaccaatacagcttgaatgactattgggaatcaatttgggatctatctcccattaataccttatacatttttgaaatcacttatctagggagtatatagatactcgagtcgattctcccccaactaacattttagatagtagtttagatgtgatctttttgtcttgatatttatgtgcatagtcaatgctattgttgatctaactaattttgctttgtcaacattttgtagagatggttaatttcacagaagttcttcaatgtccaagtctgcccataaaaaagagaagaaaacgaaataaagacgatggaggcaatactacaaaaatggctttttactgcagttttaagtgacgaaaacaatttgcttctgttggtgtaaccgac

SEQ ID NO: 118417 - DNA, 2245 bp, Cannabis sativa
actaatggaatgggaatagcacgctcaccaggaataggtacaatatcatccccttgttggagaacccaagcaagggctagttgtgctggagagcactggtgcttccctgaaagggattctattcgatcgtaaagctgcttattcttgttcaaattctcctctcgaaagcgggggtgtgatgcctaatgaaaggaataatgaaagaaaaacattacgatcttatgcagagaaaagaagtccatcagaagcttttaggccgtgatttattatttatgttgtttagttcataaataaaaaaacaaggttctatgtgattcaattgttgagagaatttggcatcaatggagtttaccaactgtctttcatcacacataatttaaagatagaatctttaccaataaactattttctggtaaactttcaacagctgttctgcccccaaagaagccacgaccaagaggactatatggaactatcccaatgcctagttccctgaaacatcaaggttactctattagttcactcaagcaattgaaaataaagggttagacttacaccaagggacaaccaacacaattacacaaaatagagaaaataagctacaaaacaaagcatctaaaaacttgtctttgcattttccattttgaacaggaacaaaagcaaaatgagataacaaaatttaatgagacaagtcagaatctgaacaaaaacctgcaaagtgggacaacttcttcctcgatgtctcgagtccagagagaccactccatttgtaaggcagtgatggggtgaactgcatgtgctcttcttatggtgtctgggctggcttcagataacccaatatactttattttcccctcttcaacaagtttcttcagttcacccatctaaatttgtgaattttcattatataagcaatctaactcttacagtactgacagcaaaatgctattaattggaagataattatatgataatagcaaaaaggttaaaggacctttttctgaaggtttgtatgtaaaagtaagagtgtcacttacagtatcttctatgggaactgatgtgtcaattctgtgttgataatagagatcaatgtagtctacatcaagacgcttcagactaccctcacaacatgaccgaacatactcaggggtaccctttacaatcatacctgaattgcccattcctgctatgccaaactttgtggccaattgaactttttctcttggcaactgcttcaaagcctagacatattatggtaacaaggatttaatcacactaatacaatatgattatggggtgtatgagtatcaactcaattatgcttatggcatatctactctagcaattcccatttcagtttcttttttcgtaataaattcactaaaaatgagaacttatgtaccttgccaactagaatttcattagaatgagctccatacatatcggctgtatcaaagaaagtgatccccttgctaaatgcatatctgatcaatgagatcccttcctcatcagatacaggagagttgtagacaccagttagacccatacacccatatcccaactttgacacctgaacaactcacaatggtttttattatctgaaattagagaatactaatgcaaaaaaaaaaaaaagagcatctttagagctcttttgcactcaaaaagaaaaaaaagatccaatctacagagaaaaagtttatgagaagaaaggaaattgaaatggggcttacctcaagtccttgaatacccagtttaactcttggaatttggagcttgttatcatccgccatttggagtctatcttattttgatttcagtattttgttccctcgatcgttcaatattttaagttaaagtcttcttgttttttgcctcttaaatcccaagcacgttggatagtggaaattgaggctggcagtgttcgagttaggtggtaatgaatatttgatggtagtaaactggtagtcaatacacattcattttattatattaagtttttttttttttttcaattattacattaatattttaatttttaattttatttatttatttattatttttatttaaaaaataagatgtattcttacttttatttattttaaagaaattgcaataaatggccctaagtttaatactaacaataatcaatattccttttcaaaattttgattatataatcatgattatattttattgtgctgacgacattataatcatcaacaaatatatatatatatat

SEQ ID NO: 118418 - DNA, 780 bp, Cannabis sativa
  modified_base (50)..(51): a, c, t, g, unknown or other
aggaatggaatgaagattgtttccgttcctttccattccatttcattacnnccaaccaaacgccacctaagggtgctgaggagtggtagtctatatttaaaggcaaaaggagggttgttgtcatttatcattcttattttctcttattattttttaagtgattagaaatattggtatagaaatatttttcatagagcatagaaatattatttttatatggtagttcccggcaaaataggtgtttcacaaatatgacgttaaaaacgcgggagtcatttttcttctacgagtccatcgtaataaagtaatattatgataaacttgaggggcaaatgttatttctcgaaaaattgaaagataacggtgttaatttttctttggatacaggaaaggtcgaatcgtttcaacacccttttagggaccttacttagagtcttgtgcatcatcatctcgaccctaagtgagtgaccaacaccatcacctaggccctacttggccttctcagccaaaggtgggtaacaaacaccatcacctaagccctatttggtctcgatcctaagtgaggagctgctcactctaccaatcatctcggccctaggggcctcaacctcaacttgaccttagaggccttggcatccatcatctcagccttaagggccagagcacgcatcatctcgacccagatggcctcaatgtctcatcttggcccaaagtggggagtgcctcacctcagcacgtgcttcacgcaacttaccaacatgatctcagcatgtgttcctc

SEQ ID NO: 118419 - DNA, 728 bp, Cannabis sativa
taaaatattaagtatttatgccacgagtgtcgtgtcatgtcattttgtagtattgtgttgtgttgtgtccaaacttatatattttttatatcaggtcgtgctcttgcttcttaggattgtgttaattttatatcgtgttaaaaagtttagccatatttacaactctacttacaccatacacttttgctatctaatgcgacttagttgtggagccttcaactggattgagactaggtagaaaattatagaaactttgttgactttattataaacctagctttcactaggctaaaaaataattgacctaactttttttttttagttttttctttttgaaaaaaataggagctaaattctttcagtcaaaatattttagaatttaatcaaactatttaaatgaataataatattagtacttaaaattaaaacaaaaatatgttttcttaattattaaaaaattaattttaaaatatatttggttacaaaataaaatttctaaaatttaaggtcattatactaaaatatagggactaaaactaagggtaatttggtcatattcaaaaatattttgatcttacgggtctagttataaacttttccaatatgcaaagttcaaataaattttttaaacatttagggtttgtttggtacaccgtattataccgtattatattgtatagtattatattatattgtattttatgtaatatttttatttaaaaaatata

SEQ ID NO: 118420 - DNA, 1343 bp, Cannabis sativa
ggttgccttttagaaaatttgaagtttcttgttttttctccttttcacaaacttgcccatctcaaaaatttgatatgctatttatttgtattttactaccgatgttttcgactcaagttaaacccatttattgtccaagtattatatttcctcatcgttagtttcttcggttatttagttctagcttctttgaaaccaagaactgaccattccttcacccctagaaaactagacatgttctttactagcgtgtcagccatgaccgtttcgagcatatctacggtggaaatggaggttttctcaaatacgcaactcatcattttaaccattttgatgtttgttggaggagaagttttcacttccttattggaactttacatcaaacagttcatgttcaaaaaaaaccagtacaaggtcgctagctgcgatcatatcatttctccctcaaatccaaatcacgaaagcagtactcatcaattagagttagatatagttcttccacagactcagacaattaatgatttgagttgtttgaagtataaatcattaaaatatcttgggttcgtattagtaggctatctcttagtgattcatttctttggcgcaacgattgtttttatctatatgtctattatttctagtgcaaaaaatgtactgaaaaataaagggctaaacaccctcaacttctcaatcttcacaactgtgtccacttttgccaactgtggtttcgttcccactaacgaaaatatgatgattttcagcaaaaactctggccttcttctaatcctagcacctcaggttcttctggggaacactttttttccctcgtgcatacgattttccatctgggttttgggaaaacttaaagttgggaaagaaaaatcggagtacctgttaaggaataatggtgataatattgggaaccttcatttcttgcttccgggtctgcattgttggctggtgattcctacggttttggggttcatttttatacaattcgttctgtttagctctttggaatggaattcagagtctttgggtggaatgaatgggtatcaaaaaatcataagttctttgttccagagtgttaatacaagatatacaggagaaactatcgtcgacgtttccataatatctccggccatcttagtcttattcctcttcatgatgttagtccctccctctctctctttaattattcattttttctaaaatttttatcatttaaattcattttgatgcttttttttggtgccgtttggtaacaattttgttttttaattttttaatcacaaaatgaaatcaaaatttttgtttttaaaaaatttatttttgaaaaacaa

SEQ ID NO: 118421 - DNA, 2223 bp, Cannabis sativa
taataggtttaacaaaatttatatcatccacatttgtcattgaatgactttttataatcattaaatatatatttttttaatatttatattgtgattaaaaaatgcgtctttttcatttttatacttcaaaatagttttttcttacatttttacggaattctacatagaaatccctattgcaactaccgctccaactactttagaaaattctaattgtaaatttgaaagaaaaaaaaaattaaagagtaattccccttaaaaaattattattaatgagtatatattaacaattttataataattactaaattaaattataatgacttaacataaagttagtacactggcagagccacaagtgacaaggggtcatgtggggtacatgatctcattcaagttttgataaattatatttttatatagaaaaattttaaataatttttagtaattttatccttatataatttatatttatatttatatatatttttatttttaatatatttaggtttaccccataaaatttatatataattttttcatccttataaaatttttttaaaaaaatctccaacaaaattaataattttatattaatattccatatataaacaattttggcccctctaaaatataacatctcatcaaatatttgaacaccactaccccccctctctctctctctatatatatgtatatataaaagtatatatatatatatatcttatatttagaaatctagaaataatactaaaaagtattagtggtgctttacacatttatttcttgttatatattgttaattattagtgttatatgtatcggatcccatatataatttaaaaatatattttttaaaaaatattactaactagtcgtaaaattattggttaattttataaaaaatattaaccactactaatacctaataatcttaaaaatccctagcatcttattttgaattgtttcaagttttagagcctaagattattggtcaattttatatgctatatgagtgggtaaaaccttctacctatagtttatgatagctggtaacaattaatattatatatatatatatatttgaccttttattaaacattgaataaggttttttattttattttttctcaacaataatttacagttgacacaataaatggtctctcaattattatagccaccaaaactaaatgctgtagatatatacaaaactatatataattattggttcattcatatgtatatttttggattattgaatggttacactctcaaatatatcagtacaaattatagtgatggagacatatatattgattattattgaatagtattactttcttcttttatcacagcccacatgacaaaacaaaaataagaaaaaaatttatatatttatatatgtatatatatatatatatgttcaagtgtttgaaattttacgtaacttcaaaaaaataaataatgacacagtattaatctgtacaaaaaattgcactgttatgattattaacatacctttgctatggtatatagttccaaacttaatactgtttttttgattataacatcaagattttcttatgaaaaatgaaaaacattccatacataataatttctattttaaaaaatagtaattttgggcagaagactttgaaataaaaaataaaataaaataaattgcaaaattgggaacgtgaaatgaaccttaaaagtttaaaagataagaacataaaatatatataattagcaagaaaatgataataataataataattaatgttgaatttttgactttgccaccgtcactctatgttgctggattataggcttggagaaattaattaaggagaggttttgattaattgagttgagacagctggttttaggtaaaatatatatttaagaaattaatcagaaaaaaaaaagaaatgtttatatatttttttaaacaaaatatttatattaattatagaaaaatttatataatagatcaaaaatttagaaaaaaacataaaaatacatcaatatggaaaatttctctctttttaaacttttttatttaattatttttgattattttatagttatatcgcgaaattgatttttctgttattttcttactttttgacaagcaaaatgtatttttataattttaaaactttacaatagtatttttattaaaaaaaaattaatagctgtaaaattataaataaaata

SEQ ID NO: 118422 - DNA, 4317 bp, Cannabis sativa
  modified_base (40)..(52): a, c, t, g, unknown or other
ttacataaaaatattgcataaaatacaattcaatataatnnnnnnnnnnnnnatacgacttaatacggcgttccaaacgagcccttaatgttttatttagtatagattaatatattgcaacttttcacatgagagtttaatgcacgtatatatattagccaatgtatttttagtaaattttagatacatgacttgcttaattctgttaaaaaataataagtgaaaaaagtctattttaaaatatatatatatatatatatatattcaccaatttttttttttttgtggtagtaattttagttatagtatacgatagttagaggcagtttttcttagagattgaatttaaatattaaccatgcgaaaactggatatgcatatggttattttattttcttattttattgaaagaatagttagttacattacagtattactatattaacgtaaatatatatataacgacataattactagtataaatgaaaatgaagagtcagttggtcaaatctcttaacaatttataggcataatacatggattttttttagaaaacgactaaaataaatgaaatttctaacttgttgaatctgtccaatatttctcctacagtactgtcatgagaattctaacattttttattaattcaataaaaagttgtctacttgatctagctaataggaaatagtgaaaataaattaataaaaaaattatattacatatatttttttataaaaattaattaggtcaaaagtatatataatagagtataaaataagaaaataaaaatgttgatttctatgctgagaacagtgcgtaattaaggtgacttggaataaaagtagtttaaagtaatttagacggtggacctttattataggagttgggatcagaaaacattgggtgatattattgacctatatatcaacttaattcatttttcacatgagaatattcaatattgatgcatctaaatatttcattcacgtgtcctcttactttttgtttttggattactcatttatttattattgagaaagaaataatatcataggaagttggttggtttaggtaagaaattataattaattggtgacgtttctgtagggttacgaatccagcttaattgttcttgagtttagtgtccttagctaacacgtagtgtagtgaatgataataatgataatattaagcaaagcgcaattgtaaatctactttttctaacatattgactttaacaaaaaagatggtttatacgttatatcttaatatacatatcatgcatgatcaatatgtatgtatttattatactagctagtatacactacaataaatgtcacttctaccagcacagttcgctactgcgcatgtaatgaactgtgctggtaaaagtaacttttaccagcgcatttcgcaaactgcgctggcaaagaggtcaaaattttactagcgtacatttgcagtggctaaaatctaacttttaccagcgcatttacgtactgggaaaagtcatctttgccagcgcttttcattttatgctgacaaaagttctaataacaacattgatttgccaaccccttttgccaacacagcacaagtaaattttattttactagcgcaatactaacttttttgtgctggcaaaagtgacatatattgtagtagtgataattggtttcttatgtatatttatatgaatgatacagcttatgatacatgcaaacgatcgaaaatataagcctctaattaccaaataaatcggattatatataaaaagtcaaaatgtgtgaacttcttgaataattgaattttctcattttaaaagttacgtgtttattatagagagatatacatgcatatagctagcaaaataaatttgacgaaaatcttgatacgtgcacatataactctgtacatgtcaattatatattcgttgaaaactactttctattacgtataatgtgtatttgtgatccagaataagatcgaatttaacatattgtttatattactttataattatatttcgtttatttaaaaagtgtatatgtactattatatggtaaatttatatgacacaatcataaaaccagcttaaagagtgtatatatatatataggatccaatattatgtacaacatgatcatcgtcgtggccatgtttatataaataaatatttaattattataatttgtaggttttaatatacaccaattataatgatatatacatttaaaaagtttttgatactgctgttggggacaggggcgtagaatgatatagattgagagaattaggcatacaagggaaaaaaaaaaggtcaaactatataatttggaggaacataaatgtagggacaataaatatacgtacgtacctgaaaaaccatatatatatacataaatgatcatttatgactttatattattattatgatatcaaaagaataatttttgttgaaaattttctagattcctcgcgtgaatgagtttttgtttgttgccgacactaattattgatcaatcgaatttttaaatattataatcattaatttggtggtcgatatatattagagagcaggaacaaatgtcactgtttgtaagggtttggtataactagctaatattttttattaacatatgttagttgaaacatgtattgtggtgacatatacatatacaatattatattatattacatgatctcactacgtaagggtccttattataaggatcatatcacataatcacattgaatgattttattatttttatataaatatttgacctagtatttcatatgctatatgaaaggacgaggtttattggagaaccttgttatagctagcaaataagactacatatataatctatacatattataatgataaattataattaaataagtaaatataaataattggcagttcaaaattactatataaactttagaccaattaagctaagtttcaatgttatatacattttattttaatgattctcctttttttagcacgtattttctttagtatgtgattttctttttcatgcataagcattctttttatatatttgtctaaaaaaaagaaaaaaaaaataagaacatcatatgtataaacatttaatttcattcatactatcataaaatgaattacattttgttgttatattttttttttataataattaattaataatttattgaaacaggacatggacgtaatgtggctcagaaacccattcgaaagactaagcaaaaatgaaacagaagatttacaaataagcacagacatgttctttggagatccatggaacaagaaacatttaataaacacgggattctactacgtaagatcaaacaacaaaaccatagctttgtttgataagtggtactccatgaaagacaactcaacgggccttaaagaacaagatgtcttattgggcctaattcgtggtggcataattgaccaattgggcctcagagtaaggttcttggatacaaaatactttagtgggttttgccaagacagtaaggattttagggcagtcaccactgtccatgccaattgttgtagaagcatcaccgctaaggtcactgatttaaggactgttttaaaagattggaagaggtataagaagattatgtcatataaacgctttgctaataatgttaatgtcactcagactttcaaatggactggccactgggggtgttggagctcttggaaagttggtaataataagactagtaattaatgtgattaagaaacaatattaattaaagagtttgtaataataagattagtttaaataggttataggtttcattttatgtattgattggttgataatgtcaaaatccaaggctgaaataaaaaggaaatgagaaatgggtgttgtagtttatttgcttgtgtatgattcgcttgttacatgtttgtagtgttttatctctcatgtgacttactctttaagtccatttttcgctttattttttattaagatgaaacaaacttcattgatcaacttggtaggttacaacttgaaaaatcgtatttttgtatatactaatttatttatttaaaaactgcaagtaaaatacgattgtaaagacttgtagtaatagattgaaaatctgttactacagaacacagacttgctataacataacagaaacagaaataaattgtgtagatcaacttgacacaacagaatcatatgtggtatcaatgttctttcaaacattattagtccacgagatcacgcccagagaataaaattaattagtaaagtattaaagattacaaaagcaattgac

SEQ ID NO: 118423 - DNA, 1075 bp, Cannabis sativa
aaaaaatgaaatttccctttttttattacttcttacaaacaagagtgaggttatatataaaagttaaataaaatgtaataaacttccaccatagacactctaaaaaggggcatacagatgtaacctcattttttgttcaaataaatttgaatggttgttaaagaggctcactttattttcatgtgggctggcatacttgattttctctcttaatactatctatttaaaactaataatatttctttaaaaattcagtctctcaaactcaaacctcgtttgctttaccaatgactcatctcattttgggaaactgagactgcaaaatccccaactctagaaatagttaacaaaatcaactaattaggtgattttggtgtctaaattttccgagataagatgagttgtcggaaagcaaattgggttttgagtgtgtagagagagacaggttagagagagattaattttacagtcattattaagggatagcatcaagtgtgccagcccacatagaaataaagtgagccttttttgatgaccaatcaaatttatatataaaaaaagaagttccattggtgtgcactattttagagtgtctaatattgtagaaatttaccaagttttataagtaatacacatagtagggctttgtacatcatttccatgaagaggtcaggttaggttcctttggccgatcggagtctccttaggtccgaaagtcacttcttggctggccaacatataggctcctcttggtcggccaagaatgttggtacaactccttgagggctcgcttcactcctttcggttgctgcttgacggttttgctatatcttgtatgaactgttctgctattggcgggattgtactcccactacaaaaaattttacttactaaaagtaaaaaagttgtgactaattattaattattattcctatattgtgactaaaaagtccgtggctaaatgtattgttagaatcatttatttgtggactaatataataccataatcacaatcattaactatgtgcccaatatttattcactaccataatgggatggttaataattaataaat

SEQ ID NO: 118424 - DNA, 1346 bp, Cannabis sativa
  modified_base (836)..(850): a, c, t, g, unknown or other
ttattattaaaactttatttttttagtaaaattgtcctcaaactcttttcttagcaacttttgttttcttaataaaactccattcaaaggaaccaactaaactacaaaattagtagctacatgaggagctaccagggtaggatacaccaaccctcatagccctattagccaacaaatcagccatacaattgtctttcttttcttaaggacaaacttaaagtctatgaaatcaaagttacaaagtagagttaaaatattactaaagatagggaaaacactccagcagaggactagatgtttgctctgatgggccctgataaccttaatacattcagaatggatgattaccctctcccaagactattttattgcagtgttcacagccaaatatatgactctatgttctgcttcaaagacgtatacttgtgcaaaaaataaaatcctcactcacaaaagacctcaaaacctcatcatccttgactcatagcaattccaatgttattctctatcacatatgcatcagagaatatttcaatcatatcaaaaattatctatccaataagttggcatgttttccgactcaatactcctaacaaccccaaaaaaagcttgaagatttatgaaactttcgcctaacatcagtaatcatttgggcaatgttgtaagtcaccctttgttttactataacaaacaatagatgcatataatattaagaaaacttacaaaaatatggaatttgagtgaatttttataaaaataccgtcacacgattttttttttttaaaatactgtatttttataaaacacagtcaaacacaaagcagaacaactcaaannnnnnnnnnnnnnnctaaaaaacaccagtagaacaccaataaagcttaacacagtatgctgcagtatgaaacttataaaaaaaatacaataaaaaagtaaaaaattctgcctgacactatttttgtaaaaaaatagtaaaaattagtataacatgtaaattttcttaagattacatcattattcttaaaattgaagagccactcaaaaaagttcattgtacacttccattggcattcttctattcaaattccccagtgactattacacattaaggaaacacctcttattttcacaaacaactaaaactactttcttttctcagttatgaaaacacacaacattaaaaacaaaaaccaatcttcaacaaaccccaaattttcacaattaacctactatgacaacgaaatggttactaattaacttgcacaagtagctattaggaataagggtgttcatccgattcaatccgcacttttttggtcaaacaacatccaatccgcactaagtgc

SEQ ID NO: 118425 - DNA, 1676 bp, Cannabis sativa
ttccgtgaaaccgtatttttgttatttttttgttatttttgtgcatttgtgaaattatcccattttaaattgaatctctaagttatttattttttaatttttttggctcaccattgttttgaacgagtggctcatttgagtcattgtaaaatagaagttacataagtataaattggagggtttgagtttgacaagatatgagtgattctaccttataacaatataagtggaatatttttatcttgtaagtacattaatacacatcctcatatttattagaattgaagaaagaaagagtgacactcaacttaggtgtcaaatggtcatatgagtaatactacatctcaaattcgaatcctttttctttagaaaataattttggtgtattgggattgttttttcttcaccaatttatggtttaggtaatagatgtaggtatatcatagcaacctcagctcaaaatgggccatggcatagtgataatatttccattgggatgggtgcatatataattcaacaactccaactaccaaaaaacaatagccacttcatggttgtagatgtggtaccaatgacccctttttctattatggagttacatattttttggatggcaaatcttctcctttccataaccagaggcatgcatatgcatgcatttatgtaactcttactgagatgtcattttcatccagctacactctccttttgtaacctaataacctttgtgaagtactttcttgtagttatatggtagataggggtataaactttacctctaatcactactctatctcctcaaaatacatattcatgtgagtttcacattattgctcatgaaatctagatttgggagaacaaaacaactcaagaaacatagttctatgtatcccaaatcaatagtcaatggtcgataaattatcatgagcaaagccacgaattgaaagaaataagttgtgcggcccggtcctgatgcttgcccgatttcctctgaatggctttgtcagagctttctatcgttctttttgactgactaattctaaggcaaagggttgaaaaactcaacgccactattaaaataaaattttgggcccttactttaaagataaatagtattttaaaaaattatcaaatcacttttatttgccctagtccgtctatgcctagagccgacctggttgtgtcattagttttttctcctgtgttttaatgggaaaattagattctatgtgttgtgttaatgatgatatggtgttgcccccaagcaaaagttttcttcaagcgaaagtttaggccatttgaccaccattttaactacactaaataatgggggagtttatacgaataatatcatcacttggtaccaagtggtccccaaccagtatcattgagatctatctgtatatatttataaattttggatagtaatttaataacaaaattgcattaacgatactatatattattgtagtatgcactagaactagtttgagaacaaaactacctttgttcttgaagggatgaagctaaaaataaaatttaagctgacgattattactgttttcaccctttagtgctcgataaaaattttatcactacaccaaactactacattaattagtattaggggtgggcatccgatccaatccaatctttttttcctcatccgatccaat

SEQ ID NO: 118426 - DNA, 581 bp, Cannabis sativa
ttttttttttttttgtaattttatgaaaatacacataaaaactcacatagtaatttataaaacaatttaaatcgcaaccaaaatttacttaacaactcatataaaaaaaatactactgaaacaatttaaactgcaaatttaaaaaattaaaattaagttccgagtctcaacatatggtactaaacactactaataactaatataattctttcttatattgagatttcctttatatacgcttcgtatgaaattgtgtagttagtatatataaatatgttaaccaattagggaatatggtggaataatattttctgactaaattagcaaaaaaacaagaatatataaccctaataataaggatgctgaatctggtagatgcataataattaatattctaattgtatatatgcatattggataagaatctaagaaaagggtatggggaaaacatgtttgttgttgcaaccaccgccaaagcagaagcttcaattcttgaggggcctttgtggtttcatacatatacatatatatatatatatatatatatgcacacacacagatatatatttatatataaatat

SEQ ID NO: 118427 - DNA, 1283 bp, Cannabis sativa
  modified_base (64)..(92): a, c, t, g, unknown or other
agatctgagcggaaggagtcatttaattccgcttcactgactgtaaggtttctcaaactttatnnnnnnnnnnnnnnnnnnnnnnnnnnnnncatattaggatgttaaaaacatacatggtagcaaatctagatcctggtaaaacatattccaacacaaagcctaatctaaccctcatcacttcaagaaccgagtgagtcacaagtgtttccgacaaaaaaatgatatctagcgaaaactctttcacatgggaattaagaatttggaaggtccggtcattcccaagaccctgaaaattccaagccaaatatataattcataatgctcagtggccctggtccacagggtccaccgaatccaaaccaaccacaacatctctcccaaccacagcaggtaaaagagaacacattaccttactcagggtaacgtcactgacatccttaattatgtcaacttgcacctcgtgtaacccagaaggatcaacatttgcaagaaagcattcatcctttaaaccccgtttgacaacttttttggggctcttggatttcacctttaaaacaccatacttatccatcaaagaaacttttttagctttcttccttgcatcagaagaaatggacgtagcaccatgcaaatattgcctgggagccacatgtaaaatatccttatctcctttatccaccatcaccacactagtcgcattattaatcgaaccaatgtcgctaccactttcatccacctcaattccatgatccaaaacatgacaatcatctttagttttggataaagaattgtcaccacccctgttaaaggataagtgcacgtttggatttttcaaaataggtagggaattcggatcctgaacaatgaatgcatccgagacgggatgccaattaactgaatcttccaacataatacccttgcctttcccaaaaccatcactaggaaccgactgcagcacagccccacctttagcattaccaccgtccagtggccgaatagtcaagggttcactcacctttaccacgtgaaccacagcaccagtcgtagaagcgctcaaggcatggccctgagagcttttagagatctgtctagtaatcttgtccagaaaaggaacctgaatccaatctccatattttaatgatccttaccaccaaccgaactcaccttcaaaagacattctttaaaatgatgacccaaaaaacctcaaaaataccacaaatgtggaagtcgttcgtgttgggttttgtgcccttaataaaaccctttacaatctgattagt

SEQ ID NO: 118428 - DNA, 965 bp, Cannabis sativa
tttaaagtattttttgaaaaaatgccatatttaatgcaattaagtttgcatgccatatttatcaaaactttaattcatttttccatatttttgtaaatagccctaaattttattacagaatatttgttaagaatggaaaattaaatataatttcccaaaaaagaaggaggctctaaatgggtagatagggttgggaggcccaaagctgcccaatgccttatctaacttgcaattttatttttgttttaaaaatatcctacttttttttttttgaaacgttaaaaatatcctactttaactttgaattcttattatttttatagtattttaagatgaagatgccaatcaattctaagccggtggactatatgcaatattatatagaaataattattaaatttaaaagcaaggctacatgtctcattgggcagtgcatggaagcatgcatggcactagggctccacgtatatttcacttctgcctcactcactccatatccgacaatggtttttctctcttgtttttatttttaacgtttggaccaacctatcttgtttttaatgttgggttttctctcttgttgccactataactaatttttattaatttttttaaattagagtatgatccaacgttattattagaagcatttatataaattggtgttcatatattcaaaaattaaatttgaattccaatataggaagaggttagacattgtagtcatattcaaataaaattttatgaaaagactgctcaactgtgaatgttgttttattaattactagctagctagctatagcaaggctgtcacgggacggtgaagtcatttatagttagccaattgattagatatggtccattttgggtaagtggatgaatatggattagtcttttttttttttttttttttaaaaaaaaaaaaaccatcatcaaaattttttttttctctattttacgttaaa

SEQ ID NO: 118429 - DNA, 1948 bp, Cannabis sativa
cagtgaggatggcgagctcgaggtgtggattacatgttaggggattgtgacgatgttttggtttaagaatatttctttaaagattatggcttgattactttttgtaaaaaaattaatgcttaaaaatttataagtgaatcaagtgtttttgttttaaaataaagagatctcatgctttagttattttcaataaattagtttattgttattattataaatggttttaaacggactagcaagtgtgacgtctcgggaaatcagggcgttacatttgttaaccatttttcccaatacatttacattcaacagtcaaaattttcttagagcatatagcgatgccaaggtacctgaatggcaaggagcttcgtgtgaatccagatgcatccaggatcctatatattaacctcaacttcagccatgctagagcggtagattgttgtctttatttcattaggcagcaatcgtgaagttgagaaaaaatgcttcaggcctttcgataagagcataattgataagaatcttcattgctcaacagaacaagtcttctacaaaacacatatggttcagtttcagaattgaacatctatcatggaatttaaaacctggccattccctaactcttcataaaattcaagatagatatttcattcctagcacaaagagtaagggagacatgggatcgccttgccttagtcctctctttgcattaaagaagccccatatagaaccataaaggagtaagaaaaatttagaagttttgatgcaggtcattatgagctgaataaagtaatgagataatccataagcataaagcattttctcaataaacccccattcgataatatcatatgtcttcctcagttcaattttgatcatgcagctaggtttacaatttttccttccatacagcctcattaggtcttgacataccattacattgtgagcaatgtatctaccatatacaaagcctttctagttcacagctataaaatctaaaaacacttttctcagcctattacatataacttttgctatagtcatatataaaacattacagcaggagattggacaaaaattagatacattcacaggacaatttgtcttgggaatgagtgtgattgtggtagtgttaatctccttgcaaatttaccatgagcttaagaaagaaagaacagcattctcaacttcaaagccaaccaactaccaattatcttgaaaaaatgcactgccaaagccatcaggtcttggagatttgattccaagaattgagatgaaagcttctttaacctcttgagctgtgaattttgcctggataatatttctgtgcaaattagtgatctttggaccaaggtccacaactgtctgattaactctaagtcttccatccatagctatccccaacaagttctgataatacatcagaaatgcttgttgcacacagttcccatgttcatctataatatgtcatgggtatccttatgaatgggtattattagaaaaatttaagcatgttttatttttgcattatatggttgaagttgttttattatgccaatagtgagataaaataaaagttagatttaagttagagagaatgataaatgtaatgctaaatataaatatatttttggtatgtgtagatttttataattaaatagtaaaattaagtacaaaaactctaatttttcttttattatcgaacattggattaaaatcttatttttaaaattgatatttaactatagttatttttttaaaagttctcatcaataggtaatacctatttgataaataatccaaatatattgtcaaaattaagatatacaaataattttgaattttatgtagggatttgttttttcaaaatttacatttatacttcgacaatggagtttttgttataagtattattaattatgtggatgtccaaatcttttatttattacca

SEQ ID NO: 118430 - DNA, 2538 bp, Cannabis sativa
gccacaatatatcccaaattattagttatatgcatatttcacatacagtgatcagtgagtgaatatattaatgtttttgttacaaaactgataattcaagaggcgcactccactgttatatatcccatggaatcttcacaaacagttgtaattataaaagacgatagataataaacaagcactgatcatacatataaaacaaaacaataaacaataagtgtgtggattcaaacatagcaaatctatatttgttgtataacaatgtcctgagacctagacaataaaaatgtagctaataaaagtaattggttttagtaagctcattcgtaaaaaaagaaaaaaaaaatgttatgctcattattatatggcgaaatcatatataacttatacttgaaaataaaaataaaattgaaaatatgagtgtaatccaattaccggccaatatacatatatataaacaagacttacaagagtcaaattctatatatatatagtgtacttttttaataagagatataaaagaacacgtagatttatcaccatatatattttgaaattatgtgctccttgctacggaaattatacattaattaaatagctagtttcgtttccaatactaagggaaaacataataatttaatcaaacaaccaggggatcggttttatatttgcttttaataataagacacataatgtacatgtagacactagtgttatataggtccaggtgtatcgaaaaataatcaaattatatgtatgtcatgatgttttcaaataaatgtacaatgtaagagatctttcaaacatattttcaatttttcaacaaaaacaaaaatgtatttcttagccctatacatagtttatacaatgctatattctgagccctagacctgtatattattccagagagagatatatattaattatttctcatttgtactgtcgataaatgttattcccaaacaaattaaattatataagccctaagttattttcattttcattactcctttgatacattaatattaggttataataaatttaagtttatcgtattataaaaatgaacaaccaaaaattagttaagtagtatatatacctggtgaaaaagagtttaacatctttctcagaaatagggtaccctttggaaaaagtgagaaagatagtcctcaaatcaggatcatcatccttcttagtaccatcattcagttgcaaactgtccaacatctctctcatgaaatcaaactcaagttcaccatcatcaccatcaccatcaccatcaacaccaacatcttcatcagctttgaaactcctctcctcattcttctgataatgatcattatcattatcgaccatttcatcacgaacaatcgcagcatgataatcactgtaagtagtagtattaacagcattagcagcaggccgagttggcatgacaaaatcatcaaccgaaggcaccattgatctgtgttgataaggataacctctactctgaaaaagtccagcaggaaatgaagtcggaatatccaaagacctataagcaaaaccagccggtggcatcatcatcatcatccgattcatattgttaagccatctccttcctactcctcctccatacatagcctcaatagcctcactcatagccatattctcaaccatcttcctctcagtcacctcagctatgatgtccgtaaaagcccgagcacaaaccctattgctcatgtcagcgacgccccagatgactcgaagccggatcttgtaaaacacttctaggctcgccgtgcaatcgatcagcatctcgaacatcggtagggctggggcgcggggacgaagggtagcgccggtggtgttaggaataatggaagaagcgaaggggaaatgatctgtctcaacacagctcaagacggcttcagattcattagcaaaggcaatgagaagtgtttcggggagagcaatgacatatttggagatgagatcgtaaccactcccacggaagtagaagagagtgtgctcgagccacatccagagagccatgacttgagatgagtgggctggatcccggcgcagatctatgacgagacgacggtagagaagtcggtcaaccctgtggaagatgttgaactcttcttgagagacagaggatgaggagaggaaggaatccatggtgatgattgggttttggtttgggagaataatgatatatatatatttgtttgttttgtgtgtgtgacgacattgttgttgtttagagtgttttatatatatgttgaagtggggaagggtttggtgggtgtgggttcacaagggtttgctgggagagtgaagaggtttccatacgtgaccaaaagctgtattcaatcggtgctacctgaaatggaagatatgtatcacagacagtagagaaaaatccaacttttttcttctttcctttcttaccaaaataataatataaaaattaaaaaaaaatggaattattattattattattattattttataatgatatatatagaagaggtttcaatggttatattaaat

SEQ ID NO: 118431 - DNA, 1430 bp, Cannabis sativa
ataaaataaaatatacaatgtaacatttattttaaaccaaccaaccaaatttatttattaatataggacccacatttatattatgtgtgtggtttaaaatgcatatcaacaccacatggtgtaaattataaaatagaatgtacttaatattgttaacctaagccctataatatgtgttttattatgtgtttggcaacatagatttatttttaattttgtaaaataatattccatattttttaacaaaatatttttctagacacattgtacaagctatcacaaacaacttattaaaagatctacaaaattcttttaacaaattccacatttgatcaaaaatacaattttgcaattaaagttaacattatattatatgaactaaaagcatataaaatagtgatatatatatatataaatgaatagtagtagtgtaaatactcacagcagaggtctggaaagagatgaaagaaacaaagtcatcagaggtagtcttcctagaaaatggaatggaaccatttgagcttctaagtccagaaaattctgacaatccctttccactggcctatacatatatatatatatatacataacaaattaatgtaacattattattattattagtatgattattattagatcatttatcatataaatataaataatgtaaatgtacctgaagagatggtttggccacagaaagaatagccgaagccatggttggttgtgttgatatgggtattttttgagctcagaaaatttgtaaggttgggtttttgatatatatattgaatattatttagaagagaaaagagagaaagagaagaaggggtgtgactgaaatgaaaggaagaagggattagattatggatagcttctcatatatttgtatggctgtggttactcatctccaagtccactccttactcttatttttctcacattattattattattattgtttgttgttgttgctaatatacctcacatgcatacactaccactctttttttcttctattcaatttctttctacagctcaggattgtcattgattgattgctttgctttctcgatcaactttttgggcctattctcttataaaaaacaaagaaacttgttgggcctaatcattggtgggcctaagcccaaaaattgacactttactatttgtcaatttttcatcaacaagtgctcttattgggtcacttgcaccaaattacaacatgttgtgtcatgtttttctttatttttgacattgggttttggagatcgaaaattcgaattgggacattttgtttgtgatgagaagtatagcattacccgttaggacatctctaatggcttcaacaaaaacacaaaaatagttgtcccattagtcccatttgatgtcacaattttttttaataataaagttaaattttaatataattt

SEQ ID NO: 118432 - DNA, 1201 bp, Cannabis sativa
cgtagcaatgttgtgtataaaacagtaacaaatgtgatttatgggagattgaagaatatccttccaactattattgctcaaaatcatgggggatttgtgcatggtagatacttcgcccataatattatgggctatcaagacatggtcaagaactatggtcgcaagaataccattccatcttgcaaaattaagatggaattaaagaaggcttacaatattctagaatgggattttataaatgagttgttgcatgcctatgcttttctggaaaagttcattaagttgattatgaaatgtgtgacaacaccaaaattctccattatgataaatggagttgcgaatgatttcttcaattccaaaataagttgagacaaggaaacccaatgtctcccctccctttagttctcagaatggaatatttatctagattattgaaggaattaagttgctacaagacctactttcaaatttcatcctcaatgcaaagaattgaaattaatacttctttgctttgtcggtgatgtgttcttattcagtagaggtgatcttttttctgttaagctcctgctctgaaccttcaagctcttttctaatacttaaggtttagaggccaatcaaagcaagactattatttattgtgcaagtgtgtctaattctaaagtccaagctattcttattgttctggttttgctttaagttccatgccttttaaatatcttggcattaccttatgctccaaaaagatatcaaaagtagaatgtgatagcataattgaaaaaatggtggctagaatgtgaatatggagcacaaataacttatcttatgtaggtcgatgtgttcttattaattctgtgttaatggctgtacatattcttatcctaaatttagcacaggtggcgtggcacttagcaaaataacacatgtcacacatatttggacctaggcggagcatatctttattgtatcatccagatcgattctaagtcgaattgattaaagcctgatcctttagcaactattatccgaataggccccaaagctcatggcatgccgaatagacatgtaggtcaagcagtgccggcatttgccgaccagaagtacacgctaagtgaagatatatatattctaagatatttttttaattgcttccccaattatagtgaaatgtccccacttcaagcctccattgggtccttacacc

SEQ ID NO: 118433 - DNA, 1268 bp, Cannabis sativa
atggtcttccaccatgaactagattatttcattccctccaaatgctcacgaaaataatagcatccccctcccaaaaaaagagatggaattgaataccacctggtctatgtgtgtcaacagcaaactagtccagccagcactcccggttagcctttttggccatatttgttctaatctgccaacaactcccaaaccacacagctctagcaaaagtacattgccaaaaaatatggagggagctttccgtttccaaggaacaaagcggacaattagaatcgagaatggtgaacaaactaccaagcttttccttggtgaggaggcaattagcgagtattttccaccaaaataatttaagtctatcgtgtattttagatccccaaatggttctctattttttatcactaacagcaataccttcaagattcatgataactttgtaagctgattttatggaaaacttcccgttgggttctgggagccaaagccaagagtcttcccgcgacatgttgaggagagatatattaagaattcgctttgcgtcctccttgtggaaccaatgtcgaatgagctcttcattccaacaaccaagtgtgatgaagttgcgcaccaaactcattccagtcgtggcatcatgtcggggtgtaggttggaggttaccccccgacacccaaggatcaaactaaatagaagtggatcttccatcccaattttttgacatagacccttaacaagagagcttctagcacgaaggattgattttcagatgagtgagccagtagatttagtctccaggtcaaggaagcccttgttcttgaagtatttagcttccacaagttgtcgccatagacagtccttgtccgtcaggatttttcaagcccatttcatgaggaaagccttgttagtagcttcagttaatctaaacctgaggcctctatttacctttggatgacatagagtctaccaagcaatcggatgtaaccttcttctctcgctatagatagtgactatttgttcacttttgatacacctagttgaagccactagttgtgtggttagaatcttgtgatgatatgctcgtatttagatactagactgagcatataaggcttaaaaatctttaagagcatttgtagagttttcctaaatatctatgtgagagaagaaatgacttttagaacaaatgtatcaagtctattatgtgttcttaattgttcttcttcttctttaattattttgtaatcttttgtaatatatttatatttattttt

SEQ ID NO: 118434 - DNA, 1256 bp, Cannabis sativa
gagaaagagatgtatatcagctgggttctgagtcctacccacatgcaacccatcattacagctcagtgaaatgggttcccatagcaatttttgcttattaacatctcttatatattgtcaactctcatgcatgtttttcttcaccctttctccctgcacattagtttataaatattgtaatgtacattaaaaaagaagaaacataagatttctttaaaagatatgatcatttaacaccccactcattttctattgcaacaacagcaaaattatagtagtgaattaataaaatcaattgaatacatattaattaccaaaatttaggactcatgatgagattgagatctgctgtagttactatatattaattaggctggactttaattttctttattgcttgtttacttcagtagtatatataagagaaatgctaaacgcatcactaatgctagcacttatatgtcaatatcactagtattgagtttcatatagtttaatataataacttttagagagtattgctaaccaatcgcaacgcgacatgtcgagaaagtactaacacggtgcctaatagcaatgctctatatataattagtagtaattattacttctttgtatatttgaatttgggggcattattattatatatataaaggctggctcataactaagtttgttttagtattgatagatctgatcactctctctcttctctcttctgactgctgtacttatcagagaagttaagttggtgatcatgtggtcttaatctttaattctattcaagacaactcttaatggagagattgagattttttatttgtctttattagcaggcctctctaaataacagattagtttacattaaattcattctgtttttcttaccgtttataaggtatatatatttttgtatgagttatacaaaaatgaagaatgttcaaatgattctgtaatgcttaaataattattaattagatcttccaacgtttaaccaactaaattataagaccattattagcttcaagtacattgttcgtaaatgtgacatataatagaagtagaatttgcttgtgaaatgccattatttatttgatcatgcatgaatgatattttttttcttaattttaacattaaagaaaacattttcttcaaaacttacattattttttttgcctttctttcagtgagaatttaataaacttgaccaatattattttttataaatataccaaaggaagaaaaaaagttttttt

SEQ ID NO: 118435 - DNA, 1104 bp, Cannabis sativa
attttttctcttctccttcttcttactttctccaaatgttagagtaaaaatgaaaaaaaaacaaaacataaactgtataaaagtttaaatatatgtctaatcgtatttttataaataaaacatataattttggataaacttgtaaaaatccctatttaaaattattttatttctatttgttaataatttttttacatacaataatttataaggattaaaaacttttaaaaaatattgggggtcccatagcactctctccacccgtatctccgtcattgcgtgaaggctccttgggacagggagcagcagttttatagagacactcttggctagctagttctccacatcaacatgactgatcgagctattcctccctcgaccaatcccaaaccgatttttggcaggttccagtaactcatgggtgtggagcgaaaggcccaaggcccccctgtaagtagtttgcagatcgcttccacaattaaaaactaatgcatgtatatgcagcaaatataaaaaatcatacgtatattatatagtcagttacaaataatttgatgtattatgtattatgtaaggtgaagtgtttcgagtcccattccatacaattaatatgcattgttggtatcaaaaaagaaaagataattcacggaggatgacaatgtgtattgatagtcgtgtaataatttaagatcacaatctaagtattctttccccattccccatttttaagatatgcatcttttatcgaattgaccttagtgtggttaccactagctagatttaacttcgacatcggcaacaaaacccatactaaaccaatacatgtccaacacttcctaaaacttcaagttcaatccatacttcaaaatgccacaaatcaaatttgattcaaaatttgatatttttcaaaaactctcctaagaaggcttaattggatataacttcacaaactcgcccaaacccaaaatcaaaacttatgtaacaatgatccattacaccaaaaacagtagtatttatatgggctatttataaaaatatggaaaaataaagataggggtaagttgaaaaatatcacttttatcaatcaattaatcaaatttacct

SEQ ID NO: 118436 - DNA, 2312 bp, Cannabis sativa
tggctgcaatagtctcagcagtcacaagagctctttttaagtcggaactgtacacaactgagattttgggctcctttgataacctttcagccacctaaagaaagcagaagccaagtacaattcattcagaagtacaaaatctaacttagcatttttaaaactccttcattgagattttcagttagcattataaaaaagaattgccagcttactgcaactgcttgctgtcttccagcatcatttaaatcaatatccaaatgaccctgttcaagttaaaaagatatagaattaaaacagaaacccatgacaagaatgcgagaaaaagaagaagaaagaaatcagagttctagagaagatactgaatgcaaaaaagaaaagaaaaaggtagatatcagagagttttcaagtaaaacatatcagacacccaaaccatactagcctcattctataaagtaaaatgtaaagtaacaactaacaagtagcctgtacctacgcgatgttattgctcaataggagcgtaaatgaaagtatatagtcaagatattattcgaaacagtcacagtctgagcttatcagagaactggtttcacatttcagaaacagttgcactcagcttatcacagaaagatttaattctggtctcacatttcaaacataagcatgctgattccataaatagtgtagcaaagctcatattgcagctttactttctaatgactaatttttacacataaatttgatataaccaacatgtagctgtggcgaaatcctatttggggttgtctattggcaaacttaaccagcccttacaagaatttgtgtcatgcataagtctggtcatataaggtagttcaagcttgacaaaagtgtttactttcacactcaaactttttgcaagtgatatttggaattcgaatgcgaaaatgtatacttccttataattgaactttaaacacaagaactaagaaagaattttggactgaaaagaaccttttttatgcacatattgtaaattacatacgttcactacatttaaaaagtcaccgacaactacaaacgaagcttatattaataaaaatttcaaaatcatctcagctagctactgaataataaaatacctgaattcttccgtcgtgattccactccgtttcaccatgacgcaccacaacgatttcagcataagcaggaatattatcgcagctgcattggtaacgaatatgaattagattataatataaaaatttcaaaaacgaatgtaatgtgccggatttcagaacaacaataataaaatatatataaaaaaaaagagggaacatcataaaatactgatcaaaattaaaatttaaatcggcaatggagaattttcctagaatcttggaccgcgcagtgctgaaactaattgaaaataaaaaatattgaaaaaccagaataattttattttcttgaaagaattttgctaaaaaagagatcggacctagaatcggactcggccatggagaattcgacctttctgagaaggtgagttgagcagcgagtcaaagtcaaggtcgacgatacgttacggcggagaagttgatgaagtgcgcggaatctgaaagagttgtgaaagaaaagattgggtgagctttgcgatttggacgaggacgaagaagaagaagaaagtagccaatttgcagtgacagggagacaggtgggaactgctctcattttctgagttcaaggacgacgtcaatatattattattacgcttatcatttttgctcccaactttcacatgcctttttaggagtagtttggtaagccgtattgtaatatattgtattgtattgaattgtgttatattcaattatattaatattatttaatagaataaaaagatatttggtattgacttgtattaattgattatgtaaagttataatatatttttaatacactcgatcccaacactaactataggtccgagtcccaggtcctgggtagcaggtcggggttcggctacaggcccgggcccgggcttgggttcgggtatgggtctcgggtccaggtctgggtctgggattccgggttcgggctctgggcccgagtcccgagtttgggtccgtgtctgggtctggaccgggcccggggtcggggacgaggtccgggtctgggtccggggttcgacgtccggggtcctggtgcgagtcggaaattggtgttgacaccaaatcttttgtaaatattacaagttaatacagacaatttattatgtattaaataatacaacatacattgtattaaaaaatttagtcgtaataattaatacaata

SEQ ID NO: 118437 - DNA, 866 bp, Cannabis sativa
atatatatatattttaaaacaaaatcttacaaaaagagactacaactttatctaactccaaaatcttgtggaatactgcatcaaaattttactaaaactcaatctacaaagccatacatagacgaacaactaagataataaattcattaaaccttaaacttatcaatgttgttcttgtaacctgtcaactgctcaaatacgccaagtagtgcaccaatttcattttcttctcattgtttcttacgtttctcgcattctacacatcatcataggactcaaataagtatcaaaacagataagaacattgcattcactcataaatacatacatctatatgaaactgaaaataaaaataaaaaagtttagctatcatttcgtaagtttcagccaaaaaaaaacgaagaagaagaagaaatcgtaggtacctgtaaagagatcaaaataccaaatttctgggatcactttagagtcgaagaaatagggtttagaattggtgggcttggggtcggagctactccatgctggggggcgttggacctccttaaacttctcccctacccctgttatagcttgagtcatcttcatcagataaggttttctatatgtgcgatgaaacgacattgttgaggagtaaaaaggtcggcggtgaagctaggattgcagagccagtgaggttaagaaagatcaaatttcaaaattgaaaattgggaattagggtttgaaaattggagttcgctaaaaaaactgtaaaggaaaagggaattttaaaagtttatgtactcgaatgtcaattattgggtgattctacaatgcaccccgttaaaaggatgtactgatacacttttaacttgtttcggcattcagaa

SEQ ID NO: 118438 - DNA, 1191 bp, Cannabis sativa
  modified_base (26)..(54): a, c, t, g, unknown or other
  modified_base (1138)..(1145): a, c, t, g, unknown or other
aggttaaagaaaaatgtaaccatatnnnnnnnnnnnnnnnnnnnnnnnnnnnnngtcacccatatatatatatatgatatatatatttagagcaattagtatttatacttaggattttttagaggtgttatttataattggttagcgatattttttaaaaatcaatatattaaattataagaaactcgatacttaattgtgcatcaacaacaatacaatatataagagagtgctattagcattcttcatatacatatatcttaataaatgtatttctttatgtagtattgtatgcttttgattaatgtactgtagctagacttattttcttaaaaaaaataagaataaaaattgtgctatagacttgttttaatgtaatttgactttgcaataatgaacaactattagctcaatccaatccaactatgtaaactatgtaatgattatagcaatgaaggtaatgtgttccctcaagattaaaaagttgctttctatatttatatataatatatatgtatgatacacaagttaaaattaggacatatatatcgggtcatgggtcatgggtcattccttctcaggcgggccagtctcctcctcttcctcccttttctgcggtatagcttggaggttgggcggaagtggctggcggtcggattgtgctcatggggctccatgtgtcaaagtggattgtttgggaagttggggctttgcgagttcttttatttgttgttatttacactagttttaatctactcattgtcatttagtttttattattaattaaattaattattatagagtattttattttcataataatggtggttctactacccaacgtgggtggccattcactaggtctgtttaggtagatatttaccacttggttttcttcatcaactaccagcgtcaattattaactaaactatgtctatagttaactaattagcgggtttaagaaatagtcaaagccatacttaatatatatataaaaaaaatgttatctaacagcatttcaagtaattgtaattaaacctaacatgttgatctttttacttttatgacaataaggatccatttaagtaattgttcttctataagatcttaataaaagtgttaattccatttttggcannnnnnnntgacaaaaatattttattatttaatgtatatttcggctggcatata

SEQ ID NO: 118439 - DNA, 1920 bp, Cannabis sativa
  modified_base (28)..(34): a, c, t, g, unknown or other
  modified_base (1593)..(1594): a, c, t, g, unknown or other
  modified_base (1818)..(1822): a, c, t, g, unknown or other
aatctaactagtgttgggcccacttcannnnnnnccactagtgcctatttttgctctatttttatcatttttttatttcaaataaatcaaccctaacccaagtagaattagtataaaatgaagagtaaggtctcataatccaactaatgacttttgacctagttttcattatatttgacagctagtgagtttgagacttcttcttcttcttttctcttctaattcgacattcttagtcttcttcactatcaaaattcgagccttagtgatagacctacccaatttatcaatgattctagcctccacacacgagtgtgtagcttcataatcaaattttacaaaataaagagagtaattaatgataagctaacttgttacagttgatggactggcctctacatcatcctaggtaatggcaaacatttgatcttgagtgggtttttcctcattttttggtacttccatcttcggttatggacaatctcgttgatagtggcccatcaaaccacattggtaatatgccatgggtttaatttaaaaaattgatatttaagtttaaatgttaaaaataatattttttttattaatatttattgatttgaaattaaaaaatcaaattttagtgaaaaaatcacctaaaaaacaatttttggctgcaaagattgaggctggatgcaacctctatacgcgcgcggaaggggtttttgcagtgtgcctggccgagctttctcggcatcttgtaacatctacgtgcgagcagctcgtgcctgaacgagtgaggaccgagtttcacacatgaaatgtcagaggcacgcgcgtgctgggtattcttgttcgagggtctggtgcgcatgagcacctcgacacccaatggactccgatattcaaatcaacatatcttcttcgtatttcatcggaattgagttccataaaaactaaaattgcttaatttttcataaggaatccaaataaattatttttcagaatgaaaataaaattattttcatggaaaaattttgtaattcacaaacattcatcaaatcacacataaactaacatgaacacatctaaatcaacaaagttcatccttttaaatcaatatttcatgaaagtaaataattaccatggctctgaggccaattgttgaaacttattttatcaggaactagatttactaacatgtatgtttaattaatatcctaaatatgaattctctaatacgatgaaattaaacacatacgaatttagaaaaccttacattgatgctagctgaataatatgaattcttctgctaagatctctaacttttgttcctttctgtcgcagggtaattacaatatctaagcctggatctccttctctcctttgagtttggttaaccactgtctttcacactatgattgagtacttgacttgctatgtgtgagcgtggtactttatcactatggctcggattgatgaaaaacaatgaatgaggtgcgaaattactatagaatggagtctctcatctactagttgtcagagaatgaaaactaggtttagtttggttgaagtaggttagttggatgagaatgagagcatcatgttcctttnntagtatttcaactagggtttaaattatatggattaaaaaaagaattaaataatgggcaaaaatcaagccatagtggccgactacttaatggacctcactagttacaattttgccactttatttcaataatttatttaattgttaaaactataaatgtcaaaactatttatttaataattatcaaataaaattgacagttattttatttattaattagacttaannnnntctcttaattaacaaataaatctcagaacttcttttcttcagaattaagccctttcttagtaaaaatttataataagacatagtctaattttataatt

SEQ ID NO: 118440 - DNA, 1131 bp, Cannabis sativa
  modified_base (40)..(44): a, c, t, g, unknown or other
tctcaaaaccaattgtcaatgagtggagtagcccatgttnnnnnatatggctcaatactttcacatttaatccatgtgggacaatattctccaatacaattaataatctttctgaaacctaaccccccttctttctttggcttgcatacatcttcccaagacaccttaccaagccccaaaaactcaactgctcctttccaaagaaaagtccctacatattaaattaactttttgtatgactttttttttggaagtatcatgatttgtgccccatatgtatgaagttgatcaaagtgactctcccttcaaatgagagattacgtgaactccaaatctttatcctttgttattttctcttctaataactcacttttaataggaatacccaagtacctgaatggtagcttgcttctagtgaatcctgatactttaattactctcttgatcactagtaataggttttcccattatttattcactaattgaaatacatcctcatctatctccggtggtgctttctggcttttcactggagcttcttgagtttgcacttgagcctttcccatatccactttcttggccatccaaacttgcttcacattttcaccttttttgcattcctaagttgagagatcaaaaccataataattaccacacaaaatcttaggggtgagcaaaaaatctaaaaaactgaccaaactgaatataccgaccatccgaacaccgaaaaactgataccgaaaaaattaaaaatcgaaaaaaccgtcttcggttaaaaccgccttaacatggtcggttttagtgtcaatgacaaactgaccgattaaactgagaaccgaccgaacatatatattatatataatatatattatttttgtacatatttaatatacaattttattaaactagttttacttataactttttatttaaagtctcaattattcattactttatttaattatagtttgatgcatttacatattatgtaatatgtacacattcataaaataatagaagttttttactataactcattaccatattaatagcacaaataatttaaacaaatttaaaaaagtttattttacattatttatttaactaagaaagttttattcttaaattata

SEQ ID NO: 118441 - DNA, 1354 bp, Cannabis sativa
tctcctccacacttcctcttgcaaatttcgtgcttgaaatttgaaatttgatgaagtttttagcacttctttttggtagttttttatggccgaaaattgatgtggttgattgggattttttttattttttgatgaaatgtgagggtttgatgcttgagtttttgtgtaatttggaaactttgttgatgatgcttggaggggggtatgaagctcggcctccttttctgaccaccaccctgagatacccctattgggggtcggggtatgtaccccgtgagtgggtgttaccccatgccccgagcttgcatgtggccctaaccgagatgggcctatgatgataccctgagttgggggtttttaccccgatactagggggtcggggtacaccccgagtaaggccctcttttttttccttggaaatctcaaactgtggcttgtttgatggtgttgagatggccaccgtggcccgagatggggttttgagccggtaccccgagacggaaccttggcctcactaagaagccttgagttaggggttggggtatgatccctatgactcaccaaatcctgagatcacactttcacccgagacgggagtttgcaggcattacttctaaaccatttcatggagctcaggttacaccatctcacaacaatcccgtgactacattgaaactcacaaacaccccgtacgtacatcccaaatccatgtaccccgagtatgcatcttcatttatttattttcctcatcgtgggcaagctgaggtttgcggttgggggtgttaccccgagactaacatatgggggtcggggtacaccccctgaagccacccatggtgattggggggtaccaccccgagcctacctttgtctcctttttatatatatatataggctaaggtggttggtgtactaatcccaagtgggggtcggggtgagttccctcgagaccaccctatgggggttcggggtgtaccacctcgagaccactcatgggagatcggggtgtgatgctccgtgacaaccgtaatgcggcttcatgaattggagatgattgttttttgcctacctctcgaggtcttacatatatgcttccatatgcttgttttttcttctcacacttactaaaaattttaagtgtgtgattgccattgttgcttcctccatttagctacatgaatggttgttccctcgttgtaaaattttttttggttgtgcactatgaatgtcatagatgtataccttcttttttactttggagctatgtgactctattactatatgctactatgtgttaacttgtctggcatgtaccacactatgcgtaagcatttttttatagttaaccatgtac

SEQ ID NO: 118442 - DNA, 1609 bp, Cannabis sativa
  modified_base (39)..(44): a, c, t, g, unknown or other
acgaaagtatttacatagcctttgtgacaattagattannnnnnaatgctgatttcatgttagtttaacttggcattacaaaaaataaaggtatcatcaacgcacataaggtgagagaccgaggggctttgacgactcaccttaaagccatgaagtcggccaaacctttctgccctaaggagcaacctcgacaacacttcactacacaaaatgaataggtactgggataagggatcgccctgccttaagccacgctccgggcgaaagagttgaagaggctctccattcaacaacatgagaaggagaccaaagatgcacactttaacatcaacttatgaaaactagcattaaaaccaaaagcttccaaggggtggtccaaaaagggtcacttaagtctatcataagcttttgacatatcaaatttgaggccaacaaatccacaacaccctttatttttcttaaaagaatctaagatctcatgggccacaataccattctccgctatccatctaccttggacaaaagtagactgaaaaggaaagatcaaagttggaaggagagtacgcaaacgatttgctagaatcttggagataattttgtaaaaaaagttacactaactaatgggcctaaaatcatctaaaccttacgccccctccttcttatgtataagaaccaggaaaatttgattaagagttaacaaattctccgatctggaaaaattgaaccactatatccactacatccttgccaataatatcccagtgagcacgataaaatcttttcgacatcacatctggtccaggtgcctcaagaggggccatggactaaaccacctttctcacttcctctagagaaggaattcttactaggttcccagtatcctcccgataaatcaccgactcaataagattgaacagatttggatccctcgaaggaaggatgaagaatgcacatcctcaaaatattgtcaaaaatattcgtcgatcttaacatgaccagagattcagtgaataccatcatcagaaattgcattaaagaaattagacttccttttgacgagagtggaagtgtgaaaaattttggtatatctgtccccttcaagaagccatagctcgcatgatttttgttttcaaatctcaaatttgcgatgagaaatctcctctatttcaagaatagtatctgcttccaacttaagattatattgggaagggagtctagcttgcacctcaataagaaatctactaagaatcgctaacatttctttgcagaatccaaaacattctttattccatttagataagcattctttagtattagctaacgggagaccaattggaagctcctcactcactgcacatcaatattccaagcctcccaaattcctaagacacctaaacgagtctaatcagctacagaagtaatcacagacctaaaaatctattaactatccactaattcagagtcgaagcaccgaagatggaaatggaaaagacccaaagtctcaataaaaaaaaagttagtggggagtgaggtgattcgagaggctcaaaatattgatgtgcttttctcatggaagtctgttttcttatacggactcaaatttgtactc

SEQ ID NO: 118443 - DNA, 1033 bp, Cannabis sativa
tcaaaacttggccactaagacttttttttcccataattaataattacccaaaaagaaattgtaactttacaaatataaataaataaataaataatttgagtcaaactctaacaaaatacgacagaagatgttgctaaaaaatttaagtgctcaccatgaaaagaaatttcctccatttaaaattaaaagtcatatgaaggttacttatcaagaagaaataaaaatctgatccaaattctaaagattcatctttggtatttttttttttaagtatgttaatttttttttcaaactatcctctcataattttatatatttatttttagttcttgaaactaattttttttaagtattttatgtctgttcaactttttagttggctataataaataactgatttccgtaaaattgatagttttttttttatatgtaattaaggtttaagttttatattttttgtcatcttaagaaacttgtttcattgttcataattttagttagctgataaatattattagtttctttaagttagattcaaacgtttgactcggctggcgactccggcgtcgaactccgacgacttttctagtgatttttttaggcaacaatgccgatttcagtgacttttccaacacttacagaaactctggcgacttttccagcactgacagcaactcaaacgacttttctggcaccaatgacaactctggcgatcactgtaattttatttattttaattttttttttttttaaaaaaacatgatgggaattttaatattttttatggtaatacaaatagcatattccatatatatatgttaagttttttattttaaatgtcatattttgttctattaaattttcttaccatatttatgtgaactaagttttttttcccacatttttgtaaataccccttattcatgagaggagccctattcatgattccaccgttttctaagaggaaattacactctatatcctttttatattgtcctcttttatttttaccctcttttttaaagtctatcat

SEQ ID NO: 118444 - DNA, 2022 bp, Cannabis sativa
  modified_base (32)..(63): a, c, t, g, unknown or other
tttagaaagttcttatttaggatgttaataannnnnnnnnnnnnnnnnnnnnnnnnnnnnnnnaaataatttccaacattttcttcaatgttgagcaagcctatgtagtgcctaaacttgccttgagtcacacatttagtaagcatgtctacagggttgtagtatgtgcttatcttcctcacttgaacctacttgctagtgataatgtccttaatgaagtgcagtcttatgtctatattttttgacctctcatgatgcatgggattcttcatgagatgaagagcactttgattgtcacaatgtacagctatgtcattagagtttagacccagctcactagtgaacccttcaaccatagtgcctctttaattgcttcagttgcagcatgtattctgcttctgttgaagataaagcgaccaccttttgcagtgttgatttccaactgacacagccacctaaacctgtgaacacaaagccagtgagtgaccttcttgtgttaatgcaccatgcataatctgagtttacacagccagtgataacttttttagtgaatgactcttttccaaacatcattcccatgtttagagtgcccttgatgtaccttagtacccatttgagggttgtctagtgttgttgtccagggttcgccaaatacttgctcaccatgctcattgcatacctaatgtcaggtctggagcataccatagcatacatcaagttgtcaaccacactagcatagggtatggcatctatttcagacatttccttctctattttgggtgattggtcttttaaaagtctgaagtgatgagctaggggtgttgaaataggtttggcatgcagcataccaaacttgtttagtactttctcaaggtatcccttctgagatagaaagatggtacaagttcgggttctcttgatatcaatgcctaggatcttcttggaagatcctagatctttcatgtcaaactctgcactgagtttttctttaagtttgtctatctcatatctatttttccaattaataacatatcatctatatacaactatatatatatatatatatgtttattaaagtaaacacaagggtcatacatgctttggcaatatccaaaagtcttcatgaactcatcaaatcttaagttccattgctaatagcctgtttcagtccacagagtaatttgaccaacagacacacttggttggggttcccattgtcaaacccctctggttaagtcatttgaatcttctcatctagctttccatgtagaaaggttgtcctaacatccatttgatcaatctcaaggtcatatttggtagcctttgccattattactccaatggatgtttgcttaacgatctgtgaaatcagtgtcttccttttgtgtaaagcccttggcaacaagccaaactttatatttgacctttcccttgcatttttcatcttctttatgcctgaatagccatttgcagcctacgagcttttgaccttctggttttttaaccacaatccatgtcttattcttcttgaggaacataatctcatcatcaatggctttgttccattacttgatgtccttacatgtgattacttcttggaaagtggaaagtactaagttatctagttctcatgctatagcaagagcaaatgttgtgaaatcagtgaaaccaaatatggcaggtgctttgtgaacccttttttctctgtctctagtgagctgatagacatcaacttcagtaccagtttccacatccaaaggttcttcaacttgaacctagtctgtaataccctagaattaagagaatggattagcaaagcctaactagttaaatgtgtattgttgtgggattatattattatataatctattatatgagaattaatatgaaatatgacattttaagacccctctggttagccaggggcattttagtaattttgacccgagaatggtaaaataatgaaattaatatatttacgtgcttatggaactatattattatatagtatgcctgtgttgt

SEQ ID NO: 118445 - DNA, 1543 bp, Cannabis sativa
  modified_base (1487)..(1492): a, c, t, g, unknown or other
tcctctttctctatgttgacatatatttgaccattataagttggatttcctccaaatcctccgggaagtttatggaaaattatttagtgcagtagaaatcttaaaaggtcgttctagtagattttttattagtctcggcactgaaaaaagagacattttagttcatttttttttatgtgatcgcatatattataactatttaagaccacttgtaaatttttaaaaaattcagaataaaaataaagtttaaagagttacttactacgcgtataagaaaaataattgcgcgtgttataaaatatgtaaatcttattttcgattttgtgaactatttagaattttctaaaaaatataggtggtcctaaatagctacaacgtatgcgatcatgtaaaaaattagactaggaaactcctttcaataccgaaacagatagagaatctatcgaaacacctctttaaaccctttagtatttatggaccatattgttttttgtttttcgtttactttttttattcactatttcctacaataattttttgttgttgttgtttttggatatttacacaatccttattgaattggactcctttgattcactattttaactgataacatttagactataaatatgccaagacatgagccataaaataagaaaaatgatttgtcagaaaaataccatatttttatttttctttacaaaaataccataataaataaatgaaactaaaaaaatcaaaattggtcaaattgagaagtaaagcgtcggttattatgacatgctaagctgcggcattgatttactcggcacatatccaataaaagaagaaaattatttctttcaaaaatgataaactttaccttattttacaaaaagacaagattttggcacaaaaaagaaaaaaagaaaaagagaataagtaaaggagatggtgagatgttaatgtgtggatgattttctttaaaagtttccagcactggatgaatgcacgttgtaattagcccagccacttggatggcaacacttattgggtattgatcctcaaactttgggtccttacacatcacttctgggcatataatttacagaaatgtgaaaaggtatggttgtggcttaacatcctttaatttgtcatatcatttattgatacaactagtaaacaatccgcgcttcacaacgattatttttaaattttctcatataatttttttctttgtcctttagtttacataattagttagaaaaatattttttttagataattataaaatatattttgtatttttttctttgaaagaataaaaatataagaataagaataaaaataaaaataagaatacaaacaggaataataataaaattaaattaaaataataaaaaattcataaaaagtttattaaaatttttacagtcatttcttccatctcaaaatagaatatcattctactaaaataataaaaaaggcgtttggtatgaggtgttcannnnnntttgattatagggaatattatgaaggagaatatgattatagagaaatgtgt

SEQ ID NO: 118446 - DNA, 902 bp, Cannabis sativa
gtgctttcctttatattatatattgatgatattgattgattgatgattgattaagctcacaatttttgtatagaaaatgctaaacttcatcaataataatatatatttttgtgctgaatcgacaataatacagaattttatgttaaaaaaagacaataataattaattagataaaatatagataccaataattaattgatttgaacaaattagttactctatgtattatgtatgtgtactacaaattacaaaatagttcaaaaccttggtcaaagaaatgtttaatgatattttaagtgttttttcaaataaaacgtttatatataaataaaacaaagttagacattactgttattataatagataaagtctgatatagttgagatctcaaccgtaccaattatattttttgcgaaagctcttctagcaacattatgagccgcaaggtgtggatactgataggcggtttctctatgcttcgattgtagtggatattatttggaaggctcacaacgataaaataagtatgacaaggtacgtaataattctagatagcattaagcactttattaactctatctatattaaaagtgttaagcactttaaaaaatatatatataaactgacatattattattaatacactccaataataaaatttacatagtttaagttaataaaaataaatattataaagtaacagtggtacttatattctcctatgcgctatatcttacaattaaatattagatcacatgtaatttaatttaataagttttaaggaaatcactaaccaatacctcatgcaataataatactcttcaataaataatattagaaactactgactaattattaaagggattatttcacaaatacataaaaataacaaaaaagttaca

SEQ ID NO: 118447 - DNA, 1039 bp, Cannabis sativa
tatatatatatgaaccaaatatgatacattggtgaattatttggatgattaattaattacaactaaaaatcttaattaattacagaaaatatacaatgtataaaactggattaactaatgataatattataattacaatacataaaataattaataaataaatgaaatatttgcatgtgaatgaagttagctctctcatccatgatcaatgaatattcttacacaaagtagtttttccatctagaattgtccaaagtcttttcttttaatcaacttggaaccataaattataatcatatattaatttaatgtaaaaataattaagcaaagtcacagccgtttaaagtatataattaggccaaatagtaaaatttacgtacgtacccaataaaggtctaaatcatgatttatatatattcagacatgcactgtgttttggtccccaaaaaatataaattaattagttttaaagtaagattattaatcatgtgttaataataatagccggataagttaaacaaagaatagggtaacttacaactttcagcttttacaaagtaattaattaattattatagaaaatatggcaagttgtgtacaacacccatttttttaacttctctaataaagacagaaaggtgtactaatatataacattaatttatggccatatttgttaataaaatgactttcctataattaccaccaaattaaaaataattcaatggttattaattattttttctagagggaaattataagttcattttttttcaacttaaattggttaattataggcacatatatatgtcaatgaaaagttgatttcaaagaggaaatttatgttattctttagaatttggttgtaggactatttctaaatatgttcttccattgataattcaatggtatttaattacccaacataataatgtatcactactacaatatagccttttagtgacactatttagtgacacgcacaaaagtgtgagtcactaaagagttaagagtaatttttagtgacatgcacaattag

SEQ ID NO: 118448 - DNA, 1298 bp, Cannabis sativa
  modified_base (30)..(50): a, c, t, g, unknown or other
atctatattaataagtaaatttgattatannnnnnnnnnnnnnnnnnnnngcataaaacccaacaccatcttcagtagtgcacgtcaccagacacggtgtagtagagccatccctcgtgaccttcttgtctatcaatcaataagtgttctttgtcactttttactcgacacgataatattaaggttgaaatggtgtatactgtgtgcgagtcaatattctgagaatgttggtcccatttatatggtcttctacaaaaagggagacttgatgttttgcactgactcatttaacccaacactgacttatgcaggcacctcttggtttgtcatggaaaaagccaattcttcaaaagctatgggagatagaaaattttgcaagaaaagaaaatggcaagagactcttgctgttactaggggccacccccagcgacatgacccacaattgatgcttggttggtctcgcacacatcatccgtccatctttccaaagattccttccgtggggtttgtgttccccacaaaaccatccctcttgaaccccatgccatgtagagggaaaaggagatacacagggctttggaggagcatttggaaatggagatgggattcgtgcacaggcgggccaacgtgctttcaaccgtgaggagggcctcagaagttcttcacgctttaaccccagctgggccaacagtcgaagtagaggctctagagaagcatctggcacccaaggtagggagggaagttgcacctttggcagcaaaaatcttagaccgagtggtagggaacgcctctaagttgtctttggagacttgggcaacttgtagcagtgtcgatgcttttgccttagcccatgtcgctaagcaacaggcatttggggtaaggttctaaacctcttcactctagcttctactgttgtatatacctttcttatctttcccctattgtaaaaggtagctctgttggcagaaagggttcttggagatgttggtgcgctggtcacgaagctagaataggccaaggtggacaatcgtgacttgcgcacttccaattagacccttctcggtgaaaatgatgaggtcaagcttcaaatcaaaagcttgaacaaggagaactagcgtttggaagataattacgcccagtagactcgccttatacggggcatgaggaccgtccacgacctttatagagagaccgtggagaggatttttggggtagagtcttccaattcgtccagtagcattcatccttgagtacccagatcatacaacagtttcctcttcttcctttttttttttttt

SEQ ID NO: 118449 - DNA, 1407 bp, Cannabis sativa
gtaattctattatttttatgtgtaataaaaaaaagttatattttgctgtcttaacaaaaaaaatatatttttagtttgaataaaaattttaaaattattatacatgccgcccgaagtgcagttttgttcactagtgatatataatgtaatgtaatcactcgcagcaacttaaaaattgtcgttattatatcctatcccatataggctacaacgatcgcctaagaagacataaaatatttttatgtggctgtaatattgacgacatcgacaagcttattttttgtttttaaatttatatgttccaattaataaccactcaggctaccccagagagaaaaagatcgtttgttcatacccaggagtaagctagtcgacgatacaagtaaagtacatatatgaatcaaatggttaactatcgtgatacctttacttattagttgactaaaataagtggaatcaatatgtttttaaggaactattatagtgggatattgctgacaccaactttgtttaatttatacaatattttttatattgtcaaaattaaccatcttgtatgtagttgagttaaaatatgtatgggctagttattttctataagtgatattagtaaggcccagtaacgatgatagtagaaagctcatttgtacagaactagatatagatatagcgcacttaacgtgatgtgatttcccaccgtcctcgtagctgagcttttggctgttaggactgccttacaaaccatatcatttttttttggtgggtctattttccatttccattgttgagacatgacaagtaattgtgtggtgggttctagtcgctagctcctaaaattttacatctaaagtggcgtttggttgaaggtgttaacagttgctttattgtaattggttgagtttgttagttagaaaggttgttgacaattgctggtttgttgttattgttactactggtttgttacttgttgttttatttttttgcttcagtagtatataagctatgtcaagttatcttgtatcaattgagattcattcaataaagattttcattcatttttctctcctaaaactaaagtggtatcatatagagccaagaaattcttgagttcattctctgtttcttctttgttcttctcttcttctcttcccatctctacatttgttgtgtcccagctgccatggcaagaggaggaggagctcagactcgtaatacttctaatcgtgataacgatcctggaaacaacaatggattttccgcattagatcaaactactcgatattccacgaagtccattgtaacgccctaatgctaaggcacgctacaatgctttttcaattatagtacaatctttgctaatcaaagaattttctcgaaaaacgtatcaaattaaaacttttatattaa

SEQ ID NO: 118450 - DNA, 10584 bp, Cannabis sativa
  modified_base (74)..(81): a, c, t, g, unknown or other
  modified_base (10471)..(10504): a, c, t, g, unknown or other
ataaataacagtagaataaattatttaaatagctataaataattcataatttaaacataaacaactgctaattnnnnnnnnaactaagcgggctttacatactaagcaagtagcacatggttttgcaaaatatactctagagttggatgaagatgtctgctggatgggtgaaatcacctatcctattttctctattattgtaaatgactcttgttttccaagatctttggataccgattagtaaaagcttaaggaagtgcaaaatattaaataatagacaaatagattttttacatggttcaggcggtaatgatccttacactactacaaaaaagggtttttatgtcggtcaacgcgtctggtcaaactcattgaccgacgcaaaagtcaacccttttttttgctttagttgttaaccgacacaaataataattaattgagtcaattgttacttcgacaaatgagaggttgaatttttgcatcagtttatagtatttttgcgttggttgaacaatgacgcaaattttgtgtctgtgaaaaactgacgcttatgactattgttttcaaaaaactattatgcttgctaaataaataaagaggtaaagttaaaaaaatataaacaaaaggcgggccttcaatttttttgggaagaactgagaaaatgtattatatcctaaaatctcaattttctacttcatcacaaaataaaataaaaattatcaattttttctaggacaacgatataccatttctctctctcactctctttcacatttagacactctttctctcccattactgaaacgaaatagcaccaacaacaatgagagcttgcctcactcattgttctcgatcttcttctctagggagcacaatgtactttcccaagtatgatgacgggaagatagcgacaacaacagtcctgcattattcttctttggcattgtaatcctgttgcagttgtaggagagacgacaccacttagatatttcttcttcttcatgccacgactacacctactacattgaacaagtcttcatccactcaattgaccctcgacttctctcaactctcgtactcttctatttttttcattccatttaatttctaaaatttttaaaattatgtttgattcaaataaaatttctaatagttaaaggagaaaggggaaacttttgaattaaatatacattcgcttttaataatttcaacatttcaggaaggaaaaatctcaaacttgttttgagatttttcattcgggtcattgatgagtccataaattgtcttataaatatgatcaatttatgtagtaatattctcaaattaattctttcaattattgattactgtgattttaattgttttggataatttaaagaataatcatgcatttagagtcatttggagggatgttagcatatttgtgtggaaaatagtagaagtcggggagctcagttttacacgacagaacttagttgcaaattttgatgaccttagaagcataattggatttggagctcaacataaaagttttagatctcattcttagcttcccataacatcttgaatcgtccaattcagagttgtattgaagaaattatgacaaatttgaagtcaaccacgcgtgctgggctctgtagcacaagtctggaagaaaaaaaaaagataatttcagcacgtgagctatttgggaaatatctcatgtgcactataacgcaggtcttaagcgctatagctccgtacttatcttttttttttaaaaaaaaaaatcctaattttaaaaagattcatctgtttattcaagcactataaatagaaccttttagtctacgaatttcagacccctagagctaccaaattgagatagaaacttagagcgagagagagcgacgaagagatggagatggcaacttcgaagtattcttcttcatagttcttttcttctccttaagctcttactatttattataattattgttataatgtttagttccgagtagtttccttttagttaagggttatttcaaaactcgagacatgaattcttaattttgttattgaatattaatttcttgtttctattatatcaaatttattatattcttctatgttgaatgtcatagttattattttaatcttatttagatggctactaaattaggttttactttaatctaccatcatcttaggattactattcacctaatagtgtaggattctaagtaattgtgataaattgaaatttttaatattgtcaaaggtatttttaattgtgatgaataatagaacctaggttaaataaattgtatgcttcattgatttattgcctagattaatctatctctataaatctttaagcttcatctaagttaaataagttgcatgcttcgtggatttatttcttaggtaaagagtttattattgagcgcttcgccttgattacatgtaataaggagattaggataattgactgcttcaactttatttgtgagattaatagtttgattagaaattaaaattacatttattaataggaattaggaatgactgttgagggtggcgaataacctttaactattttctcatatcgtagtctcaattttaatttatttttattttttatatatgctattttgtcacaaaaccttcttttctaacttttgtcattaaattttgagtaattaaataaacatagtcattgttggatcgacccttacttacaattatactaaaataattgaaggtattgaaaataaacattagtaaatttattgtggcttacgacatgcaccaaatttttggtaccgttgtcggggactattgttttattttattattcatatttaattttagctttgataacttgttcttttagttgtggtttgaatttttagatctttctttagaaatatggcgatgtacaatcaacaatactatgaactgtattatacctcgccacaagtgtatcaatatgatccctactacgataattatacatacaataaataatggggagattattctagtagttcttatggtgggatcgatcaatatatttaaccaacttcttactatcctcctgtagcaccacaagatcaatatcattctcttattgatctgctcaacactttggaggcttctactacttgatgcaacaaaatactgcacaatttcaacaacctactcatgttgcaccatatagtggaaagccaactactgctgagctgattgaaatgttagcagttaattccttacagtttcaacaaagttgtcatgaaactatgcagagccttcaacaatctctacaaaagttagagaatcttgtggagtcaatggaaacatctatgagtgagtctgaaattcaatgttcaaactctatgcctttcacaagtggagagtaaccttatagagaatgtaagtggaatcactatccaaagtggtacacaacttgaattaccaccacaccaagaagttaatgatttgattctaactaaaggagtcgacaattcatcctttgaagagtcatctccaccaaagttggtccaccatcactgaaaaagtcatacaaaccaattgtaccaacttatgtcactcatcaaccttttccaagtagattgaaaaaatctaagaaagaggtgcccatcaaggagattcctgaaactcttctgaaagttgaggtaaaaattccatgtcttgagttaatcaaagaagagcctcattatgctaacattcttaaggagttgtgtccaaatgaaaaaatagttgaatggtggtgagaaagtaagtgtgggggagaatgtttctgttgttctctaaagaaatttgttgcctaagacaagtacaatctaatgcacaattagtaaaaccaggcttgatctttgcatgatagatttaggagcaattattaataatatgtcttattccaattttgcttatttaaatcttggtccattaagagaaactctggttttaattcaatagaataatcagactaatcctaatccctcagggatagttgaagatgtttttgtgcaggctaatggacttattattccaggtgctttctacataattgagataaaagatgagggtgatcccaatgctacatcaactctatttaggagacccttcttacccactactaagaagttggatatgaaagcatagatacctactgtaaacgaagatttttgttaacgattatgagcctattttcgtaatagatttggcacataaattttaagagacctaagaaaatagtaaaaacagaaataacaccaggtttttacgtggttttgcagttaactctgtatagtccacaagtctatcttatttagatattttgatatagaattagggtttttacaatcagtatactccttttttctctctacgatttttcgtcccttttttttgtataatatgcccctgtttatagtaatataggtaggcagttaataacattcaaattcaaatcccataacaatattccccaaaattgtgggctttaattacgctccacgtaaataaatacagttaatattagaaaatcacatagttgtgatttaaattgtcttgaagggggtcaacgctggcgtagattaagacacactacaaaatgtatttcgttgaggcatctcgcctagtacattaacaacttggtttattcatacgcttttctttccaacaatggcatgagcacccatgtactgagcaaacttaagaacttctctttaaccataaggccttgcagactggacaatcatgtccttcaagccattacacatagttattataatgtgaattatatgctaagtgttctaataaccgactcgccttgccaaagccttcttatacgtagcgagatggatgtctcgctatgcgttatctatggcccctgtgggatttccccttccgagacaagatggtttctcgtcaatacaaaaattgatagtttgtacatccttgtttcgcttaagactgtccagtcagcgagttataaatactctatcaattttgcatttattaagttattccattttgtaattaatgatataattaccattatattcgtggattcatattctctaagactgacacgtatcactttctaaagtacagccaaatttatggtataacaattgccccttaaaaagtcattttataataaaaagtgctttttaaatgattatcgtgggtattttggtcataatccaatttgaaaatatgcatgcctttgattttggtagttttgtggtttcgggggacatcattagcattaatgaaccatattttccacttctctcccatttttatccgttagaacttctacattttgatgtgatggtaactaagttcgaagtataaaacggtaaggaatccatctttccaccacttttgccttttcaaaaactcaagcttttctgaaaaattttcatcccaatttcctgaaactttgcatgccctccttgtctttgacattctttctgcgaatttcctcagatttgcttttcgacctcaagtgttcaaaaaattcttcatgttattcactccctctctggttacaggactttttatcacacaactactcgacttcaaacagtaaatgtctcattcttctcttttctttatttttctaggttatgatcgtttattttgcatcttgtcacttcatttggttttagcaattctggtttaagtattctgggtaacttttagggtttaggcatgatgtaaatttaggtttatcatattctttaagcctctagtataataaatttcatccaggatttgagattgttcttttttgtagaaatgtcccaatctgattcagaagtttattcttcagagtccttagaaatagaatatcctaagcatttagccctcccattcaaacccaaaaatttctaaccttggtccaaattagagatgaatgacgtcaaaattagagaccatttgattaagtcagaccaggaagaagtttccaatcattataggcgatttcttcaagagatttttgagggcaaacgtcgcttcttgcgagacgtagcctggcttgaacccacaatattatcttatattccactcacgagaccaatatttttacatgaagtcactatttcttttgaaccaggtgaccttgactttgacattatgtgtcctaagtctcgtaaatcaaagaccccacaagatccaagtgtcatcttcgaggatgaactcatcgaatccaaggttagttcgattggggcttatgttcgcggcatattaaagtcgtgcggtatcaagcagagaaaaggttgtgtcataaggtccgtggctcctgaggaattcagctgttttcctttagaaagggtaatacaggaggagtgcagtggacccaacacgagcaagtcctcgggcattcgtgcctggagcctcaagcacatcaaggctggcgcagttttccccttagggattacttaagggagttcttcaactacctcggggttgccccattccagctgaaccccatctcgtataggatccttgcgagcttgaaggtcctataccacattttaggatgggagtgccctactcctttggagatagcctatttttactcaattaaggtagttcctgcaaggaagcgagctgtaggaggtttttactatcttggcacctacacgaatgattgttggatcatagttaggctaccatacaagacaaagtttaaaaatacttcttctggacgacaggcctctccccaataaatacaaccgccttttgcattatacgtaagttctctttcttagaaatttatccttaaaatatattaatttgtatctttaaggtcgcttattaaacttttatctattcacagcggttcctcgaagactaattccaactcctgagatagccgagcgccacaaaatcctgctaagtcttcgatttaggctgggagcagcagatttcttattaaatgagaagaatctgaagaaagttggccttcttgcctcggacgaatttacttgtgactacaaaatacccaagtattctttgtggaaaaaggtgcgggttctagccgacgaagaaagtgaggacttcgtggcttgcgcacattatctcgagagaactgcccctcgagaaaaaggagcatcccgaggtaataaatgtgggtggtcacccatagttcttagggccggacgtaacaccctagtttctttctgagttagtcgatacaatttttatacttggaacccctttcttatagatcgcataacacataggtttgatagtttgtacccagaattccatgttcagattaggtgtactagttcatactatgggattgacgagtagtatgggactatgttggatagatcgggtcatatagattcaagctgggatttagatccactaaatccttatgatatatttatgatcataggatctagggagtttagttaatattatagtcctccctcgtcatcttctgaagactacggtaaccttctcaagtgggagtttattccccatttctattcattttgcttaactgcttatgtatttcctccgcctcgtagatatggatcccgacctggagaatatgttcaagagtcgtcccccagtcaacaagaagtccaagaagagattctcccaagttggtgaggcctagggttctaccaaagaacccaaaaggaacaaaaccatggccaacaaaacgaaatcatcaggccagcttaccatcgagcctgccaagtctccaaagaatgaggtctctgctgcaacaaatgccaatgaacaacccactgtgtcagtgcaccaggtgaagttctctggttctcgtccagagatggtccttctcgagccctcttgcccattacccctcaaggccagaattgaaggatcgcaactctgctcgctgcattctactaatgggtggcgcaacttcttcacccttgagtctagcagctgggagcttctcacgcgaggcagcattgaggatcttgcaaaaaggagttacgaactcttgcctcaggttagtttccttttcttcttattctcacttttcctcattttatcacctttactaattttgatttgcctccttcccgcaggcctctctcctctcctttactactcatcatcaatcgtctaagcaggctgaaatgctcgagactgagcttcgctagaccagggagcataggaaactttagcaaaaaagtggaatgactccgaggctgagttctctggtgcaaaggaagaggctgaaaagcagcatctggctgaccaaaagaaaatcaaggagtttgaggattctctcaagtccctccaggctgaccatgaaaaaaatctcaaggagatggaggctgaaaccaaggaaagggtaaacaacatcgccaagagaaccatttatcaaacctggtcggccaatcctgagatgggcttcaactttttgggtgaaggagtcgatgctatgcttgccttatgcgagaaaacaaggagagaagaactaggtgaggatgaagaggtcgaagtggaacaagaagatccatccaagtctcctacaatgtaggcttagtttttaatttgcattttctttatttaggaaaatggccatatggccgagacaatggtttgccccttgtgacacttttttgtaaagaaaaatttgcattgttggatggccagctctgcttttattttatcttttatttatgccttgcatctttaaatttgaacttaatatatttgcttgtttgtgtttttattcacaacttaaacaattatactttgatcaaatttaaaatactttaagcatttccactgatcttgtttgccttttgtattgcctaagtagttaataatgtactatgtacatgagcagttatcgtctaccatgctttctatccgcgagcagtttattagttctacttcgcgtaaagagttataatttgatttaagcaaacttaaacatactttgaataattcaccttgtgaattactttgtatatttttgattgcctatatgaatagttaagcattttattcacaccttaggttaagtatttttttcaaggcatcttggcacctcgtttaatacgttcttataaaatgcgagccgttagatattaagcttcgcctgtagcttagtggtgtttttatgaaataaatctcatttacaacagctacttttgactttgcatcgtccatagattacttcaattaattacttgaaaaacttttaaaaaaatttaaaatggagtggctttgcaatatattatgtatttctagataaattccagttgatcatacacatatatatgccactcaagtaattttaaagaataaaactttgtaaatacttggaaaatacttcaactttattaataattattggaatttaaaaattatatcagaaagagagattacagcatgagtttactggtagtagggttgcaaatgctccacgttccagtggttctttattagcgagtcgtttaccggaaaaaattattctaaataatgttggtctaaaattaaataaattaattttcaaaataaatataattttcttatttaattactctatgttaagaaccctagtctctctttctctctctctgctacaagcccccaagggctctctgtctattcatctctcacacccttctaaggatattcctctcttttatcagagatctgccaacttgattcgtgttttgtatccttatagagagctatattaaatcccacctatagtaatttgaatagtattatctctaggtatcaatacaactaaaagaggagtaggtcattacccactaactaagggggcaaaagctctataaaaatccttgtctcatttaatttattgttcttattgtgtaacatgtggcaagcatcagatttatacgacaccgttgtcagttgatcacttttcagggtcaacaccatccatgagagcaactgctagttttgctacccatgagcctcaatagtttataactagaaaaatttgacgctggtatatggctttcctctttgatctatttaatgagtattatgttattctattattgctcaaaacattgattttttattgttaattatgtttgtatggttctgaaatggttcattatatgttatatgaagcatatgatatgatataagttatactctgagaatctatatcaacttgtgttgattttactttaccatttgggtatcctctacatttatacacttcgtggaactgcttttttagtaagaattagtttctttattaaagtttgaactgaaggactcagactagctatgacttgaatcacatccatgagttggtccaaccgtgcttgcacagaaggatctattgctatagggacttgactgactatccctctatcgaggggttgtagattctggtgcgacagggtttggccgaccgtactctgagagagtgtttggtgaaggtgttgggttttgtgccctnnnnnnnnnnnnnnnnnnnnnnnnnnnnnnnnnnaattaataaagatcagaaattattctatgttgcatcattcacatgatttatttcatgattatatttaatgtataaattct

SEQ ID NO: 118451 - DNA, 1256 bp, Cannabis sativa
agagagccacaacataaaagagagagagggtgagagagagagagagagagagagagagagctgggattgggaattgagcaacattgttgttggctcgggttagtgagttaatgagtattaatcagagattacactatagatgacttattgtgactatttccttgtagctcctgagattgatatctctaattctcattatcaataaagattggtggcacactacaagaaatgtcacttttacgagtacaataacttttaccaacgcatctcgcaaactgcgctggtaaaaaggtcaaagttttaccagcgcacatttgcagtggaaaaagtttaatttttaccagcgcacatactccacccagttggtggagggagccaattagataaggtatcctcgggtacttcctactcctgtatcagctccagcagtctgctatttgcctggtgtataagaaggttgattggagtggccttgccatcatggacactattatttttctccttccaaattctttcaaaaataatggacgtaccacccaagaatgtatggtacttggtggcacttggtctatgatactccttttgaaaccattggatccacatgtcccaattgtcaaaattagtcgtcgtggttctaatttgctaagtacagccgaaccaatggctttcacaaaatgacattcccaaaagaaatgaaaagaagtttccaaacttctaaagagcacatcggacacattggatcgtgaatatcgaagagagagagaagtttacctcttgtgaggaggcaatcgaaaagaaacttccccccatagcatttctagacgattatgaattttggctccccaaatgatcctccacttctcgtttttacccgcattatcatgaaggtttttaattatcctgaaggctgatcttatactaaaatttccattaggctccggaagccatagccaagaatccttcgtggggtggttgggcagcgtaatgttaagaattcttttggcgtcttcaatttgaaaccaggaccttaccaagtcctctctccattcataattaagaatgaagttactcaccaaactaattccctcagaggcatcaagacgccactgaggttgaaaattattttttcgggacccatgggtgaaaccaaatggaagttgcttcacccactacaagaaatgtcatttttgccagcatatttttgtactggcaaaatttggtattgcgctggtaaaatagaatttacttgtgatgtg

SEQ ID NO: 118452 - DNA, 1700 bp, Cannabis sativa
  modified_base (30)..(39): a, c, t, g, unknown or other
gagatggagctcggcagtgattgtacatannnnnnnnnngcaacctggagggtttcggtctttcaatattttgagttatattttagttgcctattgtttaacaaaaaaaaatatatatacaagtagactttgtaatagtaaaaatactttaaaccgtgttttgaaattcgagatcccgacccatatgattataaagttataatactataaaattaacttttcattttagtaaatttcaaatacgggcgttacacccaagcaccatgtcaacctgggtgctgggtcctagttttgcccaccaaatgctttcgtttgattcccaaaaatactcgtatcttaattgttgacaaaaaatgaagattatgcctagaaggcttcttggaaaaaatatttggaaatgtcaacttgggtgttgggtcctagttttgcccaccaaatgtttctatttaattcccgaaaatactcgtatcttaattgttgacgaaaatagagagtatgcccagaagacttcttggaaaaactatttggaaatggcctaagctgacaatatttcaacttgggcgctaggtcccagttctaactctcaaatggctccgtttgtttctcaaaacactacaaaaaatgtaacttttactagaacatttgaccaaatttgccgacaaaagtttctggcaaaaggaggagcataagagacctaaacttttcagctaaaacttttaccagcgcaaatacgcgccggtgaaactgacctatgctagcgcaattcatgattaattacgccagtaaaattgccaagtttaatcgccttttggcataaacactaatttaaggatttttttttatctttaccaacgtaaataagcaccggtaaaaggtctcctattttggcaggaaactctcgcgtgctaatttgttttagggagataagtgaacttttaccgacgtatatatgtgcccgcaaaacccaaaaaaaaaagtaggtggaaaaattcatgtctagttttttggtaagaggaaaaatttttaccggggcacatttgtgctggcaatgtgcgccgataaaagtttaaattaaacggtacgttttgatttcagggcttttgattactatttaccagcgtaatatacacttttattagcataacgaaatacccctgtaaaagtctcttaataagacctgaagcggtcttcttcttacccactttgtctcttgctctctctctgtctttgctttctcttatctgtcatctccaccacctttcaccctcaattgtcgcccctagtcgtcctgccccactccattcctaccagtctctccttaattatctttctctcactccatatatatattcaaaaaaaaattactttgggtacctactcactcgcccccatttgcaccttgggccacttacgtgcacagttttgaccattgattttattattaatattaagtaaactttaagattttaaattttaatttttttttgagtatatatatttatatgtatataaatatatatatatagatttttagattgtgtgactagaatttttgaatatatatgtataaatatatatatatatatatctttacacgtatattttttattttaattttgattattgtgtataattaggggtgttcactaagtatccgatccaatccaatccaattcgcaaaatacggatattcgcacttg

SEQ ID NO: 118453 - DNA, 1732 bp, Cannabis sativa
cgaccgcactgcaaagaacttcaaaccgtattttttttgcggtgtggtgcggtgcaggcagtttgagcggtttgatgaacacccctagtttaaataatgtatttcacagtcgtataaaattaagaaaaaaataatagtgtgaaataaaatatttaaatcctgtaagttattttatttttttttaaaactttaaaaattatctcaaataattataatatatactatcatattgtaaattaaaaatgaggttccatcgatatatctattttttttaagaggtggactgtagaagtattcaataaaattagtcaatatttttttattttatgagattattttgggggtttttccaaatatttttcacacacatataataataatttttaaaaaaactatattaaaatatattgtgaccaaataaacaaatatagtccatttggccttttgagatgaacaaagagaaaagagtggggaaaacaaaaattgtaaaagaagataaaatggttacatttggaataggatcaatttatttgtgaaagaatctctttgactgctgcccctcaccgacactacctaatccgaatgctgtcatctaattttattgacattaattaatagaacacttagataaatcaagtaaggacaatgaacccacacccatataaattaggatgttacttaagcaaaatacataaccatgataatgtcataatttttaatttttagatttttagccaaaaataataatcttgttagtaatgccataaaaatttgaatctttcaatacaaaaatgatatacttaatgatagttttgcgatagtttgcgatgaaatttgataatttagtgttatgttttgtttaatattagcatttttgttttcaagatcttttggttataatgtataaaaaacttaaatttgaagtggacgtagaacaataaatttgagatggaagccataattgaaattcgttgttctactacactaaatttaagtttctacacattccaaacttctaagatgattatgaaaaaaaaaaaaaagttccatcaaaagaaaaaaaaagatgatgaaaaaaataataaaaaagtttttaaaaatagaaatcagttcaaaaaaatatccaaaaaataaaagttatccacactaaagtttttataaaattttatcgcaaaaatcattgttaagtatcatttggtatcgtttttgcgtcaaaaattaaatttttatagcatcattgcaaaatcatcgttaaacatcatttgagttgaatattaataaattttcatgacaccattaaacataatttttttttttttgaaatcacattaaacatcattaagaatccaaaatcattgcattttatttttcttcggatttaagccatatttgatttgacgtaatagtaatagtaacaaatcaccacaacatctaatcactaatttcatccttgcattcaaatactcacataaatacgaagttagggttctaaaactctaatttcatcctcaaacctttaaaatattcaaccaagttaaacatgcccagatcttaattcaacaatctagatcagttcatagcatgtttctaatatcaatttacaaacataaataacctaacatgcaattctaatcaattacacccaaacctccaatccattttattttatgttgtattattttataatataataagtataaattaaaatgtgataaatatattattatgtgaa

SEQ ID NO: 118454 - DNA, 1627 bp, Cannabis sativa
  modified_base (26)..(29): a, c, t, g, unknown or other
  modified_base (1252)..(1257): a, c, t, g, unknown or other
ataaaatggattacattgaaatggannnntatttagggcataaagcccaacatcaagttggtccaccttgctctagatgtcacactcagcttaagccttgtgctcttaaaataacatctactatttggcacttgttgcatcatctttacgcttaatctctatttcacagtcagccaagacatatgtcaacttctcctctgcttcctacttagcattgttcaccgcaatggtggtctcagctttaattttcttctttaagcttagtgagcaagcctcaatttttagtgtacatctattcaatttttggatgggcctcctcaagctctatagttaaactgccaacctctttcatggtcctctcagcaatctgaaccatctgacgcaataaaacaaatgagaaaaataatatgcactaacagaaacaaaaatggaaaagatgaaacctagccccactaactgttacttggtagcatgggctaaggcaaatgcatcgccacaactacaagttgcccacttttcataggaaagctcaattgcactgctagccacttgatctaagagctcagcagcaagggagccatttgccttccaacactgcatactagctgcttctccataacctcaatgtagattattgatcctattagggtgacaccacgaagaccttaaaaaatcccagtactcttcccagttgagagactttgggccgtcttttggataattcccttcacattcttatgcctccttttcaagatgcctttaaactcccctattctcttcatggtggcatagtcagagtgagtaggctttagagggaacttaaagccaatagatgggatttgggggatagaagtgaccaaacccaattgctagctagaagtttattttttacccctcaatggggtaatggatcccaagtggggctactgtaggtggtgttgtcattgtttctgttgttgtatttgctaatggtgttgtcgttgttgttgttgttgaagtttttgttgttggtgtagttgttgtttttgctgcaattgttgttgttgttgctactgttgttgttttcgttggaggaggatttttttgttgttggttgtgttgttgttgttgttgttgttgttgttaatataggcgattattttaccaggatctagatttactactatgtacgttgtttaacatcctaaatataaatttgtaaaataatggaatttaaacacatataaatttcaagaaaccttacattggttgnnnnnnaattaaatgactccttccactcatatctttaacccttgttcctttctgtcacagaatattatcatgatctgagcctgattctccttcagatgttggattcttcacagtcttacacactatgattgattacttacttgctatgtgtgggcatgtactctatcactataaggggaaaaaagaaagagaaggaattcgaaatagaagagaagagaagagagaaggctcaaatttcactgaaggcttaagttgcatcaactgtcagttttgagtctatccctatctacttatagaaatccttctaggtttaggttttaattaattggcataaaaattgataaataaatgctaaaaagaccttaagtggccgacc

SEQ ID NO: 118455 - DNA, 1570 bp, Cannabis sativa
tcaattcaattggattggatcggatggaaaaattcaatatccaataaataattggattggatcggatgggtccaaatccattggatgtgatccaatgaacacccctagatcctacgatattaggacttaactcctaggatctcgtctgaagatcatatctttctaatatggaatgatagtaattgacgatcaagtatttaatgtgtctttattctccacgaaagtaggacacaattttgacaactatcaacatgatgtgatatttacatcagcatacagtcagcacctcatgggctaggctccaccagatgagcccaagtcaatatattatttatatttaccccattagtaggcaaagtctaatgaataagaaccctaacactataaatataagaatactcattcaagcaaagggttagaaattcattccacaattgctcaggcaaaatctagggtttaaatacttgtgtaaatcataaggcttttccagtcttatagtaataatattgactcgtgaactaaggttcgttaatgccccaactacgtaaaaattctagtgttatttctttattttttttttttatctatttctttagttttcatactttattagtttctaaaaattttggtaaatattttggagcttttattgagagttgagaaagcagtgataccgtcaaaggttgtatactttaaccatggtactcacccgaaacaaaattggcggtcacaatggagacactcgtcacactcttatggatgatgtatatcctacagtccaggcgaagacaagagtcgatggagatccaccagaagcaatcattcgtcctactaaaaagactcaacgcaataaaggaatatgttgatgaaaatccaatcaatagggatcgagaggaagatcctgaaaatgaagatcttgaagatgataggaaagaaaaagaagatgagggatattattatgagcccgatcccgcagcactgaggtggccaaagaactcgccaaaaccaagctgaaattggcggcacaaaaagaattctccaaccagatgcaagcaaccttggccatactagaatccagacttgagcaagagaatgtagctcctgatgaacatattcatgatgatcctactcctcaggacaataatactacaaaaagaatagaccttaaagatagtgaaacttctgatcccaacagggacaaagaaaaagtgtcataggggaacctctgagaaatactgctttaactactctattaaaaactacgaatgttgttggccaacctctgcaagaaaagaaggtagccaatgctccagggcaaggcaatcttatttatttgagaggcatagttgtgcaaaatgataggcctagtgctcagatgcaaaggcctaccattcgaggaagcaaaaaccatcttagtaattttggtgaatggaacgatgatgaggtagatgagattcatccactttttgacggaagtctttcaacaaatgacctttgggaatgtttaaatgcgaagaaagaaaaaggtaaaagcaagaaggtaagtgttggaattattttaccaggaact

SEQ ID NO: 118456 - DNA, 951 bp, Cannabis sativa
tcccctaaaccttccttcagcttccaaaatgtcacgcgcacggcggagccgggaggcacagtcacccggtcaccgccgaacgcgtcggtgaaccaatcgactgcgagcatatcttcgacgagatggttggtttctttttttatactcaggtggagcgggtgtacgctgtacgcgctgagttcggatgtggatctgaagcggctgtgggacacgtgagtgaaggcgagtgaggtggagtttgatgatgatcggagtggtgcagcggagagatagaggacttcgtccatgccctgcaagcccttgattttgttgaccatggcgttgacttcggacgtctccgcattgtctttgagcttgaagaggatgacgtgttcgatgtttagggatgaagacatagttggtttggttttggtagagcaacacaagtgaagaagtatatcttatataaatctctatgttatacattgaaatttgataaattactaatttgtatcctgtactgtagtaatacataattttgggacgtgttataattaaacatacttattagactgtataattacatggtaattgtgtataattacatggtaattgtgtaattagagccaattatactccctccaattctcatggtgtctcatgtataattaaactgagtaattagtaaaaacatattattttaaatattaaccactaaaaaaaagtgtaactacttattattttgataaactaaaatattataaattcatatgtcattatcacttcaaatctaaatacacttatattttaaaatatagtgtaacaattattaggctatataattactactctagtaattacactaattaattagtaatgattctcccaaactttgacatgtactaaatcatatcccatgaacttttttgaccgttaaaaattctccccgaactattaatattgttaaattta

SEQ ID NO: 118457 - DNA, 1213 bp, Cannabis sativa
ggttcgaccttgcacttacatgaacattatattctgaaacgattcgtgcacttgcgagtataaatattaaaacactcacttttgaggacaacatatagcaattgtaatgggactacgttattttgagtttttatttctcacaagatggtaatttcaacaatacactaagtgtcagaagctccgaattctagagagagaaactctacagagagaagctctgatcttgtgggtgcttctaggaggcaaagcttaaaggctcatgaccgaaggggttcaaatgctcttggtagtaaaaagttgattaggtggaccatatgttatagtaaagagatcgtcaccactcagcctccattagctccaacagttccaaattcttctatccaactactcagagacaagacaagtttgcctccacttcttccttgcaatatttcctttccagtttgtccttcttcattctcagaggaggttcgtgctcaagtagaggttgttaacaaagttctccgctcaagaatcaactcagaaaatgaaaaaatgaggaaaaagggaaccttgctcttaactaggcggggcactgaatttgccaatgctacaaagttcaatgagccacttcctgatatattcaattgctaagaggctccagtctaaagtaggcttagatctttctccttttatagcaggcttattggatctaaatgctattacatgtagcatactaagttctgataagtttgccataatggcaagtggagatccattacgaaccaagctgctgctataagctcattaacatctgattagattatatatatatatattttcatttttgaaatatatctaatctcatacatcttattttgagtttgatggcagaaagatgctcttccttggttaacaagctgtcatatgagattgaaaccttaaaggttgaatgtgaccaagttgtgcaacacaaagaagaaactatcaaagctttgaacgatgccaagtctcgtgctgaggctatgatcaaatagagggtcgaagcttctcttaatgatattgtgtctagctacaaaacttctaccaaggcagaaaaggagcgcactgaaagatataaggtatcttataagaaagcccattcgcgttgtaatgccctaatctatagggatgccacatgtgtgattttataaactagtttaatactaatagattaattaattattaaaaaccg

SEQ ID NO: 118458 - DNA, 1259 bp, Cannabis sativa
agagagagagagaaagaggaggaagaaggaacacgtttgagtcttactattctctcctgatctgcaaattaaaactggttggttagggttactgctttagaaagataagcaagcaaggatacagtagaacagagaaaagaaaactcaagaaaagaaaaaagaggggctttgtttttctttttaggttagtgaatgaatgttcctagctatgtttatcagtgtagctagatttatttttatacaaacatatctatatatggatgccatattgttggtaccacctgagatgggtgtatttatgatgatcatgagctagctagcggctggagaattgtgtggatttttcagctttgaaaataaaattgtttagaagaaaatttggaaaagggattggatggatgatatgtagagagagaaagaaaagagttgtacataaccttcttaattaggtatttagtaggatattatagatttatgatagtagatagatgatgaataactacagtacaattactatacaagtgaaccccgcaacaaataaatgagaaaaaaaagttagctacagtgaaaacatcacgtgggagctgggatgaatagagtaatttagctgatgatcagtcaacatccagagaaaaataattacaaataaataaataaaaagaaagtgaaaatagaaaagaagagaacaatggcaaaatttaatggcagaaaatggcatgtctaccgtttatagggccaagacttgctagagagagaaagagagaagccattatatgatgaatagatgagagagagaggacattgtacacagtgtacacgtaggtatgtatggaccgtaccgtcaggaaaggcaacgctcgttttgactgaactcactttctcaatcacttctctctctcactcactcacagctaataattaacattatgtaacttaatttttaaagctgttaaaatttctattaaattattgggattgttgaatttaaaatttttatgtatggataaaaatttagaagatatgatcatttaatacatatcaaagtccagagagatgatttagtaaatatcaaaatttagagaacatgatttagtttataaacgatcaccgaattaataaaattagacgaattttttaaaatctatctttctcaatagttcaggaaaacttttagggtgcgtttggaaagccacaatgtaattggatttgtatgtaattggaggtaattacacaatttgacatgtttgtctgaccatgta

SEQ ID NO: 118459 - DNA, 2104 bp, Cannabis sativa
  modified_base (34)..(73): a, c, t, g, unknown or other
tttcaaaaacaaaaattttaaaaacaaaaatttnnnnnnnnnnnnnnnnnnnnnnnnnnnnnnnnnnnnnnnnttaccaaacggcacctaaataaatttgtttaataaaacaaaaagggtatatatagaaacttaagaaaccctagagtctttagggaaaaaaaaaaccctagagttgaaaacagtttcagctttctttctctgttgttgttgttgttgttgttgccgctgccgtggccgaggccgttgtcgttgtcgttattgttgttgttatgttttataatcagtttcagaaaagtgtaatcttgatgttttgattatctattttgccagtgtgctgttcatttgaacatttttatgtaatttggtttgctcttacggataattgtcttgaatattatcacatatgattgggcatgaaatttttactttgaacattggttctctatagctcaaaaaaaaaaaaagtagaaaataaaaagttggaatcgataataaaagcatttcatttcttgatattgtggtagttttttattcaaagttcaaagcatttcattataaatctaatagagttttgtttgattgctgatatatgttgaattggagcctcatttggtattggaactgttttttttctttctttctggtgtggaattaagcttgattaaccctacttattaaactccatttatgtgtgtatattgtatatgtaagaggtctggactttaatggggaaccaataattgtttcttacttaattaatgaacagagggataattgctcttgtgggtttaggattgaatcgcactagttattctgcaattaatttgtaagatataattgtgttgaatatttcatgtgtgttactgtagtatttgggaaattatgttactaagaattatcaattcagaattattttatagttgcagcaatattttgatcagccttaactagatcaaagttttttatatatttaaaattgggaaaaaaaatatgaaaatacaaaaaaggaaaaaaaaaaattattgaaatacactaggacggccatttaaactattatacagcccacaaataaatatttacaaaaataccacctcctctaaaccttcagccgcacaaaacagaacgatgaacaacaacaatcttcaatcgttcaaaccagcaacacaaccgaaatgaaaccaaatcaagaggaagaccaccattaattccagcgaatttcactgaaaaagaagacagaacgatctaaacggaaattggcgaaaaacagatcagaaaaattgggacgaactgaacttaaacactcatttttggttttattcgatcaaactaactcctcctaatatcgaaattcagattcatataatgtagatctctgaccaacagatctggaactccccccctgaatccaaaaacatgtataatgtgaaaaataacaaaaaaatcatgaataatagatctaaggtacatacagttgcattttggttgatttttgatttttaatatggaatatattaatttataaacacaataagaaaagcaaattcgaattaatctacagccagttacgtataagtatgtttcttttttttttggttgctttggtagttgcattatcgtttcataatattatttatcaaatttgtagaaatttcatttgacgatgaaaaggacagatcacttcgaaaaacactacttctacattgtaagtattatgaaaatagttgcatattagttttataatagttgcaaaaaagttttgatacaaacaaaaatattgaaacaattgtacacatgcaaacagaagaagataatagcttcaagtacttgtttgttgcactagatgcttcaataaaaggatggaagaagtgcaaaccaataatagttgttgatggaacttttctaaaatcaacatatggaggaacattgctctctgcttgtacacaagatgcaaatcgacatatttttccctagcattttctgttgtggattctagaaaacaagaactcatggcaatagttttttacaaaactaagggaaacatatgggatcagagaagaacagtgcttgatctcagacagacatgagagcataattaaggtag

SEQ ID NO: 118460 - DNA, 5761 bp, Cannabis sativa
tagcaacgatctgcacagtacgtttaaaaatcacgtaatacgcctatggtagttagggtgttacaacaagtttgaagacctcaaccattggcatacatccacaaatcttaacaggagtggcagcactagacctggaagcagtaaataaactatagaattatcataaagtaaaagaagcccaagaaattatcatcttcaacctcataattttgcatataatgtacggtgttaactcgaaaacttttcctagtgacatggacattaatatttgccatgtggcaagaaggatggcatcacaaaatttagtagacccgagttataacagtcgacttgggatgggaccctagccctgtggccaggttgacttcgggagctcatcaaaggcctgagagttgaaattacatatgaatctgcaactcggaagccaacctgggcacctagggtttcacctggtgcccaggttgacattctcaactagagttttagtttttgggaccttcttagtgtaaaaggatcaaaacttgcattggaaaatcaactagacgtaccacagacatatttgaggcatcagaattagaatcaaagcaaattcatttttgagtactcggggcctagagcatccaatgcccaggttgaaagtctgtcaatctgggaaccttccaagtatcagatcacaaattcaaccttttcatcttctttgtcttcataaaaaacagggaaataagtcttttagagaagaaacaacacttcctaggtgccaaagacgaggcccatcgtcaaggttgacacctagggttggcttagcgcctaggttgacattttgtcaacgtgagcccttttcgatgatattttttaagaactctttcaagcatcttctctaattttacaaaatattgagattcaacaatttttgaggactaaacagatttttttgagggccgaaactgggacccagtgcccaggttgatgtattgtcaaactgggctattttcgatcaagttcatcaaaaagtgttccaggtattttttctattataaaaaataatgaagattcaagcaaacacgaggagaaaatcacaaaatcaagcccctgtaaatgggtagattctagtccatatttctgagttaatattttggtactttcattgaaagccacaactcaagaaagttactagcaagatggttgtaacattctctacaagtgttgacagaggaatcccaacaactggccaagcaactaggggcatgccagttgatggagttagaaccaggactactcttgtgccccaggtgccaggagcaagcctcgaaactgactccttaacttttcctccaagtccatcatcaaacactcttgggactgacactaatgaccagatcccacttagagagcatgaagtggagattgaagactctaaggaggccgatatttaggtcgcttagctcaaccaaactatggcgacttgcaataaaaactgcgagactctctcgataagcagcatgaatagtttcaacattggttcgtggaaaactagaagaacattaaaagtcaacatattgagcaggaacaacgaagagttaacctgtctcaatgaattatggaagattttcactctaatcaaagaactacttctcgtagaagttttttcgagttggtgagagagattcctcatcaaccaattggtcacgtgggaactagtgctcaaggaaaaacccttaatgctcaaaattccaccaccacacctagtaaccaagcaggcactaagaaaacaccaggggtggagacctcccgtagggaaagtacctttgagaaagagcccaaaaggactcaagctcgtgggtgccaacaaatgggacctccacctgatgttgaccgacctcgcaacaataagagaaccaacaggattcctacaccaagtccttatcgtcgttctcatgaaaccaggcctcgagaccctgcaaggggaaatggacctgctactcaaattgaaggaggtagtaggggacactacttcgaaattagaggctacgagatctgatgggtgaggaccaatgagccacttcatactcaaaaatacttataggatgaaaggggtgaattgtgccgttactttgcccgtggccccaatggacaacagtataagtacttccctcgggtacatggaaaggaattgaatctgagcaaccaattcaattctcttcacacttgtgaattgtgatccagttgaagactactttgagggaagttgccactaaaatgctctgaatgaacactcccacaatgggtcattccaagatgatccagagttcattctagaggcctcactagggtttctttcacaaccctgtggccaggagacaactataagacccagaacgaccggagcataaaattgacctggaagaccaagagatctgtgttagctcttaataaagaaaataacggtggaagcaagaaattctagaggagactctactctagtaaccaaagctctgactgggatgcatatcaccatccatggggtcaaccagacaaaatttgacaccttggcagctttagtgaaggggatcacgactcttatcttgtctgaattcgaacttgatagagaacgacactcaccactctctaaacaaatcaaagctcttcctattcttctaaagttcaagagcctttcctggaataaatacactgggaaggaagatttattatctcacatccattagtttaaagtgtagaccaatctgtaaggtgtgagggacgacttaagtttagaatcttccctaccacactgacaggcctagcttagtggtggtaccttaaactctcccctggattaatcgactcatggaaagatctagtggatgcttttggtaaccagttctctccttctcgacaatgtcagatcgagcccaatgatttggtggatgtcaagcaacaggaagatgagcccctcaaggactacatccaacgattgcacttgcaactgaactcaaggggatgagtcctctgtggtctgacctttgtctaaagacggtatacaccatgaatgacatcttagatagagtggatgactttatcaaactagaagaagcaatcacccgagccaagggcttaaagggtgggaagaagaaatcaccagactcccaagcccttgttactaaggcggagggcaatgtgaagaaaggaggttcaaatagaggaaaaagagccaataatggtggcaagcaaggaactccccaagtggaaagaagcctaagactgggggcaagaccttacaagagtatgagcctcacttcaccacttactccattgtcgtattacaaaccttttcctttcaaagagtcagggaagaggacatgaacaaattctatcactaccacaacaattacggtcatgatactaatgagtgtaattagttgtgagacgagataaaatttctcatcagacagaatcatgttattcttcagtggtatgtatgatctgaagctccagctagaggcaatgcacctctccagcctgcgccagttatagacaggctagagatcgtgattagaggccctcacatagttggaaactcaaggatgaccttagaatggtatgcaagatcaatacagcacgagccaagagccaaaatcttggaggtagcagaacgtcctccaaagtctcagcgctatagatgttaacgcatcacctttgaagaatcagattcctatcattccagctaccctcacaatggtcctttggttgttgaatacaaatagctaatatgatggtggctagggtgatgattgacgatggagcatcaaacatcctattcaagtaacccctaatcagaatgggtttgtccttagaaggcctgaaaccacgcgagtacttatgtatggtttcagtggagccgacattgctccatgtggaaagatcaaactaccactcactattatcactgccccaaagtagaccaccatcatggtcgcattcatagtggtggatgtgaagtctccgtacaacgtgatgcttagaaggcctactctctatgacctttgagctatctcctcagtgtaccatttgctcgtcaagttcccaatgatgcccaatatcagttgtctccttggcaatcaagaactgcctgcgagtgttataacacaatcgttatcacttgccaagaagacctcctctattgctatggcttcaaaggggacgaacaagacctcctctactattatgacaccagggggacgagcaaggcctctcttgcaaaagccggagagacgatgaagacttgtgaagtccaaattacggagaagacggagacgacacctaaagccacttgaaggtgcgcacaagccggggaagacattgacccctattttggggaaattgacttaggagttggtcttattaaggaactcaaagaacttcctctcaacctatcagacccgactaaggttatcaagattaaaacaaacttgatgaaggtcttgaaggagatgctcatggcttgcctcaggagaaatcaagatattttttcatggtcacatgaggacatgatcgggatcgactcccaagtcatctgtcacgccctcaacatagacaaagttaactttaggcttgtacaatagaaacgtaggctccttgacaaagagcgctccaaagctttcaaggaagaagttaaaactgtttgggtatctaaccctatgttggtgcctaactcgaatataaagtggagaacttgcatcaacttcattgacctcaacaaagcatgccctaaggattttttcccactaccacaaattgatcaactagtggacgtgacagttggccatgaacttctcacattcatagatgcctattctagctacaatcaaatcagcatgcacgtactagataaagagcatactagtttatgaactaacattgggatttattgctacaaagttatgccttttagacttacgaatgtaggtgttacttatcaaagactagtctaccgtatgtttcaagaccatatcggaaacaatagagaagtctatgttgatgataggctggttaagtagaaaagatctaaagaccacatcaaagatctagaggagtgcttcaacatcttgcaggaatatcgaatgaagctcaaccttctaaaatgtgccttcagtgtctagtcatgaaagtttctcagattcattattaacttaaaaggtattgaagcaaatctagaaaagatcaaggccttgcaagatatggagtcaccattgcagataaaagacgtgcagatcctaacatgacaaattactacacttagcaggtttatctccaagttaaccgagtgtgttcccttctttaatttacttatgggaaggaacaaggggtttgattggactgatgaatatgagaaagccttctaaaatctcaaacatcacctggccaagcctcccatcctatcctagccaatagatggtgaagaactatacatatacttagaaatcaccaagcatgcatccagtgctagtgcgtgaggaagaagcggtacaacaccctgtgtactacattagtaggcgtcttatcagggctgagtcaagttatcccccattgagaagctagcctactacttggtcctagcctccagaaagctaagggcatacgtctaagctcacacagttaggggtgttcatccaatccgcactattttgctcatagtgcatccgatccgcattaagtgcggatttcattttttggatccaatctaatccgcacaatagttcaaatc

SEQ ID NO: 118461 - DNA, 1271 bp, Cannabis sativa
ctcatagcccaaagacatccgaaccttctcaagaattgcttttccacacaaagtttcacaaagaaaaataaacttaggcttcttttggacaacaagatccttcaagaattgaatggcccgagggttcccaagcccccgacagttccaactcaaagtactcataattcctagcgagcccgtgattccaggcccgccctaaccatgttttttgtaaccatattctcctctttttcagaaatactattttttgtaaagcccacattcccaggcccaacagaattcttccttttcctttttaattctgatatagtcatatcctcatcaaaatcctcaccatcattgaccatattaacatcaaaatttccctcgttattttcctcaaattcaggagccagctgttgcaccaaagtcggctcatgaaacccacaattcactcctttcccacgatcaatgtccttcctcccagaatctcactcattactgccattaacgttgacagctgaagccgctcctccgtccaagttcaccccagcatccccacctccattaatgccggccaccttaccccgactaccttcctcatgatcaaacctaccccctctgcctgaccgaagccattgagacctgataagtttgttgcttcgttgaaccgtggccctcatgaaactgccatatggtttaatgatttctccctctggcgtgtcgaagatctttgggaaagttttatccgcatggcctatgataccacaaataaaacagaaggttggggcatgttcatacttgaaattcacccagaaccaatccaaactgtctaatcttcggatcttcatacgacgcttcagtggatgatcaagattgatcgtaactcagatcttaaaatactcctgccaaacaccggaaaaattattctcatcggatttgatatatttgccaatatagttcccaatccttcgtagagtacgctcggtacgaaagccatgttgcagatcatggatctgtatccacatatccaaccgattcaagattatcgatctcgggttatctcctgctttcaacctctcaaagatgagttgttttcgttcgaacgtccatgggctaccattgatcactcttttgatgtctatttcatggtaaaactgaaatagaaagcgattttgttccaactctttaacgtacaaacctttccctggcttccaaagaaaagccatctgttaggctaattttagtctaagttttgggtcttattttcggttagttttcactctttgttt

SEQ ID NO: 118462 - DNA, 1031 bp, Cannabis sativa
tttttaaaaaaaaaaactaaccttcaacattcgcagttcgtaggtggttgggaaaactttgtgggtggtgctcggtggttggggaactctattggtggcacaaggtggttgtgatgcttcgtgggtggccctcggggggctcagggttgaaatttggtggtggttttgtgtcgtttcaacttagggaagaagagagctagagagaaaagagagcagagagatgagtgggggatttctaaatgggaaggacatttttggaatagggggaaattgacctattccctcaatattggtacacataagtttatagaattaattttcctctaatgtatgcatacataatcaaaatttccatttatatatatgtataatttaaaaaatcgaataaggatcaaaaaaattattattcactcagagaaagaaaagttcttgctcatgtgctgagataaactcaataacatattatatagttatatcatattaacccacactaattcttgtgtgtggtggaagatctagaaaaccaaggtttgagtttgacgtcaccaacccaagaatacaacttacgaaaagattcgatgataccctaattcgctttaagaggaaaatatatttcctttcatctttttatttcatatttaatctatatacatatggagatccttgggtatgagtacgatgataatctaaataaatacttccgttacgtacttgatttagtactacaaaactaatacaaaattaggtggcttccctgtccacatctcttagggtgttttgaacttatttgctactgaagaacatctattaaggtaggatgctatcataaggtcttctctaaaatggtctctccagactagcttccaacaacaagcacctaactctctctccatgagagttctattcatcctctcatcaatgctattttgctgacggttttccatgtgacagtcagtagtctcgtgatccgtaaggggaaataccgggtaagctgtgcaatcccacaccgcctggggaaggtcaagtgggat

SEQ ID NO: 118463 - DNA, 1279 bp, Cannabis sativa
  modified_base (1240)..(1253): a, c, t, g, unknown or other
tgtagaggttcggctagtaaaaaaatgttcaccctttgtacaaaaaaaaaaataaaggtatttataagcttacatgtgtgtaagggcattcccttttcccaccttgtgtttaatactcaagacactgcaaaagcaggcactacaacatgacgatatgactgttagttggtaggaaacttccccattgtgtggtgtacggctgatatgaaggattacatgtgaatgaggacacatgtcactcaaaggtttcaccttgaaaagttatttcctagacaagttgttggagaaaaaggggctttagaggcacgtacgataactaccatgatctgacgcaagggataagatctgattcgttgttaaaggattaataaccattgctttgggttatggataggatattttcgaataagcttcgagatcaacgtgccaaagccttcctggatcacactgacctattacctttctggaatacttgaagctctggataactctgattgtccccaatggaggattgatagtaagagtcctagagtcctatcctcactcactaacattggggacctttgaatgacttctggaatattatagtctctttaatgtaattaagcaaaaagtacacattgacaataaatagcccaaggtggcaccctttcgtgatttccatgtatcaggcattcaggaatacatataattacccacaagctcctaggactcttgaatgatgggagcttgcaacttcttttcgaatgttggattcattatcatggtatgccagaaatatcttgaaatgttgaagcaaccttccgtgttactttggaaaattgaagagttgatatatcccgttgttgtgatactactatcattttgttaaaatgtggtgtccattttgtgaagctgtggggcttacgtgctaggttctagcgcattccttgtggatagtgagtggcagcaagacttgaaaagatggctggtgcgtgccgccttggcttgctgctatgaaatgataagtaatgaatactttgttctttctcccaaggaacattaaatgcaaacttttcgagtccccagtcggtggatggagcagcttttgattggtatgatctggaccatccatttcaaaacatattaagccgttgccacccatataaatgaaaaacttggtgaaaaagctaattttttcctttgtcactctaatctacaagttttagcccatagaactgttggaatttattttactagnnnnnnnnnnnnnnaccaagtatgtttgattaacatccta

SEQ ID NO: 118464 - DNA, 2115 bp, Cannabis sativa
ttataagtctatattaaaaattatgttgtataatatttttaattatttttttcacattagaaaattatatatatttgataaaaataacttataataatataaaatatatttttttaacttgtagtttatagaaaattttgcgttgatttgttttgttaataataaaaataaagattagataggttccagtaaaagggaggaatgctttccacattcacccaaaggtgttttatcaaaacgaacttcagctggtgtgagccatgagggccatggcataataataataagggcaccacagacaaaccacggtcttctcgcaaggacgttcatagcgtcttccctgttagcaaaggtgaactgaatcagaccaccttcaatctccttccatttccatcccttgatagagtgccacgataatttcagagaaccctgtatggccgcttttccaagtttatatctgctaatgattttaccaagtaagacctagtttgcttcttggcgctcgtctacctcaccagggttaagactgaaagtaatgtcactttgagagatttgaactgcttcctcgaaaagattacagacaccagagggatccatgttacttgttgcaaagaagagcacagactaggctgaagagcaagtgtgaagcaatcctctatagacttagaagtatactcctagagagctatgcagcattgttcctagagagcaattgtcaccaaagcttcccctgtgtatgaacttccctatggcattgaagatgtgtaggattgagtactttgcgatttagggcaactatcaacctcaatacccttatattctctggctttttcctccgtcgccaaaggctaaaggacctctggatacagtatcgctatgagaaacttccaaaactgtatttttagtgtgggttacttacacacgaccaaagtatctgcttcaaggctcctacggttgtgaaggatgataacggaaatttctgccccatgtttgggatatggcttaagaaagatgcccaagagaagtctacgttcacaacgccgctggccaaatggttccaggaccgggttctccaaaaacagctggggcacgatccaatacttagaaaccagatgagaatccacaagtccatccaaaatggcgagacagctgagatgagggaatgccgtttgcaattcccggctaagaaacgtattgtggaagactctgatgacatacccgatgactccaccccggagaaagttattatccaactcccaatggttaacctaccgggtataggggaagttgctccatttgggaataataccaaaaaagtaatcttactagacaaaaggatccctgactccttagccccttcatccttcaagcgcaaaagcgatgttaccattgccacttctcaggtttccagttcgagttaggacaaatctagtgcgaaggaaagtctccaaacttctaacccaaatgggaaggcatctcttctaagctctaaggataatggggatttgaccaaggactcctgtccacctcgtaaggttacctaacccaagaagttttgtaaaggtataggcccatcttatcaagactccccactttgtacacaggcccattgggtcacctcaccatctaaacttctatggggccagccaaaagtaagggaattacttatgggctcattaactgtggataaataccaccgggagcccatattattcaatccaattctggatatagaagacttcagagtctatgaacacttctcaggcccacgtaagaggaaagcttcggatcgtatactttttcacccccacccaatttactcagccaatgatcagcatatgtcacagtcctttgaaggaattgccccagttgagtccgtgcaatcgacccaggccattgatgactatgttgaccctactgtttcttccctccctaatgaagacacaagattcaattttgggaacattgaggatctcaccatgaggattttcaattttgggctatggagacttgctcggaaaagtctccacagtcgccatgaaaatattggcttggaactgtcgtgggctcaagaataccacgacagttcgacaattggcggctttgatccgtcag

SEQ ID NO: 118465 - DNA, 1438 bp, Cannabis sativa
  modified_base (375)..(381): a, c, t, g, unknown or other
  modified_base (561)..(561): a, c, t, g, unknown or other
tcataatttaggtattatgttttctatggattttttatattaatattgatagctaaaattataggggtgcacaaaatatggcaaaccattcaaacccaatttattttttgtagtaaagggttatgttaagagtaggtcatcactcattagaaaagtaatagaccatataataattatgggttggttatgagtttgacacattttaactttatataacccaaaccaacccatttcttaaaaaatgttccaaaacacaaatatatttacgttttgatacataaataaattatattgtgataactttagaaagtgaattaaccaaaacacatcattaacacgtagtctatagttaccctactacttctaccaacaagnnnnnnntgagaatcaatcactattattaactttactactcacacaatgataccactactactttagttatttttaaagcactatattacacatacatacacacatatacatatatatatatatgtattatttttttgtgtatgcactaggttaaataattttatcctatttgtaacataaatattnaagtttaaaatattcatctcaacccaatgaacccaacccaacccactccctatattattgtactaagagggttgggttgtacaataaaaaatttgaatggtttatagcttattcaaatcgcaataattgggttggcctattaaaacacctctaacccaaccaatccatcctatgtgcacccccaactaaactccaatttaggaattgtaatggagatatgttgaaattttaatgaattaatgctattttgatttcttttttattgatgtgtgatttattagtatttgtatttattacgtgtgtttgattgaccatcttatacatgatttatgatctcaatataaaatctgaaaagtgagtattaataatgctttgaataaacatagtttttgacacaaaacaaaagtatgtgttgcgtgtgtagcttttgggctattcttaatgccgattacttgtgtaatattttgagagatgtagtaattattattacaatttagtactttaatgtttcaaaagaattttggtgaaaataatccgctatcatatatagaagaaaattgatttgcattattgaaataggaagtggatacaattgatgttaattccctatatttcattacttgattaaatcttgtttattgttttgtcatttaattttttcttagattattaatttcaaaattcattatttgattgtcaaatagaaataataattcaattatttagtacttagttacagtcctcgtggtagcaatttcacttatctaagtatattacttgttttgtttggtgttgcaatgttttttcagatttgctagctctagcgacaacttttaattgtgagaaggtgtttgctgtttgaagacgttatagcttt

SEQ ID NO: 118466 - DNA, 2265 bp, Cannabis sativa
tatatatatatatattgtgagaaatttcaactatggagcataattaaactaacttaaaatgaatcaataaataatagcaataacaaaattaaccaaacaaaattcaagaattaaaaatataacggcgtataatagaaatgataaaaccataaataaatagtgcaagaataccgtaaaatcaacaccaagaataatactgattcaagtccaatatagatcgatgtgatctatgattctactccagtcttggtacatcactgaaacttcttttattgattgagccagaacacaggtacaatacagttgagagcgattatctgttttgattctctctaggtgttttctctaacactcttccttgacaagcttcttcatctatagaagcttatcctttacaaaattcaagacccaatcctctcttttctctgtacctctcaattaaaactctctctcaaagaacttgcatgctctgcttctagtgttttgtgtaatatcaaatgaagaggatggttgtatttatagatcgaggatatgaattccaaaggtggtggcttcaaataactaagtagttaattcagttaagacttaaccaacttaactggcttcttaaaatgagatctccaagtcagctcttggcatcgagctcactccaaacatgtatcaagcttcccggacggacatcccaaactgatgaagcacaatctggaaggacgccctggataggcgcaaagcctattggaatagactattcagattcccttcctggatgaaataactagtcttttggaactcctttttggaggacgactagctttccacaagacttcttccggatagataagctagccttccataacaccttttcggacaacgaccaactttccaaaaaacttcttctagtttggataagctagcctaccgcaacgcctttccagatgatgactagctttcctaaagactcaacttgaggcatttttatttggaggaactatatcacaaatccacctagttcttttaaattaaaagccatggttatgaagaaaatatgcaaccatcatggttgttattctgggtatctcaatgtgctaatttgtgagattgatcaagttcaggcagtgctggaacttgttatctgttaggacctaagtcccaacattatacaaattatcttttgatttgactttctctaattcatccggtccttcttctatcttttttctaatccaatagagccttatgtctatatgctttttcttttcatgataaattgggttcttgcaaagatgaattattttctgactatctgagttgagagataaatggagctaaaaatatcaaaatttttgatcaaaactatcacatggactcgagaattattctccttgatcgttagttccttctttcatgcatgagtggttttagaaatatgtatatgtgtacatacatatataaaagatatagcttattagtactattttcccccttagagacttcaattatatatcaaacattaaaatactaaataaaggattagtgtggtcacatgagagttgcactcttagtcaaggtctaccgattgtgaagggaggtattgaaagggagttacggtttgattgggtataacttcgtaattcaaaatttattaaatatcaactagagttagtctattatcatggcatgggttagaggggtatgtaatagttagtgtggaggcttataaatagaacatagctcatttcatttttgatacttagactgaaaccacctcaaagcactctaaacttttgtcttcttttttttttttccttcttctatagttaatcacttgtttcctaaggagccaaggcaaccatcataattaatataagttctaagagccaaggcaaccatcataattactacaagttttaacatcaatatactctcgtaaccatggtgagcatcatcctctcataaatatatatatacttatccttcattatatcgacatcaccactaccattattttatgttcacgttttactcatgccagattttatttagaaaccaaggtaataaatataaatttaagttttacgtaaaataattattggcttaaggatcgatttcgcaatcaagctaattttttttacattcgaggtaagaaaattaagtaaaaaaaaatattttttgtatacattaacattcataagaaaagtgagaattgtaaaaaaaaaagttaactaaagtcttctgcctgactctttattgtttgttatttaatgt

SEQ ID NO: 118467 - DNA, 1207 bp, Cannabis sativa
ataaaatatttgaattttatttttttgtactttaaataatttggaatttaaaaaaaagttaaaaatatttataaataactataaaatacataattttataaaaaataaataaattaaaaaactctcattaatattgaaatagataagaaatttattagaaagattatttacttatttattattttttttttataatgaaacctctctcttatatatatataaaaatatataggtacatattcttttctctcgccagtaaagtataacttcttttttgtctaattagaattttttcctctcttcaacaaaagaaaaattacaaatcgaattattttttcaattatacaataaattttatatatttctactttctgattataaaaaagctggaatgaatggtaccaattattggacaaaagctgtagattttaggaaaattctaacagttactttttttgttattaggatttcttcaaaagacttctggtactacatttgaactaaaatttctaataatttttctactcaaataacttgtatgttatacataaatatgtccatttttttcaacataatttaagtaatatattatttttgctataagagcttttctaaagtcatcgccaatgataaaacctaaatttgatattaaatcaataaaaaaaattactgttttaacactaaattttttttcaattccaatcacaacactaaaaattacaccaaattttatattatttattattttatactaaaaatatataattatctagtttttcctcttaaaaagtattatttaattattaaatactttatttaaaaaactagtgtggtctaaagtgtctcactaaatttagtggtacattgtagacaaagtcatttataagtatagttttagtgtcccattggagtaaatatagtgtgaaactacactatatttggtgttttagagtccagttggagatgccctgagggcttcccgaataggacactaaaacctcaaaaatagtgaagttcaagtaaaaaattgttccaatagaactctatgttgggtccgccattatctggtggtatagtattacaccaaatttgtcgttcattatagaacctgttgcatttgactttttttctttattatatcaatattttgtgtttaattttatatttaatgtataggaataggtttcaatggttacatttttattgt

SEQ ID NO: 118468 - DNA, 1543 bp, Cannabis sativa
aaacccctccctttcacctccctttcaccctccctttcaccaaaactttcaccaaaaattcaccaaaaaaaaaaaataaataaataataaaaagacacttttattctttttctttctcactttgaaaatataaataaataaataaaggaaggatatttttatcaattcaattctaattacaaagtttattacaaaataaatcaaacatggtaatagtattcccattactattaccattacattctattactattcctattaccattactattacattccggtaaatcaaataccacctaagagttttagagagcctttgagtgttgtaattttgagattcacatatcgatcgataaggtggcttagttgttttttagccttgattaaagagtgcattatgttattaaagaatgattgcttacattaatctctgatcttgttttgctctctatgtttgaatttttgattatctcatactttcataatatctgtaactattgaaggttgttttttttctccggctaagtctgcccgtttttttttttggcttaggtgtagcttcagaattgtattttgttattacaatttttttttactctgattagttttgtctttgtgatatggttttaagtattttagtcttgcctctgtgacttagttttgagtgtttctagtcttgtctatgtgacataattttattttgttttatttcattattggttcttctttgttctccgtggctccccatcaaatcactgtcagtacttggaaataacaagttctctgaagggattgttcgtagtgcgtgcgttacgtaccttacacaatagttgagtatccaagttaggaggttgaacgaacctttttgcaacactttctattgttgtgtcttctaagtacttaaggttatttgtgatgttgcagccctttttaattttattttagttattttagctcatttttttaattctaatcctgactgtatttccaaccggagatatcctgattggattgtaggttactatttaagctaattgttattaataaaattctatacttgattcaaaaatatatatatatttattgagttctaatctattctcggaaatcacttatgtggcacgcctctaacatgatctcgagaaatttgggaatctatctcctctaccaacctttggaaaggcacacgacaaaaaggagatctcatttttgagggggtgaccctccattctgacattctttttttccaacgatggtgcatgtcctctcctattattgtcaatattactataccatacgacaaattaattttaaaaattgggcctcacctaggctaatattgattttatggtactaaattagatacgcaacagattaatttcatattgctaattatcattataccatattaccaatagatcttcatgtgtgtacattaaatcaaaacacaaattaacaagtttagaacatatacctcttgaagactattagggtatcctcaaaacttctcgtatgttgtaggggtgttcataaaaactgataa

SEQ ID NO: 118469 - DNA, 1422 bp, Cannabis sativa
aaaagacaccaatagacgagataatgctaactttaaagacccgaaatataggtttattataacctaacaaagaccccatacaccctcatcgtgtatgcaaattacataaagccatctatggcttgaaacaagcacctagatcttggaatgataagctgaaatttacacttttcaacaaggggttcaagccatcaaggtcagattcttctaaatttattcatgttgaaggaggctcactaatcatactattggtctatgttaatgatatcctagtgactggtcccaacaaaaaccttatcactgaattaatctcatcactgaatattgacttctcactaaaaaatctttgttgccttcattatttcgttagagttaaagtacttagaaaccacacaggtatgtacctctcagaatccaagtacatttcaaatatgcttaccaaactcaatatggaaggggctaaaccaagtctaagcccaactacttcaacacacaccttagctcttgatatcgaagaactattctcagatcacactctatatagaagtaccttgggagctttgcaatatctcgcattaattaggcctaatgttgctttcatagtaaacaagatcagccaattcatacatgcacctaccataatacactgggaggcttacaagaggttattcaaatatttaaaggggacaatccatgaaggcttacatatcagaacaagcttaagaccgtgtttgcaagcatacacagatgatgactggggcagttgtcctgaagacagaaagtctaccggaggctatattgttttctttggtggaaatctcatatcatggtctctaaaaaagaaaaatgttattgctagaagtagcacagagagtgaattcagttctttagctaatacaacagttgaagttcaatggttgtattctgttctttttgagttgaacgtgtctctaccaacaccgccaattatttgggctgacaaccaaggagctacctctctagctgctaaccctctatttcatgcacagtctaaacacatcgaaatagacttccattttattcgggaccaaatcatagccaaagagattgaagtgagatatgttctttctattgatcaaaccactgatattctcaccaaaccacttagcaaagacagatttgcttacctgaaaaccaaactcaatgtctgttccacacccttttatttgagggaggatgataaagttagtctttcaaatgctaattagttagctattttgtaactatttttctgttacaagttagttacagcctttattcatttctattttttctttgagcagttgtaagactctctcactatatacaaaggctttgtcactaagtcttgtatcttttagaggcttagtgcatgtttgacattataactaaaaaactgttttt

SEQ ID NO: 118470 - DNA, 3784 bp, Cannabis sativa
atccacataattattaatatttataacaaattgatatttactacatatatttgtaatttgtaggtaggatcataagaacaacataatacttattatatgtagaatgagttatcttgtaatagtgataagactgcctttatttgtttatttaatgagaaaatagttgctccaaattcaatcacattttgaggagttgacatcattgcgtccacataaagtttataactaaagacttctgcctttgcattactttgctcactagtgtgtcgaactgagctttctttcttagtttttttcctttctcgacatatttcatcataataggaagatattcatatcctaatttgatgtgaggttcttgcaactcttctataaatattcttatttcttttaaaccatattgccctccatacagtaatactcatttgaaagtaaaatcctcttttgggcttgcaagaaacgagaaacccatttgcttccatatactttgtgaaaaaaaaacaccaaaaaattacatgtgcatcggtatcattttcaaaagaaaaatttcactatttactcataataaaaccctaatatcaaaattaataccttccactagtttgtacaaaataatactattatttttctaaactacccaaaatactcttttatttaattttccctccctaactgtctctctctcttcctcttctctcttttcctcctctctctcttcgtcgttctctctctccaccacaccaagaatcacaaccgatgtgatagaaacccaccccaaatgcctaaacccactccatccaaccaccatctgtttctccctctctatctctctctctctctccatttactgcaggcgacccacgacgacgaagacgacccacgacgatccacagagaacgacgttgacccacgacgacccacaaccaccacaaccaccaccatcacgaccacgaaccaccaagagaacccagagtcaaatcgtcgccaccaccaagctcagtaaaagagtaagttttttttattaaaaattataattttcatagatttggatgcgaatttgtgtatgttcttcaaaatagttgaattgttttagattttggataatgtgtatttttctacatgttcatcagtggtgcttgtttattttaacaatgttatcgatgagatatcgataggttatcgatataatgtcgaccaaaattgaaagtagtttgagcattagaattttgtgtgttattactgtatatcgataggttatcgacatatttttgattaagatatatttttgaaagaatttagttgttatatcgataggatgttgtaggtgtatcgataggatgtcgatacaataagtataataattttaagacctaatttatcgagaatttgtcgacaggatatcaatatgttgttgaaaatgtaatttaattgttttctataattgctaagtgtgataatatcgacagaattatatcgatattttgttgacaattttgtttttttcaaataagtgtgataatattgttggaatgtcgataatttgttgacaggatgtcgatatgttgccgacaatgtgagttaatagttttctgtgattgctaagtgggataatatcgacatgatgtcgacaattttgtttttttgaataagtgtgatcatattgttggaatgtcgatagcttgtcgatatgttatcgataatgtgatttaattgttctgtaatttctaagtgtgataatgtcgataattttttttttgagggcatcagtaatattttttttgttatatattgtttcagattgctccaagactcatagttccagcatctgagcattttaccggtcgtatgacatatagaggcaccggtgcttttgcaaatattaagtcttggtttgaggagtacaatttgaataacacggtgaaataaaaccgttttggcaacttttggaatgtcgtacccctgatattctccacaagatgaaggttgatgttgaggaggatttgcacatgcagttttacattggtcgaaaggagctcagattcagagtggtcgagtttgccctcattataggcctgaactttttctcggggccaacagaagaggagaaggttacgcatgttgctcgcttagggtcagaccgattgatcaacaaatatttcaaccagtctgatagtgtgaagacagaagcactccaagataggttcacaaactgtcagaacccggaagacttgtacaagtttggcttgtgcttgtttgttaaggtagtgctactaggtcgcgaggcaaacgcgctgattacggtcgacatgcttagatatgtcaaagatccagagttcttcttctagattccttggggaaagcactcattcgccaaacttatgcactcgcttcaaaaggacatggtgaaacagaaggtcaactacgagaagaagctgagtttggaagttcaatatgagtgcaaatacacagcttatagcttcgcacctgtagtacaatattgggcgtatgaggccattttagaggttgggaagaggtatggcacgaatcatgggatttggtttcccaggatgcttagctggacgagcaagggtgatatagcgaagaaggacctcaatgcattattttctagacgggtatgagttgctcttatgtttatagtaattatttaagattagtgcttgtaataaatactaaattatttttctcttatatttttggaatcttaaatagtatcttaaagtgatgaagaggttacttccacgcacagaagaggaggaatatgtgaggaccatctcttacgatggtgtggagaacctgattggtggggtggatcctacacaggctgaggaggacacccaagatccagccgtttttagaagacaagcagaaaaagcagcagaatatgttgaaaatgcttctttgcctaagacagatactcaggtaccatttttttaactttttttttttatgattattgattggaattaattgtgatttattagttagttgttgtgaattacatagattgtaatttacttagttagttgtgtttactgtgttaattaaacttgtcgtacatgtatgtcgatatgatatcgacatgatgttgacaggttatcaacaactatgtttgtcatttttttgtggtattatattgagtgttgccgatatgatatcgacgtgttgtcgacattgtttggtttttagtttcaatatgatatcgacatgttgataagtgtttcgacttgtactttattgtgttatttgtaacattgtcgatgacatatcaacatgttgtcgacatgatgtcgatatttatgtagttgattttttatattactgcatgcttaccgtatttttttggtacatattttttttaggtcactgcttcagaccttcagcccagtgcatcatcttcatcaggcctcggtggtgccgagtaaagggaattagtggggaggttggacaggatcgaggctgaccagaaaggtttgtacgcttgtcataccgagctgaacgaagcatatcaaaatagccatatagagctgaagggtggtcaaaacttgattatggagtaacttagaactatatagagcatgttgcattgtgcaccaacgacaacttcagcaccagaacccccaatagatgcatcacccctactagcagctgcatcaccatcaccatctgctatgggtggagatgatgaggtctttcctgacgggtatgatccttacgaggatgctccagctacccctatcgatgcaggcagtgacgaagccagaaa

SEQ ID NO: 118471 - DNA, 1310 bp, Cannabis sativa
ttaatgcatgtttgtgttaattaaattcttcatgaactttataattactttcctttcattttccttttttgtattatcaatgtgaatgaactattatatataataatgaatgagaataatactgaattcaaattttgttgttcaataattaataaatatattgctaatgaatcagtggtaaaatgataaaatgatgttccaatcaaaatataaaatttgtgttagtttggcataaagaaatagtagtttttgtcaaaaatattataattgattcacattgcaaacaacactaatatgggagagaactctcatttagaaaagctaattgtctatctgaataagaagcttaattaatgaaaattcttaaaaaatactattagtgtttagtattctaattaagtaatgtgtaccatataagttaagaaaatgattttcaaaaaatatcgctaaccaatcaatcataaagtgtcacttatagaaagtgttgaacactactagtgctcaatttataaaccataatgttaatgttaaaactaaaatgagaagaagagatactccaacaaaaaaaattaaattataaactttaaaacaactctataaacgcaaagtttaagttaatttcgtcaaaaaaaaaaaagagtgtaaatgatatgaacgtatgtgtatcaaataatatgaaaatttgcatacttatagttaagagtgtcaatattcaatatagttggttcgtttcgccaacaaaataaatatatcataaatcaacaaacataattaatttttttaaaaaaaaatgcaatttaatagatgtaagaggatgcctcaaatatataaaggttatattttgattaaaagctcacttaactaaattgtgagcaatataattaaagttctaggcaccttagaaaaatttcatcccacacaaaatttcataacttttgcaatgagctatatagttattaaattcccacttggaatttaatttcttgacagctttaataacaaattgcaagtttagaactttccctaattgggagaatgccttacgaggaatctcaaacattcttgggccaacacacgacgagtgggccagcccatcagactcttcatgttttgggctcgttatgcagccctaatgtaacagtaacactaacaccatttgaattttttagttgtttatagtaaatattattctaacataaaaataagtctaacatttttgccctttgaactttgacatgtactaaataatgctctttaaacttttaaggtcgttaaaaatactacctaaactattgagattgttagataga

SEQ ID NO: 118472 - DNA, 656 bp, Cannabis sativa
  modified_base (49)..(53): a, c, t, g, unknown or other
  modified_base (568)..(574): a, c, t, g, unknown or other
  modified_base (629)..(631): a, c, t, g, unknown or other
ggggaatttttaacggtcaaaaatgttcagggggcatgatttagtacannnnnaagttcgggagaaaaaattactaattagcctaattattaatgtgtataaaactgtacaaatgtttacaaaaaaaattgtaatttactacgattttgtcatttcttatttacagtatgtatttttgtataaaagtttaacatgtaccgtttttttctcaaatttttatgcattttttgttaattctccaaataagaatataagtcgttgtgtacaaactacccatgtatattatgtatttaaatataaactatttttcttatttttttttatgatatatagggataatattattttattagttttggtgtatttttattaaattatattttggaaaacatatcaaaaaacttatttcgatcaaaataatttcaagtgtataagatcaattagcagtggatggcgaacttagctattttgatccatttcacaaaatgtaatttatcaaaatatataaaagatccaaacacgtaaaaatagctagctatagtattctctctcatatatatatatatannnnnnnatatttatatatactagtaaaaaactacgtgcgaggcacgtatattaaattttannntagtttttttctatgttatttgaaa

SEQ ID NO: 118473 - DNA, 716 bp, Cannabis sativa
attttttggaaaaccgtaaaaatgtaaaagaacattctttgaacgtaaaaatgtaaatattttacaaaaaatagtttcttatgtaattattccttaattttatgtttatttatcaactatcatttattattttactaattttataataaaattaaatataatatattgtataaggattatattactttaaaaataatattttaaatagtattattaaccatttgtatactataacagctacaacttattaataatgtaagaatttccaggaaaaaataataataattctaatagaaatacaaaacagtaaaatacatgttgagttggtttccactatataaaattataaatatataattattctttaccactacttccactaacatatataatttgatttatttatattttttttatatctcagctagcacaaatcttagatactatattatattttgagatacaaaaagattatattaggttttggtactaagcattattaagcacttggtaataatcaaaacactagattattgggtcgtcatgaagatacacacttttaattttaatgtcaaaatatattttctaagtttcaaatgacttcattaaaagatggatggtaatttcaaattatgcttgaaaactatggtattattgtattttaaaagtgttgagaatcatggggttccaactcaaaaccaattggcaatgagtgg

SEQ ID NO: 118474 - DNA, 1380 bp, Cannabis sativa
ttatgggagaaaaacttcattagggaagctttctatccagtttaggtatctaaccctattctagtgcctaaaccgaatggaaagtggaggacctgcgtcaacttcactgacctcaacaaagcatgcccaagagaaaatcttccactacaaagaattgatcaactggtggatgcgacacccgtccataaactcctcacattcatggatgcatattttggttacaactagatcagcatgcatgcaccagacaaagaacaaacaagttttcgacaagtgtgttcccttcttttaatttacctaaaggaagaaacaaggggtttaaatggaatgatgaatgcgagtaagccttctaagctctaaaacatgatcaagtgaagcctcatatcctatcaaagtaaatagattgtgaagaactatacatctccctggtgagcacggagtatacagtcagtgctactcaagtgtgagaggaaggagtaaagcatcctatctactacatcaataagcatctcattggggccaagtcgaggtatcctcccattgagagctagcctacttcttggtcttagcctctaaaaagtgaggtcttacttccaagctcacacagtgaaggtgctcactgaccaaccacctaggcatgttctgatgaaactagaagcatcagggcacctactcaaggggaaagtttaactaggtcaatttgagatcgcctatcaccctcacatagcaatcaaagggtaggcattagaagaattcattattgaatacactggccacgggaaagatggtcccatgatatgtgaagaccatgtccacatgcctgagactgcagctcagggagaccctggacctacctggaaactatatgtagatcgctcctccaacgacaaggttcttgtggtgaactcatcttagacactctagagggatttagaactcacagtgctttgtggtttgagttgaccgcaactaacaacaaagcaaagtattatgaactcctagtagaactgtggttagcactagaaatcaaagttgagtcactagagatctatagtgtttcaaagctagttattaataaaattctcgatgagtatcaagcccaagggtcaaacatgattacaaacttgagtaaatctaaagatctactatctcaacttgagcactactcaatccaacaagtgccacatgaacataactccaatgaagactcactagcaaaattgggtattaatgaagactcagagcctatcttgatgattgacaatacttaatcatggatgaccccgactgcacactatttagaacaaggtatttcttccagctaactggaacgaagctaagagattgatgagaaaaagtagctcgcttcatcatcatgga

SEQ ID NO: 118475 - DNA, 2004 bp, Cannabis sativa
tttttttttctttttaagatgaggaattataatttcagtccttctatatgaaggaaaaagcccgacatagatgtgaatggaatttggaagctatatatatatatattgacctcatcacattgctcgacaaaatatttgaatgatcaacgcgtacttaaattattaaaggaaaacgctacgaaactccatcctttaacatcgattattatatcataattaatcatttgtacgtgcaagaaggtccatgcaaaacgacagcaatgaaggaagaaacgacgttatatcgaagcagcacacgtataacttataactcctagcttaattagtactcaatttgaacttactttaataaattgggagaagaagatatatgttatatatttttatggactatatatctctgtatgaaaagtatgtgtgtgaaaataggtaaaataaggaaatagactgactgagagtctaccatcaattccgtaactctgtggtacgttaattactgtatttgaaaagaaataaagagttgactcagagtcttccacctccctatgctgtattctacccatcaataattctttgactttagaataataatcagtcaaataataataagtgacaggcaaaatcatatatgctaattattttagtcctcacaaaatgaggggataaggttgcacagaattatggtccttaatatattaattgaaaaattctacataataatattatatatagaaaaaatagtaaaataagatatagtttaaaaaagaaaaagctaaagataaactggtttaaattgtaataaatatcatacaattaacatgagttgttttctataatttcaaaacaacaacactttgtatatatatatatatacaaaaagaactaattaaacctgtataattaattttaaattttcatggtatagtaagaaattagaaatattatttgcaataaatctctattgaaaactcaacaagaatctccatatgctagagcactcacaagagaggaagtaaacacctcttaccaatcaaaaaatgaaaaaaaaaattagctgaagtgtaaaaatgggactccaataaatgatgtataatttagctataatagctaagctcttgattcaaaaaaaaaaaaaaaaattgtagctacatttagctaagaagagagaaagtgagctaaacaatatttaaccatttgtttttctatttatttatttgttttctctttcttttttcttaaagttattattttttgtattttttttattattatttaattaataaaaatatttcaaaatatattatttaaatgatgttgaagaaatatagagaagttgatgtatgatacaatgtaaaatgtgtaaagtaaaatagaaaaattaaatagagttttaatgaggtattttaaagaatagagtaaaggaagctgttgagagtgctcttacaacataataagagcatttttaatggagaagtaaattagtaatgaaaagttaaaatatagctcacttactaaaaaaaaatgtactcgtatggtatgtcaaaaggtgatgcaaatttatataacaaatgttgtgcaaatttcgacacagcatttgccataatgcaaaatttgcatcaccataagtaatttatatttttatttacttcatttatattattttattattatatttagtgatagcattaaatgataaaattaaggttatttttttatattaataaaattttaaattttgcattaaattttgtaattgtgtattgaaacacaatattaaaaattgatacaaattcattataatgttattttttgtgtcaaatataatataacataactattacatctcccatttaaaatagtctaaatttataaactaattaaataattcaaaactagattgtccacatcatagtaggtgcctatccttatgagtgtttattggaccacatctaatgtttttaggcctatctagatccgatccaattatatattggatgttagatt

SEQ ID NO: 118476 - DNA, 4050 bp, Cannabis sativa
  modified_base (3953)..(3960): a, c, t, g, unknown or other
tgtctttgagtggctcgcagatttactggttcccatactttctcaattatttgctcgttgagtactttatcctcatcgagttgatcgactatgggttctggatcgccttgaagtcacacttgcttctttatgttctgttccttcctctcgagagcggtttgtcgtatttctcccatcagggtatgtacgagtccttgctctatgggtttgggaagaatgttggtgatttctagcaggtgatcttcgttctcccggttgagtcccaagatcttcctcattttcatgagggatttctcattcataagttttcggttgtctaccatctggctgttcgtcctgattttcaaggggtgtctcattttccctagcttgttcttcccaggccttttcatgtctcatggttcgtgagccacgaggtctgccttgtggtcttctcactccaggctcaggttgattttgaacattcatcccttgtatcgccctggccgaggctgcctcacgttctaactcagcgttttgacgttgcgcttcttccattcggtgacattctgtttcataagttctttctcccatagattgggcacctccacgattgagcttttcatccttcatcctggcattctgacccttcccacgctgagttctcctctagcgtgttgtccgcgtactaggacctacgtcggtttgagttctccgggaacgtgtgctccgtgcgctgggaccacactcaggttgagctctcctggaacgagtggtccttttggactgcgggttggtaggtcttctagagcccatgggctctttccaagaacgatgattggtttccttatgtgggttgctaacattttctggattttcaaccatgaaggaggttgtttttcttcaaaagaagggaaggttttttttttcggagctttttcacagaagctttcaatgaaagtaccaaacttttaacgcaaattttcgttaactaaatttgagcgtcacggtaataattccacaccgaaaaaaaaagctatagaaaaattatatatgaacaaatggtcttttttacgtggttttgcagttaaaattttgcatagtctacgagtcaatcttattcaaatttctgattgtgtttgtttttttagggcctctctcgtatgagatttttcctcccattttttgatcttgtctaccactatttataattacatagtggtcagtaaattacacatttgattgtaatatgtttacaacaatcatccctaaaatcatgggatttgattacatatcatgcaatgtaaatgcggtttatgatttgttaatcgtataactgtgattttcctgcttttactaggtcaaaacaatcgtgtattaaacatgtctttaattgctgtatctggagatgtctcgacatcaacttggttacagtgatcctattagcgagctggggccattctcccttccgaggtcgacgatgtatgtctgatgtcgatcgtgattcttatcctcaaagaattctttgagggtcatttaaatgctatcttttggcttaccaggattgtaagcctcgctgacgctaacgggatgaatttatatgcagtcttcccataacgagacggtcacctcgcttacttgttcttgagctgatccaatttttacacttagtttgttcaatgtatgctacggactttgatgattgatatgtgccactttcatcttccaatgtattctgtccttgatgtctcgctattcatatttagtgacatatggtttctcgctaatatactaagtgccagtttgtacattgattcctcacctaagaccttacagtcagcgggttacaaatatactctgctacttacatatttaatgagttattccataaaaaactattgcatcgattcacattctctttatcttgacacgtgtcctccagaaaaaccttgggtataacaattactgataataatgagccactctcgaaagatcaccaaaaaataaagaggagctcggtgaagtttggcaatgactagaaaagtcaataatatatatgtatataaaaaaagtttcaataacaattaaaataaaaataaataatctaaagaaaaaaaaatcaggaaaattaaactaataactaaataattaataaaaactattttttaaataactaaacaattaatataatctaaactatatatttttttatttcgtaacaacaaataatttaaataatttttttattgcataacaacaagtaatctaaactaattttttttttaaaatacctacatcaaaaacttaaataattaatctaaactaaatatttttttaatacaaaatctaaaaataattaaacaattcatctaagtatatataaacttattaaatataaatatatatactgtgtatatatgtttaatatgaatataaatatatataaattaatattaatatatatatatatgtatataccttattaagaaagccatcgacggtggccggtggaggaagaggaggtggcgtttaatggggacgtgagagagagcgtgagatgaagcgagacgagagatagggcgacgaagggtgggtttcgtgggtgggtgggtgggtgggtggaggcgagagaaacaacgcgagacaagagaaagagagagatcaagacgaaagggagatcgagagagagaaggacagacgacgacggtgagagggttttgttggttggtggaggcgagagaaaagagagagaaagatagggtagctaaaatgaggaagaaaaggaagcatgatatatataccctaggattttatttagttagggttatacctgacagttcaaaaccactgtgtataaccccgattaaaaaattgcattttaactcaaaaccatcacctaattccttaatgagtgttctaaaccgttgggaatacccaatttttctcgacagtttagaacagtcatttaaatttattagcgatggtccctaaaaaaagtattttgaggactgtcccgaatgcccctttttgtagtagtgttgatatattcaatataagtagttcgtcttccaattattagttcataattagagttggtcaaaattactattttacccttttctttatctcttgattctttatgtactattaatttaattaaagatttggattccaactagcacttttagaattaacactacaagaaaactaatatttgatcctcttggaaagcttggattctattattgtgtaacatgttcccaaccactcatattattaagctctcaaaatagaagttgtaaggatcattttctctgaaaaaatttaactagtgaatcaaaaaaatcaatgaacgaaaataggagttcatgtatacttaggatttagactgatctactaatgatcatcattgtgatatgaatagttcttttatgataaacgacatgttaatgaaagatgttattgacatatcggtacagtcatgtataatcaaattatacatagcacctttactgtatgtctatccacatatgtgatccaaataaaaatcacacacactagagtatagtgtatagtgaaatgcacttagtagttttatattatagatcccttactttaatacacaaccgacttatcttaattctcttgtacgatcttataagattataccatctccatatgaataagagttttttagatatttattaattatatttctataattaatgtattcatttatatatcttataattatattgcatatattctttaatatattatccattcaatacatacttttagggcataaatcctaacagtcacgacatatagaaaatatgcaaagaaaatatgtttctcccccatgccttatgtaaacaccacgtctttacaacgattagtccaaaagtactattgtacatgacaacccttatgaaccgagagttctgtattgttagtgttggaaattattttannnnnnnntagatttactaataagtatgtttcattaacatcctagtatgaattctaaaacaataaaataaacacataaaaagtttaggaaaccttaca

SEQ ID NO: 118477 - DNA, 1118 bp, Cannabis sativa
ttcagggagaatttttaacgaccaaaaaagttcaggaggtatgatttggtacatgtcaaagttcgggaaaaaaaattactaattagtcatttatatatgttgtgtaattcagctactcggacagttgtgtccacttgtcttgctgactttaggtagttaataatttcatctcaaggtttattgtgtttcttttttatcacctatttttatttatgtattgaattttcctaagtattgtgagagatttggaggggtgttaaagggtgcatactgcatagtgtttctgatcaatgcctctcttgtgagttaaaattgtaatggtgctaggctaagttgtcttgtctcagattgtaaaagcacattggatatttaattaagttttctgccattattaaaggctattctgttttcagattgatgttaattactctcttctttctatttctattttcaatttcatttgtttagtttgattctcattctcttgattgcattgattgaactctattcttgtataggtgtagtgttctacatcacaagtgtatcagagctctgtgcttgaaacatcaagaacctactgcaaaaattcaagaaaacttcaaaaatggctggtgtaaagtttgaagttgataaattcacaggccacaatgacttcaatttttagagaatcaaaataaaagcactcttggcgcatcacggacttgttgaaccattgatccaagaactgcaataaagaatgaagaagatgatgatgggaagttcaatactattgaagtaaaggctcatagtgcaattctgctcagtcttggaaatgaagttcttcaagatgtgtcaaatgaggatacaataattggtttgtgggaaaagcttgatgcaatctacttgaagaaatccttggaaacaaattatatctgaagaagaagttgtatactctacatgatgttaaagaactcagaaaacatcttgatgatttcaacaaattcatcttggagtttaacatcataggtgtcaaacttgaagagggggatcaacataatttttagtcacaacaaaatgttaattgtgactaaaacatagtatttaattagatcggaagagcgtcgtgtagggaaagagtg

SEQ ID NO: 118478 - DNA, 1595 bp, Cannabis sativa
aatatttaatcaattatgaaataatttttttgatttatccttaattttcactcattgtctcttaatatttattaaggagctaaaactggttgtctttgcaggattggggtcgagaaacacaagaagggtacaaacaatcaaatttggctagtcaatgtgttcataggtaaacgcatctatatccatctgtgttttctttgacctttcaaattttcatgatattgttctattaggcatgctaatttgccttttttttttttgttcggtactcaggtataagatatacattgaaggatctgcttggtctgttagtgaaaaatatattcttgcatgtgactctgttacattactagtaaagccacgttattatgacttctttactcgaggtttaataccagggcaacattattggcccataaaggatgaccacaagtgcaaatccattaagtttgctgttgactggggaaattctcaccaaaaagaggtaactattttagctttggcaatcacatgtgtgattcttaatgttagtaaagtagtaccataatttcttcattataattaaatgtaactcttgcatgtatgaaacactttatttcaggcacaagaaatcggaaaaagggcaagtgaattcattaaaaatgagttgaaaatggagtatgtgtacgactacatgtttcatcttttaaatgaatatgcaaaactattacaatataagcccactatacctcctaaagctactgaactctgttcagaggctatggcttgccgagcaagaggattaaacaagaagtttatgaaggaatcaattgtaaagagtccttcagacactggcccatgtaccatgccttctccttatggtccttcgtctctgttttcagttcttcgaaaaaatgctaattcaattaaagaaatagatttgtgggaaaaaaagtattgggagaatcaagacaagcagcaatagagaggctttgattaatttatatttaattttatatatgcatgaagtacagatgccaaattagctagtttcatgtataattcatttggttttacatttgtttagtggaataaaaacactttcacaaaataattattaatttagtaataaataatcacacatttttttttctctgttttgaattgaatcagataatgtgataacagatggaatgtcatagctcgattatattaaagacgactcacttaatttagtatcatgatgtcctttactactaactaataatatcatcttaatgataataaatttcattatgctacgaaaaataacaataagttcacataaaaccagaaaatgaaaatgaacactaatcttagttagttcgatggacaaagcttatgatactttgctatctactccaagcaaatgaaaatgactagaattctctttattgatcagcttgtattaaaagatgttcgagtactcaaattggagactcaatccttgtttgatctggtattatatctagccatggaagaaaaaccagagcagagaaagagaacaatgaagaagatgaaagagagagaaagaggaagtctgaaagagaagccttatccattatgagagatgtaaa

SEQ ID NO: 118479 - DNA, 953 bp, Cannabis sativa
tattatttatctatatatattattattgtttcaaaataaaaagtaacattattattactaaattatgtaacacattagaggtacacataattagtcgaaaaatatcaaaatataaacgacatatatattacctagatctagtaatgcaaaacatagacattgtactcaacaatagcatcaagactagtgagattaaacatataagttgtgagatgagcataacccgttgcgaacctaaaaactccagttccaccaacaataggcaactctcttaatggggtgagtatggcgttgtgtcccaatatgctaagagtgctaccgttgtaaatcccttcagtgaatacataattcacaaccaattgaagctgaagatcgctctgagaagtggagatgtacatcccttgagcacttcctatcttcttagagcttggttccggccccaccgtaagagggtcgtctaacaccgccacgtacccgaaactcaccgcagaaacgttcgtcgttgctgcctgagcgacccttaacgccgtggcgtttgggccgctcacaacatcgtggaaataaaagtgaaggtgtgttagtttctgttttttatgatttaattccttctcggctgataggtcttttgagaaagagtagtcatgtgcggtgctaaggctaatgaatgagaaaatagttagtgttatgaggagaagagtggtgaggttttcgagacttttggccatggttgtgaaaattgcttgtgatgaaattgtctaatatttatgcatgatatatatatatatagccaaatgtttatgctgttcttttattttttaattgattttgagtataattggaatatatatttattaggaaaataagattgttgtaatctactctaattaatttataaaatggtatatggggctatttaagggtaggagttaaatgttattaattattattattat

SEQ ID NO: 118480 - DNA, 4314 bp, Cannabis sativa
  modified_base (27)..(33): a, c, t, g, unknown or other
  modified_base (1320)..(1320): a, c, t, g, unknown or other
  modified_base (3271)..(3274): a, c, t, g, unknown or other
  modified_base (4260)..(4267): a, c, t, g, unknown or other
aaaatagattacattgaaatggagttnnnnnnngggcataaaacccaacaatcccatgcatagaagtgaacctataaataccccagacaaagcacgagggaagaggaatttctctttcaagaaaaagaagactcattctcgatcatcctgagaaaacacacttttgtaaccctactatcaactccaaaatattcctactaagcttcctctttttctagaggaacacggtggaaatgagttcttgtccattgtatctctatttgtataaacagttaccagccaatgagccttataaaatggactcatagactaaaaataattaacgcctgaccacgtaaaaatctcttatttgttattttactatttactccattattagtttcttaagctctaaaaatattttgttaccaaaaaactcggtaaacattaacaaagtgttattattaagaaattataacaatattaaaatgtaatattttttaatataacataataatgatgtaattaaaaattatacgattacattttaaaaatattattaaatgaatataacataagaggaataataacattaaaaaatagttattattaagaaattttaacaacattaaaatgtaatatttctttatttataacataataataatataattaaaacctatacaattacattttgataattttattaacaaatataacataatgaaccataacattaaattaatgttaactatttctaatacataacactaaaataatattttaatatgccatttaataacatgtgaaaaatataattaaatgtcaatacttttaattacatgagctgtcttaacagttgataaaatgttataaaatacatttaattacattttttagtgctatcgtaaatgttttttattgtagtaaaactaagaacacgatatgttatagaggtttgttatcccatttttcgcaccatgatgtggcagcatatactagcgacacgtgtctgttactctttacacttggttggagaaatgttccgaacagacttcaagcaagggatctgcacgcacaaagtctgcttgaccgagcagagtaaaggacaaataatttgagccaagggtgaagttagttctttaacctacatatcaagacttagctacttcagagttgatattgtgaagctcaagcacaaaggcaatccctgcaatcatgagattgtatcaaagggatacaaagcacaaaggcaatccctgcaatcatgagattgtatcaaagggatacggcaagctatctcaatcccccatttcatgtattctaaatatgtaatgtatnttcctaccaattatagatattgtaagtaaaaaaggaaaccttcccttatgcatttaaccctataagtagtgatctatcttcactgtaaaggttatcgaaagaattcctttagagagagatctaagagaaaacactcagagatttcattgtgagaccgttgagagaggaaacaatgtgttctttgttctcaagtcaatacaatctaaggggagtaggctgttaccgaactaaaggggtcgaacctttttaaaaccttctgctctttattgtttactgatttttgctctgtcgtaattacatttcttatcgcttattaattgatttttgtaatcccttactcccctttttgttgtattttaattgtgagtagagaagcaaaaaagatttggtctttcttaaaagctttacagaggaaataagcagcgtaataacgctctcaaacaaatgatttcagatccttttataatggaatcgctccactatttataggagaggtgatcaatagatattggtttcctaaaagttgtcaatccacaaaattatgaaataaataacattcctaaattatgagaaaactatattaaatgtcttttgtcacgcattttccccttggtcggctagtatgaggttcagaccgcttctttccaccaagtcagctgatgcttatcttatgcagcataatatacttggttttctgttattacatccgactgagtatatatcttgggcggacattttgcgaggctttttcctatgccaaaaccttgatgtggtgatacgtgtcactcgacgaaatgttccacatcactcgaactaaatttgggataatagcaacaaaggaggtttacagaatcgtggtttttgactcaaagctctcgctgcgaccagactacttgtggtctcggtgagatatttcgtacgtgactgaatggcaattatgtaagttggatgttttgaagtgtaaaattaatttctataagagagtttcaaatttttataccaattcttcagaaatagtgttatacccgaaattcagctagcacttcagaggaggacacgtgtcaaattaggaagaatacgaatcagcaaatgcaattatgttagaaaatggaataactcgttaaatgcataattagcagagtatatttacaacttgctgactgtaaggtcttacgcgagataaagatatacaaactgttgactcatgcattgatgtgaagccatgcgacatcagatgtgcaaagcgagccatcaacctcaccacgcaggaggaaacgtaggcaagacatgagcgagacatgatggttgttaaagacactaggcgtataatacacgggtaaacccaaacaactaatagcaaggcattcatctcgctatgggaaggcatgctcatggtaccttcactaatcagctccaaacatctttcaatgagattcacagtttcgtcaagtcagttcccttagatagaagttgacattcaaatgatgttgattgttaaagttaaccttgtcaccaagaacttccattttcacatggagcattatgcctttaagcacacgaacgacgaggcttagattatcaacctcggaaagatatgagaaaagatatagctcgctaccaaggttattgttgccacgttcccagcgagacatccgagaacgatacggtctacaatgtatttaatacacgtctacactgacccagtaaaagcagacatgtcacagctgtgggattttcaaatattaaccacatttatttttcgtggtgtgtaatcaaatctcatgacttcaggggataattgttgtacaatatcaatcaaccatgtaattaactgccctcctatataattataaataggagcaagttacactgaaaaagggacaaaaaaatcattagagaaaaagcctgagagctgtatcagaaatcaaataagattgactcgtggactatnnnnaattttaactgcaaaaccacgtaagaacctttgtgttcttatcttttctttactagcttttaattcctgtgcaagtttatcacgacttaggctcaaatatagttaacgaaaatctgtgttaacagtttggtgcttccattaagagcctttatgaaaaaatctcagaaaaaaccctccttacattcagaaaacaattttctgcatggctggcaacagagaaaatgttgacacacctcatgaagaaatcactttccgtcctggaaaagagccaatgggctcccggaggcctttcaactcacaatctgaacggaccactcatctcaggagaacccagcctgagggtggcccaggcatactgtccacaagttcaaggagaacccagaatccaggaacaaggcatgaaaaacctagaatgaacattggtagacctcttctgaatcaagttggtgaggatggcgcctatgatccgacaaaatacataccaattgttgagttggaaaattgccaactcagatgccgcctgaaggaggcaaactgtcgaaatgctgagttagagcatgaggcagccgctaccaggatgacacgggagaataatattcaaaatcaacctgaccctagagagagaggatcacgaggcagacctcacgactcacgaactagggggcaggagacagctgaggggaaccccagatgctcaggaaggacaacctagggaaactgaggctccccctaaaagcgagcagccaaatgatcaaccagaaccatctcgtagaaatgagaatagaaggcgagcagaaactagggaacaggaaattcatcgtgtaacacaaggaaaatcctgggatacaaccttgagcacgtaggtcatcagcgaggaatcgccaatattcttctcaaacccatagggaaagggctcgtacaaaccccgatgagcgaaacacaacgaaccacgcctaaggttgaagtgttagaaatattttaccagnnnnnnnntttactaccaagtatgttttattagcatcctaatatgaattctaaaa

SEQ ID NO: 118481 - DNA, 1178 bp, Cannabis sativa
aaagcgtttccttgagaagatcgacaaccaaaatctcaacagcgttacttgtaaggcacacattcacattaccattcacccaaaacgccttgatgacaagtttaaagccatcatctactacaagaaactcaaccaaaagagagggaatctcagtggaatcacaatcacagtaacaactaatcaaatttgatcaaaacaaagtatcaggcacagaaacaaaagagatttatcaatatacaaatatgtatgtgtacatagattacaatattccctattattattgaacccaccaatcaaacaaatcatctgagtaatctttatccgatggtatcctcagatcaaaacaatcaaaacccagaaaaaatatagatgcaagaagtgatttttagccttgttctgttgtggggttgaaacttgaagagaagaaaaagggtgaatgaatagacaatggaaaatggaaaatggtgaaatgggtttggtggtatatgactttgcggttgtagggcaggcagacccaagttctctctctcttctctttctctttctctttctctttctctctctagctctaccatgtttataatcccaaaataccatcgtcatcaccatgcctacggagaatttctttgctgtaattttaaaaaagaaaaagaataaattagaaataaagacttgtactttacactcataccatatttattcatgttattattcacgtttaatatttttattatattacaattttttctccctgttattatttaccattcattatctcattcctgtcttaaaattcattatatttacgtacacgcgtgctaagttccaaatttctatcttcttcttctccttttatttttcaaattattcaattgaaatcataaacttatccctattttttttttgtctgtttaatttgaactgtaagcttatcttttctgtaaaaaaaaaaaaaaaaaaactgtaagcttatcttttttttttcgaccaatgaaactttcacgaggcccacatgttaaatgtatagattttaatataaagagaaattttagtttttgatttcaaaatagttgtgataaagtttttttttttttgagaaaaagtctgctattataaatcaaatagagtcatttacaacaacagagaaaatggtagaaggaatctcttctaaccatata

SEQ ID NO: 118482 - DNA, 3095 bp, Cannabis sativa
ttttacacttagtacgaattgttacaccattaggagacaagaagacaaattagaagactaattaggtatctataaacatgaaatgtctctccacttagctgttaaaaaactcttcttgtaataaaaatatataattgtatgttgattgagtgagtcaaaagtatcaagctttaaaaaaatggttgatttgagataataaggtttgttaatgagatccaaacactcattttccgaccaaaccaacatttgccactcctctttactttccctctatctcatcattaatttcattatttaatcatttcttttgctttagtatttctatatgtataagataaggttttttatttttttttaagaggattttttttcttatcaatataaatacatgtttataatatatcttggcaaaaattatagtgaagtgtatttgtgtattataagtttatatattttgttatttgaatatcttttgcaatattttttttattatttttataagtttattttgtgaaaagaatatttatttttatgatttccattactatatatctatttagtatttctatttaatttcatatttaagagatcggataatacaattttggactccaaatacaaggtttaaattctatatttcatattttattaaatatttggtatatgttaatttttttctctttattttttgtaggtgttttattggtgggtcgaaaattacaactctcagttttgaggttttttttttttaaaaaaaaaaaaaaatatattaagcttttattgtctagttcttctggggtatgcatgtccttaaaatagacaataaacttttatagatgaaagaaaatcctccagtaattacgcaactttgttacttttattattttaacatttatcggttacctttaaaaaaaaaattatgtttcataaataatacttattagtctttcaatatatatatattggacctcttttttagtaacaaataataataataataataataataataattttaactctataaatattgatgttggtcgaaaattcacgtattttccaaatcaaaatagatggtacaaacatgaattttgaacaaataaaaaatccaaaatagaattatcttttaaaaataatctaaataatttaaattttaatttttttttattcttatgaactctttttttttttcacaaaacataacgaggaagaataaaaaaaatcttaagaagacatcaaaattattaaaattataataattaattattgtttaaaaattctcaaatcatatattcatctaacaaaaaatgcatatgactccattttaaattattagagaatattgtctcacatgaattaaatgtataaaagtattgagccatatataagaacatgagtactctactcatcaccaattgttttgagattgaacctcataattcttaacatggtatcggagctatctctctagcgggcttttggtccacacatatctaaatggttagccagctgcacgagatccagatagtgcaaagacgcgagatctgaacaaaaataagcgtgcaaatggcatgacttgtgataaggtgctgattcaagtttagtaagtaaaaatagccaccatcttgaggggatattggagaacattgtctcacatggattaaatgtaaaagtactgagtcatatataagaacatgggctactccacttatcattaattagttttgagatggaaccccatgtttcttaacacaaataataataattacttaaaattttgagtttgtaagtagtaaaaactcaaataattttttagtaataagtaaccaatgttagtaaaattttaattttcgtctagtttcatcagcatcttagtgtctttgtagatagacttactttttgaatttgttgaaaaaagatttaagtaactgatactacacgtctttttgtccaggctaatgatttagaatctgaactttacatttgtttttttttttaaaattctaatagagtcgatgatgttaaaactgaatgaaaattataattttattatattgtatatttatgcctctaaacaaatttattaagtaaaaatgttcctaataataataattgatgtaatcttttttttttttttttttttgatgaaataggtgtttgctattttagtaacttattaaagaactaaactttgatgaaaaaggcccaaccaatatcccctaaattaattgggccctaatgtgagcccaatggccaaaaagaatagtaaagaggacccagaatatttggtgtttcccaaaatccataataaaaacaaagaggcaaattttttgtctgataaaatgaacttggctatatttatgagtgagagtagtgtctcatgcatgcttcatgtatctagcttaagttttatgaatgaattgaacttagttatacaagactttgttcttttagcatacaattagttagtactactactactctaccatttcacaccacatctttttttttttttgcacatacaaaatattacaagggtgacattattacttttttaaattgtgggtctccttttaaccaaatatgattggttaaaaatattgttgtgtttgaggccctatcacactccaattactcaattactccacttgtgtgctaccactctctaccattttacaccacacatagtgttatatattgacttggacataatttttttctatcctcactttgttaccaaattctgaatttttattttagtttttgaattttagctaaatgcaattttaggttcatgtttaatattcaaatgaattttttttgttttgcaaactatcaaaattaattttatttaaaactcactatttaaatagaattaatagtgttctaatatgtttagtgttcaaatcctatgtgaaacttttttaatacttttattaagataatgatatatgaattaaaattgtaaatttgaataaaaacaaagataagaacattattttgagaaaacttcacccaaacttgttaggttgccaattttttaatagatttttctttcttttttttttttaaaaaaaaaaatatgatttaactta

SEQ ID NO: 118483 - DNA, 1737 bp, Cannabis sativa
  modified_base (28)..(29): a, c, t, g, unknown or other
  modified_base (55)..(56): a, c, t, g, unknown or other
tgcacagcttacccgatatttccccttnnacccgatatttccccttacggatcannggactactgactgtcacaaaaatacaaaatatcgttgatactttttaatatttctctatataaataccacatcttatagttatagctagtgttaccttaattgataccaaattacaatgcccactaaatacatatgtcagagcatataaataagtggtggaaagttaaatataactcattttacaaaaattgggctttagagcatctccaatgaaagtgtaaataagtggtgaaaaactaaaatatagctcatttaacaaaaagtgtgctccaatagtgtgccaaaaagtgatataaatttggcacataacaaatttgtgccaaatttgacacaacatttgctatgatgtaaaaaaatttacactgcaataaatgcactacttttttatttacatttatattatttgtattattttattagtatatttaactatgatattaaattatcaaatatttatattatttttttttattgtttttcatattaaaataataataaaattaattataaagttattagtttttatttattttaataaaatatgaattaaatattaaattttacattaaaattttgcaattgtatattggagtacatagttaaaatttaatacaaatttaccacaaaattattttttgtcccaagtatagtacaatttttacattgtgtgaagattgtaaattaccaaaatggtgaagttgtaataattaagtagtggttcatgacacttgtcgtctatatatatttctttcaaaatatactcaaaagtgcaaagaagtaccactacaagggaaatcttggtgagaagctacatgcatgtcaataaagatgatatcttacatacataaatgtttgaaagctagggtgtgttgttatatatatatatatatatatatgattatatgcactatatatatgtactatggtactatatatagccaggtacatgtaaaatctagtatacgtactctttattatctcatttttacccaaacactaactatttatgtatataacactttctatatatctaccaatatggaatagtgagatgtttttatcatgcaaatatctaattattaagcaatgagcattatgtgaagtattagttaattaatatataattaagaagatattcagatatagatcaggtaatcgatctatttttctaaatattatgattaaactaaaaataataaaaatcatttaaaacacacacacatgcacgtacacataacataacataaacacaagttttaatatatgaccttcatagattatttttaagaaaacttttaatttataataaatattttcatctaagaaattagagtctagagagcatcgtacttgtcctatttatttttgtttatttctctctcttcttttttctgttaaaaaaaatctagagtaaaaagatggaggagcataatgataatgaagatagaaaaagagaagcataataatttccataatttttttatcccaaaattaaatttttatagttaagaaacaagttgactaaatttgtttaagatataggccggcctaggcttatatatataaattgagaagtcaaacattatataacaaggagagaaataataaatattggccaatttgtgcttcattattatatattattatgagaattgttaaaagatattattagtacttagt

SEQ ID NO: 118484 - DNA, 1584 bp, Cannabis sativa
taaagattaattctttacataggggtggtccaggtgactaatgtgttcgataactcgttaggggctcgcacattccatgttgtcaatacatgagatgtccatctatgcgatcaaagctgaacgcaaacatccaaacgatcgataggctcgtaggccaccctacgaataccagacacacctaaagcctatgagcttgtgtgagactatgaacatgcaacttgtgctcaacaagtcacatacgttgcaagaacggattaaaacgattctaaaatcaatcagttgtgtaatcctaaatgacatttgcttttcatataaaggagtgattcaaattaaataaactaagttgaaaatctttacaagagtggacaagccgatcgaactctgactgaactattataattttcttgtgttcttattaattttttttttgtttttatttcgtttatttagtaaccaataaattgactacttgttactctaagtaagtactcacacgtttttaattaaatgttcttatttatattgaatatactcacacaatattccgaaaacacttatgtaccattatttacttttaaaaaaatatatttaaaagtttgtcacatatgttttctattaaaataatagtaaatgatatgccacaaaatcggtgcaaaatcagtttatgaaaaaagaacgtgttctaccatgcatcattgagattaaattcatagttacataggactgagaattataaagaaagaaataatcaattacaatattcaaaatgatggtgatatgttcttataaaaaaaattggtgatattgtttattaagtgaaaaataataaatgcatagtcaagtcaattcaagtccagcatagcaggtaggtttggttaaactaatggatggaaatggaaatatcactctctatagcctatattatatcttcatgatgatctgatcaacactactcttgctaaatcggtcgtttcatatatagaccatgaatttttgtaagacttatttatgtttcactataattctaactattctacccttctcttcatgccgttcccttattaacaccatcaccccaaatcaagctctccaagacgatgaccttttgatctctagccgaaacatattcgcactcggattttttagccccagaaattctctaaaccgccacgtgggaatatggtaccatcaaattccagaacaaaccattgtttggatagctaatagagacgatcctctaaatgacacatctggagttttggccatcgatagtcgtggagggcttactctctttggtaataaaaatcgaagctcttctttttggtcaacaaatgtttcgatctcagtaccaaataactccatggctaagcttttagatgtgggaaatcttgttttacttcgtaataacactgcatagagtcttttatggcagagctttgatcacccaacagataccatgctcccattgttagtggaatgccttcttcgagacaaggccaatctcccaaagcacactcaaatgccaatttcattcctccccttatttgtgtaatagtattacatatttatactaactaagcaata

SEQ ID NO: 118485 - DNA, 1272 bp, Cannabis sativa
  modified_base (368)..(377): a, c, t, g, unknown or other
tagatgtattggattggatcggttgcaaccattggatgtattgactggtttttttattggattggattggatctatccaatctattttaactatcatttaagttaatttcattcaaaagaaaaatatacataaaaaaacataatttaaaacttaattatccaacatatgtaataaatattagtttaatccaacttaattctcacgatcatataaaaaaatcactaaaaaataaaatttattcaatatgcatttgattagcgtttatgaagatgagaattaatattttagatctatttttttcgttaatctcatgtgttaaatgtatataaaatcaattaatacatatttttaaataaaatatattaannnnnnnnnnttataaatgtattttaaaaatatataaatataattagatgatcattagatgataattggatcagtttggtcggttatccattggatcggatgtcccatctaacaaccgatccgatccgattgaatttttaaaatttacatccaatccaatccaattacgattggatataggattctattgaatcagttgagattggattggtcggtcggttgtaattagattggatgactttctgcacactccatgagtaggagattgataagtccaccaatcttcttttttgatatacacattatgcacacatatcaaacccataagttttcattcttattcgcaacagcccaaacatacttaaacagaactgtaatattccactcaacaatcctcttaaaactagctcctccatcagccttagattcgcaaacactatcccaagcaatgggtcccgatatgttggcctttctataaagataagcacgataaatagcttcgatttcattaaggactttctttgacaagatcataatttggctccaataagaatgaatggataacaacactgaattgataaacacaactcgacctgcaaatgataaattaattttgtatttttttaaatttgagctgtataaatattttggtaatacaatggcattttttatataaccaaaaaaagttttaaaaaattcattaactttctaaattttattaatttataaatatacttatatattaaatctaataaaaatataatgcatatatactaaacttattatatatattgcgcatatatgatttagttatatgtgcatatatatatactagatagatgttacgtgacatggtatgttaattttattttagtttttagttttttttaatatcataattttaa

SEQ ID NO: 118486 - DNA, 1306 bp, Cannabis sativa
ctaatcatttcatccttaatcttcaatgcttcaaccacattaccctgcttcacacaagctccaatgacacaagtaaatataccctcagagggaatccaacccaattctctcattttctttaacaactcacaagccatcctagaatcgggtttcttacaaacagcttgaatcaaaatactataagccgcagcatcgagttcgatacctctatcattcgcctcactaaaatagtttttggcttcctctaacctctcttccttcaaacaagacctcatcatgacatgtacagttacacaatcaccataaactcctttcaaaaccatcttattatgcaattctctagcttcaatcaacatgtttcttctaaccaatacagtcaaaagaatattcataaaaggaatccaaggaactatctcatgctctaacatcttatcaaaacaaattatagcatctcttatcctattagctctaacataactattcaacaagtaattgaaaaccctggaatccaattcaaaatcaaaccttgaaccacactcaaccaagtgatctacaaacacagatggagatggacttgaatcacctgaaacaaactggttaagcaagctcctaacttgtccatgagtctcagaaaaacctgtcaaaatgtgaagcaaaacacaaaaggaatcaatccctttagcaaagcctctcattccttctacccatttgaagtaccttaaagctgagtaagggtcttttctgtggtttaggagattgtttatcacatggggttgtgtcaaatccggtaattgtgaagtgggttgagtaaagttttcaactttggtttctggggaagatgggtcttgaagatcgaagcttgaagtgatttgggattgagaagaaagatagcgatgggttaagaaagagcggcggaaggaaggtgggattgggcaatgagagattgcgaatccaaacctcattgttaactgatttcagtaaataggagaaggaagaagaagttgatgaaacaaaaaatagggtttttatttaccttaaaccctttcttgggttgggtcaaagtatggatttttatgtggatgatgaggtacttttttctatatactttttatggagattgagtgaatcactttaggcatgctcatatgatatgaattcgtgttgcaaaccttaatcaattctaaccaaaccatataagattggactaaataaatttaagaggcgtttagttgggaggaatgaaaatataggaatagaaatgagaatgagaatagaaataggaatggaatggaatggaataaaattt

SEQ ID NO: 118487 - DNA, 2033 bp, Cannabis sativa
gccaacaattctcttgttgtggaagacaatacaagctcgttttgtcgactggcacattgcaaacttagaaattaaagattattctctatttgccctgatccagatactttttgggcgcatgaatctggttcgtgattaattgtacggaactgatatcttcatatgtgttattccattggtaggaaagaggccttgtcttcttctacttcggtacaggtgaggctgcttttctggtgtaaatataagttacatatcggtacagagctttggggcttccaccttacacagaaaaactgaattgattgaatcactagtcttatattttgtgttacgatcacatgatctctttgtttgaattttaaattgttttttttagagtattagtacttaccttactcgtattgcaagtaaactaaggttttaatgtgtttgagagacccccttgaatgcaatgtactttaaaagaaattaccttttttgaaacttccaactattgttgagtgggaatagagtaaggggagacctatttatagtcttttcttctctacactctaaagtcttcttttactttcaaagcagttcatattatattgctaaaattcaagctgaggtatatatttagtaatacaatcttgagtttgaaagacttcaaatttcaatcatttaagactatgctctattcaaaatatgtttagttagtgtcataatcgaattttttttgtaaatttagtgataatagtgaatgaaaacttctatagtaaggtagcattaatggtgaataataaatgatgatttttgacattcttttttacaacaatgtaattttagtggtggcattgtggctgtcatgagtgtaggaaccgagggaaacagatagagagaagagaggaaataggaaaattatggaataactattttgacaagaatagaaaagaatagcataaatttttggttatttttgagtttgttaaaaataatccatcaattattcacagtattataaattagtttttttgtcaaattttatcacacgtgacaaacaaaatgataacacgacaatttaatcaattatcacgtcaataccatatcaacgtcacttgtataattaatttaaaaaatataatttaaaatctttctagtttaattttacgtaattttcttaatttttaaaaataacataatttttatatttttttcattttaaattatacacataacaacatgtcaccgaaatttacaaaattcatttataataatgtgaatagtttaagaataatttttaatgaaataaaaaattcaaatggtacaataatagatagttcgagagacaaaaatctaaaaaaaagtcaaatttgatttttttatttaacaaaattttctcatatattaaatatgcgtataattagaatagacatatatatgtttctttttggtatttgacgaacaaaaataaatcagtaattaaataataggacagtaaataaaatagtataatttcttcaaaataaagtagtggatatacgtacacatgtgaatagggcaaccattcccacgaatgaataattgatagaggttatttatagatacataaaagacttttaagattatatcagaaataaaattgagggaagcggttgccatactcaatttacaatttggtaagcaaaaaaaaataaaataaatatcatgttacatgtaccaaccattactttacttcattttggatggttttttcatgaggaaatgagctccaaccatgatgatttttagttcatcaacattatatcactttggattttgctgaagggtatatatatatatatatgtctctcatgtatgtgtggccaatcagttaaagcaatttactcaccattttcccaatgtaaagatgccttgcctatataattataggtgttgtcataattttgaatggtgtctccaagggcatcccccttcgaacgcttgctctaacacgtcttccattcgctttgcgagtagaatctgttagagaagatttttaagaaaaatgacaa

SEQ ID NO: 118488 - DNA, 1096 bp, Cannabis sativa
  modified_base (1025)..(1064): a, c, t, g, unknown or other
tgtgtggattggattggatcggtttcttttacatgtcaattaacatccaatccgcacaagtgctgttatctgcactttgcggattggattggatgaatagtgtagattggattgaatcgattattttatgaacactcctacatattatataattaatttctattcaaattcgcataataatataggttatgtctacattaattaattttttgaaaggaaattcaactttatttatcattcaaaatcagcaaccacacgagaaagcaaatcagttaggacatttcccatactgaaaacacgatcaggatgtaacatagatgctctagcaaactcatgagtaactacattagctgaccatttcacaaaattaaacgaaacatttctaacttgagcaagtaaagttttcaataataatttcaccaaataacgaacttgtatgaatagtacttctcaaggcttgaacaaccaacaagcagccggtttcaatagtggccaagttcactgggtgtgttttgagccaacttagagcctcacgaaagcttatagcctcagcaaccatcggatgaatagaccccataaagagcttcgtaagagcagccaaaaggaagccataatgatctcgagtcacacacgccacaccgaaacgatttcgctcttcaaaaattacggcatctacatttatcttgatgctattcacttctggtttgacccattgctccgccccatcctttgcctgtaaaccagaccaaggagtctcaatttgagattttgagcaatatgccattgatcaagaaaaccttttgcagaagccacaatagttaatgcattcatcgttttttgttatcatatatgatcatttctagccccccaaatcgccgaacacaaagttgctatcaagcttttcacctcagccgacttgtttttaaaattaccagcacaccagtccacgaaactgccccctgaaaaactgtttgtgcctatccccactctctcccacacttgttgtgtaacaccctaactacctnnnnnnnnnnnnnnnnnnnnnnnnnnnnnnnnnnnnnnnnttgctaatcaacgaggtttatgggaaaacgtg

SEQ ID NO: 118489 - DNA, 717 bp, Cannabis sativa
actagtgttttattgttgttctactgttgttttgaattgttctattttgtgttttactagtgttttataaaaatacagtatttttgaaaatatttctgtgtgacagtatttttgtaaaaattaactcaaactccaatatttttgttagtttcccattatttattctagatgttccatatttgttctgaattagtaatttagataaaaataaatagtatcagtttttctctcctaaattattactatttttaaatcatacctcatgaatatttatttattaaaaatttcccccgaacaatgccctcgtactttttgttagtcttttgaataaaaatataaaattttattaattcaaatcatatgatccaatatgcatctttgaacagccaaagaaatacattttctcaaaatacacggttagaaataaaatgatagtctctaactaaactatgtacaatgtttttttttttcaaaaaacaaaaaaaaaaaacaaagacacacattagactgagattgtaatttgtaacaatatcgtacgattctcaactaacactccaaaatataagaggacatgcgacccttctccctgtaaataattggtgccgaaatgcttgcacaaccaaaatattgtccacctcgataaccatcctttgtggcagtttttttttttaagactaattaggatttttgtcccctgaattttgacatataccaaat

SEQ ID NO: 118490 - DNA, 2464 bp, Cannabis sativa
gctccaagcgcccatactagttgaaccactagtactggtcttaccactggttcctgggttactactggcaaagcgtgcagggggtagtactacattcaccctctcgtactgacctaacctggcatgatttcccatgtgcaattccacatgtcttcagcatgtcgcccgtgtagcttgagatagatcgcagcttcgattctattaactcagcttcgaaggtgacgctgggatcttgaggagttttggacatacgtggtttggtaggcttaatctcaaaatctaagtcacccggttcaaaagcaattatgacgttgggtaaaaataaaggctttgcaacaggaataaaggatacgttgggtggttatggccaggcttcttctcgcaagaactaacgtctacctttggatatttcttggaagaagcgcctgtggcgactagaaatatcttcctgttgggttctcaatgtgtgttccctagccctagcatcgtttagctctaatttggaggtgagttttgagggattgtgtttatatgggatggccaattctgtacgaaactcaaactctaaagcttctggatgataaattcttgaatcagagtgggacattgataccctaattcaagcagaatgccctaaccctctacagttccaagtaaggcctctcatggctcctgtggaggagatatgacattctcctccacaggggtatgagagtgggcagacaaactagagcaggattcttcgatgacaaaagtgccgataagcgggttcttcaagacaccctcagtgtgactcaaggaatccgagaggtcttcagaggggtcttcataggcaaccttggtcgcttgatcttcctctttctcgttggtgtcccatgggaagtcgaggaaaacgcgcaggtgtttttggataatcttctgaggtcttgagcacagagaataggagtctccatacaattttcttttcttgaaaggagtggtttgaacattagtctcagaagtggttttaacaccaatgtcacctcccaaggacttgatctcaaacaaatccatcttcccaaattgctttgatctttcaaaaaaatttcttgggctttaaaaaaactagataaagccatttcttcttgacacagagaatgggcattctacaccccaatgtcatgacccgcaggtcccatttcaccacccaaagcattcagccccacattcaaagagcaaataccacttaactgcccaccaactattgggcccataaaattagtctcattagttaaaaccgccccattggtcaccacatcctcctaacccaagacccctggcccattaactgggtttcaataatcaactggcccattagaaacgaaagccagcccactagcaacccttacaataaccttactatcctccatttcatggcccactattcttttatcatttaaaaaatcaatttttccccagcacagtcaacaaggatgtcttctaaaataggaaaagaggcaggcgacatttccttcctcgacatacgaacatcaaccccattacccataggggaaatgaccaactcacgacacactgaccccttcctgggtttccaaccagctctttgagaagctctctgaccagccgaaccatgatcactcaccatccacgcacgcctcggacctcgaccagtcttgggaacaagggcatcaacttcccatcaacaggatttgaaatcgtcggaggaggaagagccttagacgcttccagcgtagccaccgtggatcccaatcgaggaataggctgagctccagaaaacacatcttggtaggaagacgccatggaaagccatgggccgtacaggggaaacggaacaccatcgcaactcgccaccgtaaccggggacgacagagaataacctcttctctggtggccgagacacccaccgttataacaaaaaattctaatcttttcatatttgaactggagccaccgtttgacacccgagtacagatcaaagtaacaccctgaaaccagaggtttagtaaattctaaatcaacttgcactctgagaaacacgttccatgaagctggtttttcctcgtccaagtccatagtcatcgctttaccagcaagtccacccaataggttaccattagcaagtgagaagtattcgtgtggtagattgtgtatttgcacccacaccttaatacactcgaagataatcggtctagcaatgctaggagtctaggcctgtagaaagaaagagtacccccgaacgcaccaaggaccattatcaaaagcccagtaaaataggttttatggatttttagagcctgtgtagatgtacttttagttttcaatttttaaaattgtatttagaagtaagaataaaaaatagttttttgtcattttaaaaatttaatggtatttggcataaattttttaaaactatttttagattttttcttactaaaaaaataat

SEQ ID NO: 118491 - DNA, 3550 bp, Cannabis sativa
  modified_base (897)..(899): a, c, t, g, unknown or other
  modified_base (1136)..(1143): a, c, t, g, unknown or other
  modified_base (1495)..(1499): a, c, t, g, unknown or other
tactaagttgattttcaatttcagccacaaatatcttaaacatatcaagagcttcacttttatttttcattaaatacacataggtaaagtcagaacaatcatgaataaaggtgataaagtagcatttaccatttatagtcaaagttccatcaagttcacaaatattagaatggattaaatctaggctcggtttccttttctatcatagatttatgtggtggtttagtaatcttggcttggctacaaaatttgcatttttcaaagtcatttaaagatgatttaagaattaggcataaactactcatgttcttgattatgggtttatctacgtgacaaagtctagcatggaaagtattaaaagaacacaacatataagcagaagcattaactttattgacttgaacattcaatttaaacattcgctcaggttcatacccttccctacaaatatcccatttttagttaaagtaaacaaattagatcctatagtctgtgtgaatcctgccttgttgagaaggtagcccaagactgaattcttcctcatctctggagtgtgcatcacatctttaagaatcacaattcttctagaggtgaagttcaattccacatttctagtactagcaactatagtggtgtgggagtcacccaacaacactttctgatcctcagtagcaacaacctatattttaaacatatttctgtcatagcagacatggcgagaagcaccaatatctgcccaccacctgtcagatccaccattgaggttgatctcagaaatcatagctgtaaatggcagctcttctgtcaggttagcctgtagagcagaactaggcctggtcttacactttcgtgccatatgatttggcttgttacagttgtaacacatgaacaaaccannntcatttctattaggggtacttgctgcctattattttagtacctttgatggttctgattcttattgttgttattggtctgaggttgactgttgcgttttggatttgatttgtgtatctaattcttaaagcttttcccattgggtttcagaacagcagtggatcttttattagtattgttgttatttccaacaacaagcacctcttccttttggtcttgtttttgagcttcctcctcannnnnnnnacgagtgatcagactttccaacgaaaactcttttattttgtgcctgagagtatttttgaaatctttccacgaaaggggtaatttatcaatcataacagcaacttcaaactgttcatcaataatcataccttcagacagaatttcgtgagctattttttgaagctcgtgagactgggcttcgcttgatttatcatcagtcatttgaaacttcaggtagcggctcacaacgtatttctttgttcttgcctcctcggtatcatattttttctgtaatgcttcccatatctccttggcagatttttcagaattataaaaatcatacaaatcatcaaacaaaccattcaaaataaannnnntacacagaaaatcattctctaccaaggagtccctttccttaacatgcgattcgtacttctggacttcatccttcttgtcggcaggaggtggagttttagacacaacttctaatacccaaagattaagaaaatggattagcgaaccctaactaattaaatgtgtatttatatggaattatattattatataatttattatatatgaattaatctgatatatgtgatgttaagaccccgttggtgagccagagatatttttgtaattttgacccgagaagggtaaaactgtgattttaatattatttcatgcttattggactatattattatatagtatgcttgttgtgcccttctgtaggtattttctgacaagtcggtaaggtatagtcacaatcaggtatttcgggccgaactggatttgggaccgaaatatatttttgggattttatattggcattttattgataattgaatattcttaaaaattatttaagtgtggtgtgtgattgattgacatttatgcccttggattgagtatatgttatattaaggccctatgggtattttggtctttttgaccattttatttattttacaaaaaaatggatttttaggcattatggaaaagaattttttggttttattcagcccaaaaccaaccccctcacccgctctaattctcatctcatcaaattgcataattcttgaaatttaccttggaactagctaggaatttggtggttttggtgcttggatttgagtagagcttgaagtagtgtttctaccactttaatcttgaatttgttgctaaaattgatgattgaaaaaagcatgttttcgtgttatgggtgttcttgaatgcatgttgtagtggagtggagtaatttggaggttattatgttgtttgaacttgtaaaattatgggttatgcttttagtgagttttttagggttgtattttgagttagaaagctgattgttaactttgtttattgttgtttgtaagttgaaaaatgttattttggtattaaagctcttgaatatgaaattgtgatgatttttgctcaagtgttaagtttatcttgaatattgttaaaactgaatttatgatgcatgtttggggtgtttttgatgtgagttttgcatgtttgcaaagttggaaaattgggttttttgagtttggaactcaggcgccgcgaccccactcactgggcgcagcggcccgccccaatgtaaatcttgggttttcaacccaggtgctgcgaccccatgtggggagtgccgcgacccgtcttgtgtttttggatagattcaaatgcaatatttgaatattcaaaactttgtgatccagactccgattcaagttttagagtatcgttagaaagctcgttccgagctctatctgtttatctatatttgaatgccaattttataattttgtgaaaatggatttagggattaaccctatttgtgaatcccaaaaattgtgactaggattatcggcatttggtcaggagcacccaggaatttagaatctccacgtattcgggacattaggtaagagagtagttaacacgtagagtaagcgcagtggcgctcatgttgaatattataattatgattaattaagaaccgggattagggttattaccctaaagtgagcagttatatggtctaggattattattctagtgagtattgatgtttaaatggtatggcatgctatttatgttaagattaagaattatgcgttcaaggcataatttggttggactcggtaattagaaccgagatgaaccattttaaggccttattataattagacgtgtgagtgtaacacgtgggtctatgccacatagacgtaataggcgtgtgagtgtaacacatgggtctatgccacatagacgtaaataggcgtgtgagcgtaacacgtagttctatgccaaatagacaagaagtgtaatagcattattgttatatatgtgatatgtattttgtgattattgatatttatactgtcttgctgggcttggctcacgggtgctctactgt

SEQ ID NO: 118492 - DNA, 1683 bp, Cannabis sativa
agcaatgaacatcttgatgattaattaaataatgttcaatatcctaactttaatttcaaaaaaaataagaatctaaatacaatatggccagtcttttaataaatacaaattatttattcatccaaagagtatacataatgaatttatttacagctaaatttatcttacgatgaatatagattagaaatatataaattatctaagttgtaagtgttgtatttttcatagataaatgctcttggtaatctatgttaataataattatgaacattttattttactctttttttgtaatgaagttttattttactctacggatatacatgtgtttattcacttatttactataatataatggaaaattaacaaacaaaaaaaaaaaaggaaaatccatttgcttttaattttcctctagtaataattaataacttatttatttcaatgtatatgattaactaagtataaagagaaatattttaaaagtatgggacaaaatcctttgtttttgaaacaaagaaaattcattttcattttttttttttgttggatctcatattattgaatttatatgataaatatggaagattaaaaattttaccctctaaattttgtcaataaaaatcatgttctttgtactattacatccatagggatgcacatacgacgagaaatcagaagtgatttctcccctgtcccgtcctcattcccattaaggatttcaatcctcatccctgataggaataaggatagagcgaaaaatcccttaatgtaaaaaataaaatttatattaaaaatttaaatgtacaaaaatattaaactatataaaaattcatttcaaaaaaaaaaactacataaaattaaaatattacacattatttattattcaatttactaattatcatctaaaacacaacttaaattttgataaaaaaaaatattaatacactaaaaatacaaaaataaattataaaatataaaatattattaaaaatataactaaaatattaaacgagtcctgtcataacaaagagtgttatctccatccctatctacgtcccagtctcgtttaacattcggggacaaaaacatttccccatccccaaccccatccccatttggcacgggtcccagcgagacccgtgtgcatccctacccatacactattacaaacttggttttggttttaaacttggtaaacctaatttttgggtgtttataagtccatacacaaacactattacaaaagaagttcgtccaaaatgaaccattatatatcaacttgtatatgagtttcagtgccaaattaatcccattaaacttggtgttatagtttctactctacaagtgtcttactactttgcccaagtgtgctttgaaatgagacctgttgtaaataagaagaaagaaaagaacatgctttatgcaacatcttcaactttataacaaggaaactgacaatgatcaccttcgctctttaattctataaaaaaatagatatggagtgacttgcagcataaatacttacgtttaactcctagtttcaaataaatacctaaatttattttttgacggtaataatacctaagttatatttctggaactccgtaaatacttagtcattaaatgtcaaatggttattcacatgttatttttttgttagtatatttaaactattttttaaaa

SEQ ID NO: 118493 - DNA, 2112 bp, Cannabis sativa
caatcaaattacagtcctggagagcctgattaaaaccatccaccagcgactgcgggtaccgattaccaccacgtttatccgaatggcttgtgacattgttgacatctccaattatacaccaaggcaaacccgattcatccttaagagagcgatgaaaatcccatgttttatatctcaaatttcggttaggctccccatacaagcctgttaatctccatggaggggaagctaactaagagatttgaagatcaatatgattgaaggagtaattgataagctgggcttcctcactgttgcgccacaacatcgcaatacccccactatgaccccttgcatcgacagagtacataccttcaaagcctatcaccacccgaagtctttccagagtatcaccacgactaaaagtttcacaaagaaaaatataattgggcttcttttggaccacaatgtccaccaggaattgaaagacccatgggttcccaagcccacggtaattccagcttagaatactcatgatgaggggtgggcctggaaaccaaggcccaccgaaactccattttttgaaattaaatctgactcctctacttcaagatcacatttgttatcttcctcatgcatcccttctaaagtcagcccattactagctgaatggtcctttatcaaaagaatcccctcataaggccgaccaaataatccctctgttgtatggcgtcgtttggagtcaataatactaacttcaattaattcctccgtatccagcccatcatgaacatgatcaacgtggattggggaatcagtgtccataatgcccacatttacctctttctccataactgcctttgacttctgcatagttttatttgacaactttcctaatatcagcttcccacgatcctcgctattaattcccccaaaaaccgcttgctgagatacagttgtcgccggcatgttctgtgtggcagctggttggtctaaagattagttgtcttcctcttctctgtttttgagccattgagcaccaatcaaatggtttctcctccgtggttgggccttcatgcctatgccatatggtttcacgatttgatcaggaggcatatcaaaatgttttgggcagaacctttcagaatgacgaatgactccgcagatgaagcaaaaagtcaggatatactcgtatttgaaagttgcccagaaagcttcttccccaacacgacgaagcctcatatgacgtttcaaatgtttagtaatatccaaggtcacccgtactcgtaagtagtcacgccatattcctcaaaaattctttgggtccgattctacaaatgtaccaacataacctcctaccctcctaacaacctgttcagttttcgaaccatattgaagaccatgtacttggacccaaatgtccaaattattaatctctaccagtctaggttcaactctaggtttcatcctttcaaacacaaattgaactctattgaaagtccatgggcttccatcaatgacccgtttcagatcaagttcatggtagaattgaaacagataaggattaggttccaattcttttacatacattcctttacctggttgccacaaagaggccattacatgtcgcatcgcatcaaaatcgatggctcttcctgttagaaatctcccaacaatacataaccgatcatccgtcccttgtgtgatattttcatcaagatcaaaagccaattcaatttcctcctcatcttcgatctgtatactatcataatcatcttccaaatctttgacatagtaactactggacgccattttgaaaatacaaagcaaacaagacacaccttaacaaactagagaaaaaactctacccatgtcaaaagacaagactcctagataatgttaaatagcttaacaattttgtttcaacataaaaataatatgtaacttctaatgttcttaaaaaaaatatttatatttatttatttaaaataaaataaaatttaatgtgaaataacatgctaaaaagaatcttttctaacaattataaattgttggaatactaattattcccaacagttataaaccattgtgatttattgttttcttaaataaaaaattctatttagtattgct

SEQ ID NO: 118494 - DNA, 1911 bp, Cannabis sativa
gccaccaagtatgcttggaatatatagatttgggttaatatgatcttttattctctctctctctctaatatgtatgcatatttgatatgacttttgtttttgggtatgttttataaggaagacgagaaaatacagaggaaacaagttcatcgttatctagatcagtgaagaagaagaagaatggtttcttcagttttctgaatctgccaaagcgtaatatttccggtggcatacagagattgattagaagcatcaaaagtttttctcagatgtttggtaagtcaagtaaaataataatttttgtttaaatatatcagaattaagattaaacaatttacttaatctgtgtaattggggaaattagtgtacaaggaagaagagtcagagtcagatgagtcagaaaatgaaatggaaatcggattcccaaccgacgtgaagcacgtgacccacataggattagatgggtcaactactccaaacccaaacacagtaaaagaaatcatgggaatcggaatgggaatgggatctccagaagtgctttcattcccaaccatttcccttaagcagtttgagctagcaatggctgcccagcaacaaccttcacctcccgtcgatgatctcaaccacattgttaaacaaaatcttacaacaccttgattcatttcattacaaaaaacaaaacattactaatctttcatcctgcgtttgatatatatacatatataacttcgatcttttctgggttttttattcattaatgttgcaaattaatgatgtatttgattattataagttgatttgagtaaaattccatgtttagataatcgtttgtatagaactcttggaaagaaaatttttcattgaatttaaaatgtataatgtcattctttcccctaaatttagaatgaaagtgagtttaagataaggtgtacgaaagtttcatgacaaaagtttcatctttctaagtttaatttttacacattaatttttaatatttttgtttcattttttatacagttttgtattaaagatacaaatttgttgctataggggttgaccaaaacttatctatgttttcccctttttgctagactatgtatattgtatcataaacaaaatggagtgttgtagttgaggaaggtaaactatactttttctctatttggaacagagaaggtaaactacttctactaacatctagccaatggataagaatattaggaacaataaacatatataaagttttgttgtcggttgcataaacaagcacatgttgacaattattattattcttaacaaaagctcgaaccacgtgtttacaataaaaattaataagatatgaattcagaaaaaaaaaattaaaaaaatcaaacaattgaagacataaatatagatttaatactcattacaacatgtattttagaatttgtttggtaacttagatgctcatctatgatgtttttagagaaaattacactacaaaatctattatgtttatcttttttttcaattattttaccaattttactcctctcacttcatgatagttattcatttttctctaatcaaaattttgccctaactttcctaactttcccacaaacctacacatccatgatccatctacaaagaatacaaatctattatatttgaaattatgtcttagttatgtgagtgtatgaggataatttaggtacaatacataaaaagagatatatttgaattaaattttatttagagataaatttagttaatgtataaaaaagagaatatttttcaacttctcccgtagttttatttcttagacaattctttttaattgcaataaattttatatatgtgttgcgctattttgcacacgcaagtgtacgtatcgtttcaagtagtaaaactcacgaggagtgaggtcga

SEQ ID NO: 118495 - DNA, 1110 bp, Cannabis sativa
ggtcatcttctatcccttcaaatgcatccaaaatggccaacgatttatggagctaccgcaatttcttcaggggaaactacagatggttgttggggaataattctcggatgaacctctggactgaaccttggggcaatgaggaatggagggatggagctgcctttaatccgattgtagcgactgaactctaggcaaaaaatctgatgaatgcataagggaattcgtggaatgtcaaggaggtaaagagaatttttcaagaaagacatgttgctgcttttttggatacaccaatcttgggggagccaggaggttctctgatttggagtgactctaaggacggatgcttctctctgaagcgggtgtactgggcaattaaagttgttcttaaggaagttggctcatgatattctgccaactactgaaagaatggccagcttctttggaattcaagttggtagatgttctctttgtgatacggagggagccgattcttttgagcatctgtttctaaggtgtggggtaaccagagccatatggttttcttgcaaatggagtgttaaaagtgaacagctgggaggtttctccagaaaagatttggtggattggattcttaatcatccttttctctaggggtgaaggatgaagataaatgggaatttacggtctttgcatccatgatcttataaggtttggtactataggaaccttcattaccactcgagaagcaaagtgaacacatggacaattataaaagaagtcaattaagctgctaaagagtctctaaatgtgaaaatggcgaaggaggaggagaggtttataccacaggcgaccgaacagttgtttattagggactctgcgtacaaggttgaagttgacgaagcttataaggacggtataggtgcagtaggagtgatgggaagggtaactgatggttcggtctttttcctattctgtcgtaagaagaaggtggtgtcagccctggaggcgaagattctggcttggaagcgctacagctgctccagattgggtcggcaaacattgtttcagattgccaggagctggtgcacggaatcaatagctcgagaaacctggattggagagtggcggggg

SEQ ID NO: 118496 - DNA, 1572 bp, Cannabis sativa
gcaggtagctcctggagggatgctccattagtaggcacccagactgaccccagactaatgaagagtcgctataatctctgaaggtcctcatattgggggaaccaccaaaaatgagccgaagcgttatgttggggccctaaaacatgataaggaaatatgggaagttactcagctttcgcctcaaaggcccaggctcatggatcaacccattaccttcacagagaaagatgcaaagctggtacggtttttgcatcctgaccccctggtcattgagactcctatatcaaacaaagttgtggccagaatatttgtagacaataggagctcagtaaatctattgttcaaagatactttcacagccattgggctcactgacagagatctctccctcaacggttcacaactcacaggattcaacgggacgaccctcatccctataggaaaggttagcctctcggttaccttgtgtccttacactctacaaagcatgtttgaatattgcacatttgtggtagtagattgtcccactgcttataatgccattctttgtaggccagctttagtttacctttgagtaatcacatccatccgacacctatgcctcaagtttccaacccaagaggcaggaataggaaaggtaaggggtaaccaaggagaggtgagacaatgttataacgctgtagtacacttgtaggtcctaacaatacaaggtcccagactgacgttagtagcaaaacaagatgaattggacccttgtattagtttcgaggcaatgttagaaccaatggaagatattgaggaagtaaaggtatgtgaccttgaccaatctaatgtttttcgcctaggtaagaacctagaatcagaggagcggagtaaaatcattaacaccataaaggcatcaacagatgtgtttggatggtgccatggggacaggaccgggatcagtccccacgtaatcactcatgtcttacatgtcaacccagatattcccccagtgtaacaaaatagacatcctctagatccagtgaaagctgacgccctagaaaaggaagtgaacaaaatgttgtccaatatttttatccgtgacgtgtactacccagagtggttggccaaccctgatctggtacccaagccaaacggaacatggcgagtatgcatagacttcattgattttaacaaagcttgcccaaaggattatttctcgttgcccaaaattgaccaaatggtagatgccaccacaagtttcaagttattatctttcatggatgcatattccgggtacaacttgatcaagatgcacgtcactgaccaagagtgtactcacttcaagaccaacaagggggtatattgctatctggtcatgcccttcagattaaaaaacgctggagcaacctatcagcgcatggtcaaccaaatgttcaagggcctcttgggacgtaacattgaagtgtacgtggacgacatgctggtcaaatcaaaaacgtgaatgggccatgcagatgaccttatggagtgctttgaagtagttcgtgttggaattattttactaggatctagatttactaccatgta

SEQ ID NO: 118497 - DNA, 1297 bp, Cannabis sativa
  modified_base (27)..(42): a, c, t, g, unknown or other
  modified_base (1244)..(1256): a, c, t, g, unknown or other
atttaatttcgctgcaaccaatgtaannnnnnnnnnnnnnnntatgtgtttattttcatcgttttataaattcatatttaggatgttaaaaacataatactggtaaaatatattccaacagatttggaatagtcgaaactctttcatttttaggaattctcaggagcaactagcttagatataccaagaagtaaaagactttctgaatgtttttaaagaagctcaacaaaagcaaatctcgacagtacgtgattgaactacacctcaatctcatacatgaacaggatgccaaaacatgtgttgaaggaacagtgtctatcaggaaagaaagatcaagtttaggagctcatttggctcgaaactctaaaggagaggttatagcagcatttgcaaagagctacctaggaatgatgccttcaaggactacaaaggcttgggcactactgcatgctttaacttggtgtaaggaccatcaaattaaaattcacgaagtaaaagctgattgcttgaatttagcttgagacattcaagcttgcaccataaccttttctgaatatggtgtgattgtggactcactacgtgaggtgctatatgttaaaagtcactattaaatttagaatatgctagaatgttttacaatgttctaagaaatttgtaagagaaaccaagaacacgctacaaaattttagagaaaacttagaattactagaactaagattagatagttctagagttgttttaaaaatagtaagaagtaattaaatagttagtaataagatagcttccaaggatttgagaacgatcttttcctgaaaacgctctgatagggttcttcgactccggtcttgaatcggagcaatggcaggtcggggtcgtcccaagaaaagtgtttctcagggaacgagcaaggcggggaagttgattgctgggagtaaagggaaacggaagttggctgggaatataaggaagaaaaggggaccaatgatgtcggatgtggtgctcaaaacaaaatcaatggcagaggtgattggggtttcggagctccagctatccgaatcagaggaggacgaaccagaggtgcatactccacaaaccattgaagacgtcgcacaagttctctcccccagagcttcactggagtttttacaaagagatcaggaggtcagatcagattttgtgagttttttggaggcaacaaagagatgtgaggcttgttggaaatatattttaccaggatcttagannnnnnnnnnnnnatgttgatttaacaacctaatattgaacttctaaaacgatg

SEQ ID NO: 118498 - DNA, 1314 bp, Cannabis sativa
tgtagttttccaacccattctatccccttccacaaataacaggccatagattctttctcatttactccttagtttactaatgcaccaactaaaacatctattaaattatcacagaaggattgattttgccacacgtgatcaaaccattaaccatccctattgatatttactcttaatgtcaaataccaagctaagcttctacttttgataccaatcattttctcaactaattatataagttatagcctaaaagaatcaggtccaaatacaggtcagagcttacaataccaaccttaccaagcaaaaaagataaagtagtgacacaaaacaacaccaagctgatgttttgaataattagataaaaacgtaaacacatttagatcctcgataatcaaaacttttctaaacaataactctgaacgatcttttaggattttgggtttttgatttagtaaatgacttatttcaacatgtttatctggtgtacgaattgaatatcaaaatcccaacagtgagtaatcccaatagaaatatgaaaattaaattaaaacaagcaatgccaacaattcaacaaaccttcagctttgggggcattcttcaaatcatcttgggagaaaataggttcaatatctttcttgaccaaatgctgctttctctttatcttaacctgccaaaaaaaaaaaaaaacacaaaacccaattctcaaactaataaatagttcttcacaattgcaacatcattcattcattcccttatacaaaaacaattcaaaaggtgagacttgtcatattattaccctgttctctaagtagcatacgtaagggcaggtcgggcagtagaatctagcagcgcgtcccatatggggcagctcgaattgcagcatgttcccacaagtcgggcagaactccattggtgactgaaaagagaaaaactttttgttttccttccgaaagagaaaaatctataaagaatgcaactttctaggatcccaaacaaggaaaatcactgatcactcacttgcgcgagaagaggtctccctggaaagagttctttttgctttgggtttcggggttggggatttttgaggaggcaagaggaggaaactgaataatttgaacgaaggagatgtcgttttctatttctatagaaacgatgtcgttttttggtttctaaacgttgtccttgtttttggtgggaagttacctaaagaaaataagttaggggagagattttttaaaaaataggaaaattctacaatacacctcttaaaatggatatattgatgcacccctatctattttagcatccgaaata

SEQ ID NO: 118499 - DNA, 1152 bp, Cannabis sativa
ttcttatattgataactaatcaaattgtaaagagttttatttagggcataaaacccaacagatggttaccacaagcttccaatattttttttaatatttttttacttctagcttgaaattataaaaacttaattgaaaaccaaaacagtgggttttccttattcttaagtgttttattttctctcatgcgttttaaaatctcgctgctgcaaagttcataatgttaaggtttttttcggcgaatccattgggtctgtaaatgtgttgatacaccaaagaacaatagactgttacatcttttggtttttattcaattcccaaccccaattttcagaatctttacttgttttatgtaaaatggtgttgattatgtttttcttgttgttataacataaatgaaatttttgatttttgcagaagaataaaaaaactattttttgtttgtgtttgtctatcctctgtgaaattcttgtaaaagcttgaatttctttctaataatatgaaaatgacttaggtaaaagcttcagattcattttggatttgaggttgtcgtgccactacaccaccatagctttaaaaaatggtattttctatggaatattattattaattttattttctcaaatggtgtcagaattttttttcctcaaagtaagtgatgtaggattttaaaattataactttaatctaatagagacaagcacatattagataaggtggacattcaaaagtcatatgaatcaatggctacaaaaatgtatgtatagtataggaacaaaactatagtcactaccatagaattattttttatatatattgatttttgaaagtttaatcttcatataagaaatttctcaatttttttagaaaaatatttagggtactaaattagcatgttgtattcgtatttgtcattttttatatgtatctgaaataaaatattaaaattctaatttttacactaaattatttagaacttttctaaaaaaatttgtgaaagattcctatttttacaatttacaccatttattaggggtgttcctcaaaccgctaaaaccgtttgcaccgcaaaaaaaatgcggtttgaaattttttgcagtgcggtcgcggtttgaatttttcctaaaccaggcggtgcggtttgcggttttg

SEQ ID NO: 118500 - DNA, 1239 bp, Cannabis sativa
  modified_base (1167)..(1200): a, c, t, g, unknown or other
ggtaaaataatttccaacatctttatcttttattatcgtaaaaaatggagcatgaaaaccctgtcctgataccataatgtgaacgagccttcactttcaagttgaaaagttactactttttgtttgcaatcattactagcggcttattaaaacaataactctattctgagtaatatctcatactccgccatacccaaaactacgaggtcagcattcaacttcccattttcaactctaatcggcatagacttgaactacccctttagagataactaggtctccacctggtaacagagttccaaaccctatttcatatctatctcaaggtttatccaattattaatcaccctgactaccacatggtaaggtgtagttccaaagtcaattaacataaagtccaatagaacagttgataagaaactaacctgaaattactaaaaaactatctttaactttggtttaggtaatggccaacacccaaacatgcagtgtttttgcccttgttctggttcctccttctgtagttgtggacaatccctcttaaagtgccctaccaaaatttattggaaacaagtttcacggttacactctcccgaatgatgcttcttacattgagagcattctggaaaagtatagtgaccttcaaggccacactgacccgatttcctacgaaacctcttcttctgactcgaacccactgatttagttgcagtttttctccttggattaaccaaagaaccaatgtcacttccttcaagattgaaagcaaaagaaacaatatccttaccaacaaccaaagttcctcggggctcttgaaaaaactctgtaatactcgcgactcgatgggtatttatcacttctagattttacaacctaattgaaagtctgtgcgtcctatattttccaccagatggttccattcagttaccggcaataaactattctgctggcaactctagaatcaatgcaaccggtacttggaagtccatattgcttcaatctcctaatctcctcctctaactgttaaatcttagcttccatctttatgaacctttgctccaaatctagcggagcctgcagtgaatttttgtaaccacctctgtaagttcttcctcagcttctaactcggccttgagaactaggggggatctgttgggttttatgccnnnnnnnnnnnnnnnnnnnnnnnnnnnnnnnnnncttattaatatagatcagaaatagatcggaagagcgtcg

SEQ ID NO: 118501 - DNA, 1060 bp, Cannabis sativa
tatgagaatgtcctgcgtggtactgcccgtccaaactctagtccttttgggctcctcccaaacccgttcctccatcaacccagatcaccaattccacactccactgccccagctctgagccccaataatcgcaacctcatcccagttaaccacccccgtggtcaagtcctccagcaagattttacattccataacaatctaggacactacactgatattgcgggtctattcctttccccctaaccgaacttgagcactcctcttgttccagaaggtgtcactagctccactctccaaaatacccatgtcaactcccaaatccatgctcctcacggccctaattttgtggctctcttgtctcttgccagtggggggaatctatcatgttctgtttccccacaatagccatcaaccccgggctctcgaagctcatcttctccatcctccagtcaacttaatgccccactgatgatctcatccccgctcaaccaaattgaaccccatccaacgacctcctttgttgagctccctacttctatggcatttgtaataggcagtaatgaagggccaccccgtcgtgcagctccaagaaagaaccaatctactagttcaactagcttcaagagacaactggccactattggcaatgagcagaggaaaatgctgaaaaagacacaggccacaaccaggtcaggaagtggtggaagtggtgtccagtgaagaggtaggccctgtagattcataggcctgccaggagagatgaatctcatcagctggaatgcttgaggactgcggagtgatcgagcattccgaaatctctccctgcttgttagaacgtataagccttctctgttttttgttattgaaactaagctttgtaagaactctgtcgattggtttaggcttaagttagggtttaattttggttttgaggtcccccgtgttggccttagtgggggactttttcttttttggaactctgatattgatgtaactattactcatttctcttctaatcatcatattcactgttttatctcgtctgctattttctctagtt

SEQ ID NO: 118502 - DNA, 1317 bp, Cannabis sativa
aaaaaatgacaaaagttagtatacaatgtaaatttccaaaaaaaaaaaaaaagttaggcctgcctattcctagttggcccattaaaatttaaaaagttaggtgattcaaattccaagacgtgggtaagaagaaattgaaaaggcagtctttctcttgtcttctcttcctcaagtcaatcacaatatctcatccattcccaccaacccttctctctttctctaaaagttctctctcttctcaagactctaaatctctaatccctccaaaaaaaatcatttttacaatttacaatttaccaactatcttcctcaatcatcatcactcaggacaactctaatagagaaacccaaatttagtgttaaatcaacaccaaaagaatactatttcaacactaaatttttttccgattccaaccacaatactaaaaattacattaaaaagtatattctttattattatattatttgattaataaactatattattatataatgatttttttaaaaggattatttaattattaaaaagtacaaaaaaaaagaataaaagtaaaaacgctgttgtctacagtgcccactattattagtggggcactgtagactcgaaccaaaataggattacttttagagttggtgttttagccatgaacagtcgtaatttgattatgtgagtcctctcttttttagttcctaatcctcctcttttacgtagtctttttcttgtttatgtagtacgttctatgattgcatggctggcctatattctgatctattctcttcttgaagcgtgtcctttctctctgctctccctattttgccacgcgtctagttgttagacgatcattgttattctttatcttctccaagtctggcagtgttgcgtcttgtttttggagtgcttatcttacccttttagtagtggccttcttctgacggaactctttttcctacctgagatgaatgaaaggtcgtaatgctgatctttattttggtgtctcttttcgacggaggcatttgtttgacactctaaactgcttgggctctatgttgccctatactttttaggaagtgagtcttccgtctacacgcacgccacattgtatctgcccagatgccacgctgcagacgccgaggtttcccgcccacgacaccttgcagcttccattctgcgcgcgcatctggcccgtttgcagcgtactgccagcttcacccaaaatttccgaattttgtgggattttttttcccaatttcagatttttccaattttcaaaccccaaaattaaaataaaatattatttttaggtttaaatttaaaaa

SEQ ID NO: 118503 - DNA, 1480 bp, Cannabis sativa
ccacaacatttttctctttggtctcttttcgaagggactcaatcaattctttgattttggcctcttagttttgaagaactgtgcagagtccttccctttcatcgattagatcccgcacattcttggattcctcctcaagatccgcttcaagcttggcagtggacgacatgtattttatttcttgatttaagtcatcaataaacttgtttgcagcaacaagtttcttgttcacttcgcccagctgatggcccttcaactcaacatcctttttggcttcttccagtgccttttgtgccagcctttaaagctacagatttggcttgagagtacatataggccgacttcaaattaacctacaagaagaaacaaagttaatatatatgtgagacaaaatctgtacagaaaaattctaagataaagcttaccctggtaacttccttcagaattctgctaaccaaaagtttcactggcatatccttcgctccagtaagctgctcgttaacctcaagcatcaagtgatcctggtagaagctaagcatttctttagctttcttggtttctagctagatggcaggaggggtgacgtttgcttttggcaggccgggccactcagaattggcccccttagaatctttggtcggagcatctagaggttgagtttttgaagtcttcttggccgggggaatagactcaaggatatccataacaacgattgtcgagctcctctcaatttttacttgaggtgtcttggagctcgaggcaatacttggtgggaagagaagcatccacctttgatcgcttgacatgtgacttttagctggatgcatcatcggtcctcttcctgagtgctcatttcattttatctgacatggctgcacagaagaaagtacttgtaataaatatgaacaagtaagaataaacaacagtgagtaaagtaatagctaccttagacttcgaggggtgcaccctcctgtacaagcaaagatggggtatcttcataagaaaaatccccattatctttcattgctacgaccttcccctttcttgtcgtctggacaatgggacggacaacttcctcagggtcatccctaaccatgataggtcgttcaatcaacacctgacttgtcttggaagttttccttttattcagagcctcctaatctgtagtaatcccctcaaatacctatttggatctctgaacctcctcggatgagtaaagctcgtacttaagaaaaatggttgtagtagccaagagaaaaatatttcaagccaactctgacagttgaagaattgcttgggctcttgaccttagacccaaggtaaaaggaggagggcaaaaggaaggaatttactggaaagaaaggtggttggcatccataccttttacgaagtagtaatctttaataaacccaccgaacttggacacctccttgtctacagtactgctcagccactggtattcattttgagagaagtagaa

SEQ ID NO: 118504 - DNA, 2389 bp, Cannabis sativa
  modified_base (1795)..(1795): a, c, t, g, unknown or other
tatttaaggaaaatgacaactataataagattgatgcttcattacttaattgtattatttgtattgtcagaaagattattattaaaagtaaactttattaaattaaattagaaaaaattcaaacatgacttacatattttcaaaaagaaaaattataaaaaattcatatgcagatctccaacttgacaaatagaaatcttggaacgtaatatataatttaatgtacaattaataaattaatataatatatataacgttctgagatgggcatggatatttaaaaaaaaaaatcatatctacttagcttgatcatgaaaaatagttataaaatgagtatattattctatagtgggagaaattaatgaaatgaaagtacggattaagagacagatttttgtattatttcgattttttattagtgtcaagccctatatttctcgatcttctgacttaaattcgaaattaaaaaatagtatttagatacatattattactaattttgttttagtcaaagtaagtgttgtaattatacacattttagtgataacaaattgtttttagctacaaatattttaatgataatataaaaataatataatttatgttcagttacaactatttttatttttagttacaaattttttttaactaaaaattaatttttttatatattatttattaagataatacttcaataaaagtataaaaaagaactttatgtgtagccatttttttaatatgtgttattattttattttaggtccatatttaactaatgttattttcttatttattttatatatatatataattatttatcaaaaacattatcatatctaccaaaagcttttttggtggatatattatgagaggagagacatgtactccttttttgtattgttctttgacttcttcattaaagaacttttgagtctcaacttttatttttattaaatgaaagatatcaaagtctttagttttggttacaattttgagttatttgagaagcaacttttaaaaacttttagagtaaaagaaaagaaaaggacaaaagtaataatgacgaggaaaatgatattattttcaacaaataattaaaaataaataaagaaatactatcaagggcggacccacattaaggtgacgggcagtcggcccctgaaataaaaaattgaacaaaaaatgtatatgcatattagttagtcgaaatatatatttttaattaaaagtgatattataaacatgatataatctttagcataatggttaagctttattttatagacaagggaagtcatgggatcaaacccaataataacatagttaccttttagtatttgatttttttttaatttctatcaataaaatttgtatttagtacttcaatcattgaagtcaacttttttatttttacttaaactatatttaatattataaaaatataaatttacatcaatttttaatatgttatatcatgtatttaaaatgatacgccctccctcacttaaaaaaaaagtttacccccttcaacttaaatcctaaatccactactgttatattataaatataaatataaatgaaacaataacacatattaaaaaaataattctacatatttcatacttttacgcattattctatatatatagatattattgatacaaaatatttcttcaccacatgcactaattaaatattttctttttctatatatgcatggtattgtgattttaaaatcttggtgaactatgcatccaaataaatatttaattttcaaattattattattattatnattattattattattattttaaagcaagtgtattaaccattggttactaaaaaaaatgataataatttaatgacataataaatgaggtagctcatgagaaagaaatatcaataaatgaggtagctcatgagaaagaaatatcccatttaataatttccatgcatgatggttctttgcaacttggtgcaacttattattattattattattattattttaattgaatgtgtaattgtattttttttttcttttttgttttccatttgatagttcctagaaattattttaaataatctttatttaattaactaatatttcctcttttatgtaatagtgtaaacttgttgaattgtacacacttagacgaaatcaatatagttcgggatgaatggataaattttttataagagactcacattgaagcattgaaacttttttaggtaggatataattttgttattttaattagttttagcatgaaaatagtattttgttatataagaccctgaactgattttttgtcaaaataatattgaataataatctgatctaaaagtattatgacaaaattgtttacattttttgtatctattc

SEQ ID NO: 118505 - DNA, 1494 bp, Cannabis sativa
  modified_base (1298)..(1307): a, c, t, g, unknown or other
  modified_base (1461)..(1468): a, c, t, g, unknown or other
tataaatataaaaattaaagtacgcgataattttgttaatttattatttattctaataacaaaccaaacattttaatcaattcctattactattcttattctattaccattattattaccaatacattctaccaaaaccaaacataaacttaatattagataaacataaacagtaatgaatgaaattagagtttgacaatggtttgaagagtgtattctgatactttatatcattatagtagtgagtcgacatcattaataattggtgtggtggtagtaggagtcataggatagtgtttggcaagcctaaaaaatttgagttcatactaacaagttgtgtggagtttagaggacttaggtacacttttgcttcataaaattgcccatttgttgcttctaatgttagataaaaccaagttccttgcactaacattgtattggctttcacaatcctcttcaacttgagtggaccctcaatctgagtacgacatttgttgtgttgctcaagcgcgaatatagcagcaccctttacaaaagatgatgaagtagaatcttgttgaatcatagaaaatggagtgtattccatagggaaatccaaattatcaacatgaaaaccctaattaatcacatatataaaaaaataagtattagttagtttaaactttatttatgttgtaaattattctaattataaaataaataaaataaaaagacatataattattagttattctacctcccaagttttgagttgctcctggtgtattttgtacttagtttcgaaatcaatgtagttaggatcattcttgtaagtattgcagtagtgattttgtggattttgcatttttgcaaattcctatttagttttcacaacacaagataatgttattaattaatttgtacaaaattcatcaaccaattaaattaaatcaaaccagaaaagttaattactagcttaaaaaccaatttaatatacacctcacgagtataattcccaaatccatacccacaaacaagttgttaattctataatatcaacaaaaataatatttattaataataaatgattgatctattctatttctcattcactagcgttttaattttagaatctaccaaaacacctcttaaagaaagcaatgtagacttaccttccatttgattcataaaaatagttaaaaattaaagagaaaacctaattgattagttaattaatagactaattaagatttttacctcgttaactttcacatgtacctaattaactattgagattgaaatagtaaaattgaatgaannnnnnnnnnagtctttaaatctaacaatctcaagctcacaccttggacatgatttagtacatgtcaaaattcggtaaaaaaatcctaattagcctaattaatatattaacacactactaattaaacttatgagtaatgaattatatatatctttatatattannnnnnnntatctaacggcatttcttggtttaac

SEQ ID NO: 118506 - DNA, 1841 bp, Cannabis sativa
aaattacaacttgactaacgtactctttttcttgccattttataaacattgttaatttcttactaacagcttcaaaatacatatataagcatcaaacactaaaaatttcaccaattaaaagataaaataactgaaataaaacacaaattacataaaaaaataaacttaaaatgatatcaaataactctgtacgcaagagttatcagtaaggttgctaatggtgccctaagagtgtcacacatgcttttttcagacgacatctaccattattgcaaggctattgatggcgaggcaaggagaatccaagaactactctccaaatttgagagtgcttctggccagaaagttaattacgctaagtcatcaattttcttcgattctaacacagatgatgctactcaaaatcacatttgtcatttgctaaatatgagaccagcggatgcgggtagtttttatctgggacttcctagtacaattgggaaaaaaaatcaactttgttgggttatcttaaggaccgggtacagaaaagactccaaggttggggaggaatttttttgtcaagagcaggcaatgaagttcttatcaagtctatagtccaatctcttccaagctatgccatgagcatgtttctccttcccttggaaatcactcttgatattgagaaaatgatgacttgttttttggcggcaatcttcaagcaaatcaaataaaggcattcaatggatgtcttaggataggctgagtcctcataaaagtggtggaggtatgggtatttacaatttctgagattttaatttagctcttttgggtaaacaaggctggagactcttgacttgcaaaaacacattagttggctgaatcttccaagcaagatattatccaaatagttcttttttagatgcttcccttggtaataatctaggtttcatctggagaagaatttgggaatctcaacaacttgtgaaagctggtgttcgttggtgtgtgggtgatggaagtcccattggagttttgtttgaaccttggctgccaaacaataataatccttttgtttcgtgtgatcaccctagtttgtctcatgcgagggtaagtaatctgttgagagtgattggtggagtctgggctgtggacatcctaaatgatttatttgaggaaagagacggatgtttgattttgagtataccgcttaatgtttgatcatctgtgttggacaaaaaaaactttcgacatttacacggttaaaagtgcttacaattttctccaacaacatcaagaaagatgggaggattcgaataactcagttttttggaagaaattgtggagattgaaagtccttataaaagttaagaacttgctttggcgtgctagcacgacttgtcttccaacaatgatccaacttcgcactaaacatgtggaggtgacatctctttgtcctctttacaatatggaatatgagtctattattcacagcctagtcacttgtcagaaggtgcttttggtgtggaacagattaggcatcggcaccttggttttaccaagtatgagtttttttgattggtgcatgaattcttttaagaatgttggtaatgagcaaaaatatttgattgctactatattttgggctatttgggggtaagaaatgatatggtttggcaagggaagagttttattgtcgaaaatgttgttgcatgtgctaaaggttaccttaatcaacggagaaatgctcaaaactctgatgatgagtcgtcatggtctagtttacgggcaggtaatggggcaaagcattggacttcactttttgttgatagaatcaaggtcaatgtggatgtagcgatttttta

SEQ ID NO: 118507 - DNA, 3912 bp, Cannabis sativa
aaaatcaaaattccctacggttaaaagcctgatcataagtataacactaataccaacaatcggaaatcatacttaaataacaaattaaaagtacgattattgggaaacttaccaaaaaaaagaaagtttaatatcaacaaatatttgagtttggttcctcccaatcagcattggtaagcccaaatgtttgtcaatggaattagtcaatcgcattaaaaaagtctcaacataaaaggattgcaagtcttccggagtatttggggagaagtacattgtagacttgaaaaatttataagttgtagttaaaaataaaaaataccagtcagacacaaaaagtcatactagaaaaaagtggcaagaaaaataaagataaaaaaaaatatacatataaagtatattctaaaccatactcttctgaatgctgaattaggttagatttacaaaaacttaaacaatggtataagcttataaaataaactattgctaaagtggttctattttaaaagaattgacaactctatttaattggtggtatctttgactctcgcctaccaggacactagtattatttggttaaaaactatagaaatatttgagatatatgtttgttttgtattttttttttcatatcttcattacttgttaaatatttataaatcttttaaatttatgtgtgtgaatttatattgaacaagcaattgatctctatttattgatatttgtagctttcactatgtgggggacttgagctaaaccacttaagttttgctgatgatcttttattgttttgcaatggagatttcaagagcatatactatatattgtagggtctgaagctcttctctcacacatcaagattgttccctaacccctccaaatcggctgtatattgcagtaatatggcggatgcagaggtgcaaagaatacttgatgtctctggattccaaaagcaagatttgccattcaagtacctgggagtgcccatttgcccaaagaggatttcttcaacagattgcaaggtattggtggaaaaaatgatggctcgaatcaaaatttggagcacgaaaaacctctcttttgcaggtcgtgttgtgctcatcaattcagtcctcacgaccatacactcatactagtgccaagtaatgttgctgccaaagaaaattgtaagtgaaatagaatctatttgccgcagtttcttatggaatggacaatatacattaacaggggtgcgtgcggttgcttgggcctcggcttgtcaacctaaaagctcaggaggattgggatttaggtgcattgcggattggaacaaggctgcgttgtacaaatatgtttgggctactgctaagaaggaagacaacatatgggttaaatgggtacacaacgtatataacaaggatgagaattggtggacctataaaacttcatctcaagcaagttggtattggagaaaattggtgaagattaaagatcaaatgaaggatttgggtgcattaaacatggttcaaggcaaatatattgtggcagttggctataaagaggtacattgccaggctccaaaagtagaatggagtaaatttgtatggaatcggttcaatatttcgaagcatagttttattgtatggttagctatgcttgggaaattgaaaacaaaggaaagattgaagagatttggggtgattgacaatgatgactgcctattatgcaacaatgggagtgagacaattgaacacctttattttggctaccagttttcaaaagaatgcttgtcaaaaaccaagttttgactccattggaagacctcggcagcttctttgaaaggaatcaacaagtggatttcaaaggccaaatgtgacagcttcaaaagaaagagtatttgctgctgccattgcagctctgatttacttgatttgggccaatcggaacaatcgttattggaacggggagattgaaaactgagatagaattgtgtctaaagtaaagctgtcattaaaaatagaatagagtgtatatggccaaaaaatgtaactagtagagaagaacattggtttaatacattgtaaagcatatgtaaagattataaatcttagatttggaggtcctctaattgtggatgctcttaggttgtataaattgttgtttggattaataaacttacttatttaccaaaaaaaaaaaaaaaaaaaaaaaacttcaacaagtcaaaatgactaatgaacaagatagggctggacatttactccataatgttctcaaatttcacaaagctaccctgatagacattttgattgagaaagaactacaaacacaatttgtcgttagtagcttatcccctgaataccattaattcgtcgtatccaatatgataaataaatggaacttctctgactgatgagtgcccatttgtacactcattcctagttaattattagatgaattagtatttatttattaagtgtcgtatatatttgatgtttttttttttttttttttgtagttgttcaattttgagctttatagacgaaaataatataaatttagtgcacaaaataataatcgagatagatgccaaagtcaggaagtaaaatgtaattgaaagaagtcgaaatcaaaaattggtgttctaaacaacatgtcgcctaacttatgaggaaggattattttggcacgtgtggataaaaaagttaaagtagtcctgaaggtaaggttcacgcgacatgttgcctgactattggcgacatatcaccttatttataaaacaaacaagtttttgcacgtggtagataaaaaagttggatatcctaaagataaggtccagccgacatatcgcctgaccttaggagacttatcgcccagcgtaattttcaaatttaaatactaattataaatgacatttttttaatctttttgggcctatatgaagattgatgtacatcgactttggacgaggggagagagatagaaagcaacctagagatcagaagacatattagagagtaagagaatgagatttcaagcttaagcatcatgaaatttcattagagtccttttcttttgcttctttattcatttgttttgtttttttgattatgaacatgatgattgttgtgattatgaactaaaaactctttctagaatgttgatgaaactattttagattatcctatatttgtccttgctatttatttatgcaattttgtgttagttatcatcttgttaatgcttgatcactattaattagtatagagattttaggttttacacttgagaggtaatctaaaatcgaacttagaattgcatgagatatgaaaagtgtgagattgagagattccactaattgtgtgtttcatttaaagagaatcatattattttattattgcttgattgattaatattgaatagagatatcttgttagttaaataagttaattctatcattactcgagataggttaatagattacagtaggattcttgaaattataaattatagaataaattaggataattgataaattgagatttatagtttataatatggaaataaatgctctaggtctttattgtgtgattaaaatcgttgtttgtgtatttacttcttagttattttattatttcattcttaattattatttactttgaattgtctaattaaagcataaaacaaagaaagtatagtaattggtaaatttaataatcaattcatgtgggttcgataatctttttaaaattaaaactttggtataataacaatttacgcttgtagtaaaaatcgtgaatcaagtttttggcaccgttactagggattgaaagttttgtaaattattgttattaatatttttttttgttttaaattagattttattttgttttaatattgtttgttattttgtgattcaatttatgcaaagaactt

SEQ ID NO: 118508 - DNA, 1935 bp, Cannabis sativa
taaaagtaagattttttatagtagtaattaatatatatatttttatataagaatagaattatgcattagtaaataagatgttaacttattatgaaagtaaaaataatagaattatatatacatgtactaattaataagactattttcaatagatgtaaatattgtgccatattaattttgagaaaaaaaaaacatatatttgctataatatttgttattgtgctccaatgtacaatgaaattataagatgcaaattaagaccaaaaataaaatataatgttcatcaataaattaaatatttaaaaaaatagttaatgagaatcttataattaaaatatttatattaaatctaactaaaaaaactgcatttattgtggaccgaaattgacatataatgctatattttataccaaattttgcacaacttctagtcaaatttgatgacacaatatttagtacaccagtggagaattaatgttttttaaaatactaaaatgtaacactacaccactattataataccactattataatagtactctatcggagatattctaagaaaacttattattagagattatatataataaatttcaaagaaaaaaacttatataaagaaatgaccttatatttgcttgaaagagaatgaatataatcaaaagaccaaatgggaggttcatagtttcctgatcttctaacaatagtagtagaactagggttatggaccacagaacatttgatggggtagcaagtacttgataatcttgattttgtagtattaatattagtacatatttttggtctaaaaggtataccaaaataattactattactacaaatattagggaatattattaatggagaaaatcggtgtttaactgttatgcattgcattttgtttgtgtttttgggatgagaataatttaggcttgcttgaccttgtatttatacatatacatatatggaacacacagtagaataaattaataatttaaacaattaatatttagttcaaacgtcattcatgattatctatagttctaattcatatcaattattattgctccattattattattattataacatatataaaaaagtaaagcaacatcccaccattaattaattaattataattaataaagtgaaatttgtctataaatcgaatactataagaaatatcaatagatttgaattttggaagttagttattaaaaaatgtctaaaactactattttgggtgaatgatgaaatactagatcaatatatgataatctgcaagaaacaatgtacactacctaattaccacccaaataatataaaatgtttccactatataaatctatatattaaaatatattagtatccactcatctatatctacactaatcaagattgatcaaccatgtgaccatatgtgtggtgtagttatagggatttctgttgcatccatctttatttggattaaaggttcaaaatccaccacaatctctatagaaaggaattaaaggcttagcctttccaaaggctagcttgctgtagatggttccatctgtatgatggaaacccttaaagtaattactgatgacccaattaagacaagctgaaaaataaggtagtgctcggtagagtggaattcacaatctaattatgaatttgagctcaataatcatagatttcacatctgttaaaatatatgatgctattcaactcttaataatatttgttgatcgctttgctaaaagtgatacaagcaatatttgatagcacttttttcagtgtgcgtaattttttttttcttattctgggttattcgtaactaaaagatagtatttttttgtataaattgtcactaatcagttttagacacaaatattctagtatttatttataggcttatacacgagtatgccactttgactgcttcttggattg

SEQ ID NO: 118509 - DNA, 2176 bp, Cannabis sativa
  modified_base (27)..(28): a, c, t, g, unknown or other
  modified_base (2126)..(2130): a, c, t, g, unknown or other
aaaatagattacattgaaatggagttnnatttagggcataaaacccatcaggaatctgaccaaagggtctttattcttcttaagaatacttgaaggaggcatatcagagtagccacctagaaataaagtttggccataacaatattatggagcagtttagatctatttgtgtatattgcagaagaagccaacaacagatccatcagtagaggcacgacatgcatcacctcccatggtagaatatgttggtgtgtaccctggcgattatgatccttatgatgatgaggatccatgtactcctgcgagtggcaccattattgacataggtgacaatcagtcatagggtgacgaccaatcacagggagacgtgttggccttagatggaccaccaatggggaatagtttggcaagagaaagagaagccaacctacttagtttaaggactatactgagatgaataaaaaatataagccttttgcatcgtttgatccccttagtctgtcggattagaggttgttggatagtttttgtaggtaattatgtgaggccatccccaaccattgtctttgggatgtcaagacatgtgattagggtcctacctagtttatgaggttgttgacacgaagggattggattcaagattatatgcaatatgtagatacatgcgtccatatgcttagaaggcgatgtcacttctttttagacatgtttccccataaaagtatatcattcagtccacaaatatggttgatactatgcatgatgttcagaaatcacacaagggtctgatggccatcttttagtaggggtatgatatcctctagtactgtaaagtgtacaggtacaatttttatcgatggtttttttgttgtcaaattggctcaatttgtcatattaatttttcgatcttttatttacacaggactaattctatccgaaatggggggaagacttcctgtatttcattttctttgaaaatactcacattgggtggcttatgaggtcgacatcaagttgtgaaaaataatattgtatgactatgattctaccatttgctctaaaaaggacttggataccatcataaagacctaggaagggctcttgccttctttacaatatgtatctggtaagttcccgatcaacaaccaaacactgccagtagatataaacaactgtagccagcttccaaaaatacattatagtaaagctagtcacaaacttatttcaaaggcgaaactcaggtaaatatcttatatgtagtatcaaactaattatatcttatttatgctatacttattactcatatttttgtttgatgcaatggtgattgtagtgtttataccattaaatatgtggagtatctaatgatgcaacgtcccctcaatgttgttgcgcgaatatgaacatgaagatgttccaagaaaggtggtgcatcgatctattctatcagaatcttagttaagatatcgatagttgtgtgtgtatatttttgagacgtaattgtggtgatagttgtacatttttttttgagacatttaaagtattttattgatactattaaaaaaagtgtcatctttttaatgggaaaatatttttataatggtcgatgtaattgtaattgaaaattatattgaaatagtttcagcaatgtcattaaaccatcgagaacttgttgataaagtattgatacttacattaaaaattattgagaatctatcgataaagtatcgatatattgttgataaattgctctagataaaaattatgttgctaaacaattttgtatagagaacaaatcgataaagtatcaatatattgtcaataattttataaggataaaaatcccgttactaagcaattttaggtcaaaaatctatcaacaaagtatcgacatactatcaataatttcatcaggataacaatgttgttgctaaacaatattgtatcaagaatctatctacaaaagtatcgacgtattattgataattttatgaggataaaaatcatgttgctaaacaatattgtatcatcgagaacttatcaacaaagtatcgacatattatcgataattttattaggataaaaatcttgttgctaaacagtatttgttatagtgagatttctcnnnnntagaaactcgagaccagactcctctttaaaggacacgtgtattcag

SEQ ID NO: 118510 - DNA, 687 bp, Cannabis sativa
aaataaataaataaatcttaaccaacttaaccaaaataaatgaataaaaatgaaaaaatgaaaaataataataataataaaaggaaaacataaagaaaggggtgcagtggtgttgtggagttagcgagcgagtagatggtgaagaagaagatgagctcttcttccttaacccctctttctctctatttctctctcttacccattttcaattgtagagatctcatcatcacgctctctccttctctctctatctcgctctctaggtaacttcatttatatttctcactgattccgatcgctgtttgatcatcatcatcatcactcatcgcctattattctcctcttcttcctctcttcatatatttttatttattttttgatgaattggttacagttttcaaatcccacgatcacatataacagtagttcgtttgcgataccaaattattgatatttatatgtgaaatgctttttcgtggtagttattgtttttattacttcatcagttgattaattaatttatggttattttgaattgggctgtgctagttggtaatggtaaggaggaggagggggaggaggcgagaggtggatttcgggaagtgtgatatgtcttgtggtggaggaggaggaggaggaggaggagggcgttagggaattggggtttttttttttatttttttattt

SEQ ID NO: 118511 - DNA, 1597 bp, Cannabis sativa
ataagagatcttattttattttcctacatttttttaccttttcaattttttttatcaaaattcaatagccaaacatagggtttttgaaaatgcagagaaagaaaaaagttagataaataaaaaactgaagtactaaaagtaaaatttttgctttgaagaaacttttggcttcaaatgatggaattagtttcataaatttgtttaattttagaagaatatacttttttgaaggaggtgatggtggagtattattctattattacttatatggaaactttatcctagttttaatgtcagattattaaaacagaagctgtatatatcatagacgtggttgtcaatgtgttacaattattacaataacaggtccaacaaccaacaatgactaaaattagtattgtgatatggttatctcaatcgggtatcccaattgggagccaatacacaaggctggccttgataaacctctacattttcacatgcctcttccctcatctcccacataaaatttaattaggagggacccagatagagatagtgacattgtaatcagccacaattaatcatgttgactgatctattgaataagcattttcataaggaacagatgtcaaaaataagtatagccataattcaaatgcttactcgccggaggctattgtttatttatgttttgactcgtatgactaaggagacaagtttgtggaaagagtttccggaaaatatatgttaaatgagagtatggtgcctcactaattcgaatctctaaaattggacaagtgttacatatatttataggaaagattgtcaaaacataaaatatttcaattaaggttgatctgtgcgaaataggatcagacaagtgttttactgatctgtcttaactcttaagtccaaggagttagtatatagtgcatcacttcattgttggatgcatcattggttttagtagccctaaacaaaaagtttttatatactctattttaaattattacacctgtcctaccgacaatgaaatataattcgggcactacattcaaaagtttgatttttcatatcatttttttttaatttgctatagagtatagcaaacctatcatagactgcagattttcgtcataataaggagagaactgcatacccaccaccatttccttggaggacatgggtagagaggaaagaaggaaagaaaatacatacatacatatatgaacctttgtatgtgtacattatatacaaatacatacatatatgaacattgttaaaatttaaacccacacatttggcagagagtgacaaagcatacactaccctgcccaagggtgatggcgaaattaaaatgcccttgggtaggttaattcttcccttaccattttaaaggaactattatctatatgatataataagtaatatataattaatttctcaatatctattattatacactgtatcaattaaaaaaataaaaaaattattattatattttaataaaatgtgtcaaaaaaataagataaaaatatatctaaaatacaaagcaacacacatataaaaaaaaatattagaaagaaactaaaaatatacaccataaaaaaataca

SEQ ID NO: 118512 - DNA, 2424 bp, Cannabis sativa
  modified_base (205)..(210): a, c, t, g, unknown or other
tttcagctgatggaacaatctcagcccatatgatataaaaatgagagattttttttttaattaaatagaaaaattaagcataaaaactcaaaattttctaattttacccatcacccatatatatatgggtgcaatgggtattacgtataaatgagtaatattagaaaattttgagtttttatgattaatttttctatttaattannnnnntttctcatttttacattatatgagctgagattggtcaatcagctgaaaaaaaaagtttttcggcaaaaaagttgaatttgacttaaacattttttcatataaatatatttttgatatagtgtaaaaagtagtatttttttatatgttcttgaatgaagtagctaaattaatcatataaatttaaatttctctttcattgttcgctatcggaccaaaatctaatggtttaacatttttaaaattaatatttatagttaaatttgtttattactcattaatgggttatacccattaagaagtaccatatatatattatcaagagaataatatataaagtgtttggtaaataaattgtgtatcacatgtgttatttaacttatattttgtaatttatatattgtaatttgaagaggagttagaatttgttattacttgtaactcttttttggttgacactactgtaaaaatagttttttacgatgtttttaaacagtaagtattcccattagtttctataattatcacctatacaaccgtcgaaaaatggacagaatagacaacagtgcgaaactgttgtcgcctattccctgtataattttaaaccttgccatatagtacaggctacattttttatttaaatttttatttcagcgacaggtttttacagtcattacattggaaaaataggagaaaatataaattttctattatgtttgcccctgcattaatttttaattttctttacaaatgtatatagtcagaataattaaactatcgctaatattatttaaatatatctaaatatatatatatatatagttacaataattaaattaatgctaatatcatctaaatatatttaaaaatctatgcattaaactaacaataattaaactccatttaaaaatcaataattcaactaacgcaaataatcatctgaatatatttacaaatctatatagtaacaataaattgagatatatacacactgatcaacaaggaaatagttgtcgctctgcttccgctttcacgtaaagaatccatcatcgatctcgcataacatttatctcgtcatttatgtacgaactggagaacctaccctataaaataaaggtatatattaattagtaaagactattaccatatgctatttaataaataataatatttattataatacttattaattattttaccggttgtgtcaacatgtgtattggatcttctatggtcataaaacattcaatgaatttcatgacgtagtatccacattgttagtcgtcaggttcttcatgacacataggagttatccattggttgtatatggtgaacgatctacacaaaaagtaaagttagcatgtataattttataaatataaaatacacttacatagtgggatattggatatagaacctaagtgaaaatgatgaatttctaatcatctagtacgtcaccattttctgaatccaagtacggcaccatctgtgtacttggttggatgagtacatgcatctactgaaacatttacctgcacgaacaaatatgtgtgaaactgttaatacacaataataaatattgttgatctcaaaagtgatcaactgatagcgaggtcgtatagatttgatgcttgccgcgtgtttgcacaaataataatgaaaagcaataaataacaagattttttatagaggattggtccccttgtgatagcgagtaatgacctccttttagttgtatttataccgagagagttactatccagatcactatgggtgggatatgctatagcaccctttagattacaaggtatgaatcaatacgagcaaaactcaagtgttgagatgttactaaggtaggcgtgtgagagagaggaagttaggaggagagagagagagagtttatcaaacacttagagtttggaggcaggtttcagacttagatgcaatttaggtttctaggctaaggttatggcctttacataggacgcttgaaaccctaagtttatagttcaaatcccttaatacttgcagttttttagatatttacaaaagactaaaattctcatgattctagatattattcagctattctgttgggctcttagggcccaattcccaagccatgtgttgttgtccacctgtagaagtgtccaggaaagcctgtagtgcacttctgttggaaatattttatcaggatcaagatttactaacaagtat

SEQ ID NO: 118513 - DNA, 1364 bp, Cannabis sativa
tcatggcgttgagattttggaggaccctctgcaacctccaacacttctattcttggctaatgtcgcaaagacctggcatatctctctaagtcctttcccaaattcccagccaggtgtgggcctccgatcactatttcaagcctgcctgctataggcacaagctagagtggtgcattgcacccagctagagcttcaggtcgctcatacaattgaagatcagcatgcttctgtccaatcagaaattatatctcgtcttgcaaatgattacacttgttcgtgttgtgaccgtaatagttgtgatagcgtcagaatttgttcatgtctctcttcactaactctttaaagggaagaggattgcggtacgacactatcgattgagttgtcgtatatatctcttttcttaggaccaagagaatagagtaggtggtgacatctaaatgatgatattctcctcgagactcgcactaacataatcaaatttcagtttgcaaagccatgttgcacacgctccattaagaaaagtaatctccacaagataaggacacaatgccaagtgtcgctccatttcaaaaaaaataagaagttgtgaaccacaaacagttcagtttagaagtcaaaaatgtttctccttttagcctccacttgtcctcacatcattcggggaggtagcatgcaagcttccataacacctagagttccgaaaaagtctaggggaaaatgttatctatatttctggatggggacacgtgtaattgcaaaaggcggtacatctcatccatttcaggcccaacagtaggcccaattaagataatggacattagtgaagtcatgtcttccgaatgttggacagattactcgtccaagcgagaaaaccctccagcacagcgtgtatccagaagaccttggtcaaagcatccaggaaagtaatcagcaagcatccagatatcctgctcattatcatactcattaataaccagatattatgataccatgacttaattcccaagatctcgtctgatgatcatatcttcccaatatgaaaagatagtaattgaccattaagcattaagtttctttattatccacaaaaataagacacgattcgacaactatcaatatgatgtggcctccacgtcagcatacaatcaaaacctcacgagctaggcctcatcgaattggcccaaagtcgttatattagttgtatttatcacatcagtgggcaagaaccctagcactataaatataagaaaactcattcatgcaaagggatagaacctcaatccttgagtgctcagacaaattccagggttcaaacacttgtgtaaatcataaggcttttctggtcttataaaaataatattgat

SEQ ID NO: 118514 - DNA, 2487 bp, Cannabis sativa
  modified_base (1658)..(1663): a, c, t, g, unknown or other
aatttttttaaatttttcaaaattttgcaggttgtcttaaataactataacgtacataatcataaaaaaattaactaaaaaattatttcagataccgaaagaaatagggtacatcaggtgcattgtaaaattttcctgtattatatattagttccatttatgattttatgaatatatttttaaaaaattttatagtgcatcgatacacccctaccactatttgtttagcatctagaaaatattgtagttatttaagacattttgcaaaaaatttgagaaatataaacaaatttgacatgttgtaaataaggttcaaatagtgctttgttgcactgatttattttatatccgtgtgaaataaattgtttgaaaactattttttatattgtaaattattttaaatttctctaaattttataaaatatatatattaaataattataacatatacggcaatgaaaaataattaaactaaaaaaatttcctagatcccaaaacagtagaaaatgtttcggtgcaccattttttagagatacattgtagaagctccatatatttttaatatatataccttttaagagcttctccatttgtagttccatgtttaggagaatagatgccagtttccaagttgaccattgaaacaggtttttgcaacagatcttctccaattctcacaagcttgtctaggttttctttggtagcattatccattgaagattccttatcacctagtgtgtcatcctacataataataaaaaataattataattcattaaaaataaatatgattttttaaaacactaacacatttaaattgtgtcccttaaatattttctgttgtaaaaatttccctgagttatttctgtttgttactaacaaactactgacatataattcaattaagaaaactaaaaatgtgaattattattaaatagtcaattaaattaattataacctggattcgaaggtaatttttctcagaatggagagcttgaaaaactgtagaaagaaagatatcggctaaatcgctactagcttgagtgaaaatatcaaccaagggagtagagttgtgactgcttaaccatcccaaaacaccccattttgcagcctcatcagctctgtatttctcttctgatttagctgaaccggttcctatcgatatcaccaaaaatcggccaaactccatcggcttgattggaaagaagtccggatttccttggaaaatttctttagacacttcatttatagcaaccaatgcctgaaatattgaacgttatgaaatatatacaaatatacatacacggtcgccctaggttatggcgggctaagctcgagcttagggtccacctatgttaggggcctaaataaaataatattttttaaaaaaatatatatttatatttttttaataatttttaaagatatcatttattcttataataacgacttaaatttttttagaaaaaaattcctaagaatactacttatagtattttcaattttatatatattttaaaatgatattttacaatgtagttaataatgtcctacaaatttttcaagaaattatgttagaattttggataagatgaatggggtttcatctaagaaccaattgacaatagaagaatagctcattcatcttatatatcacnnnnnntttccacacattaacaatatgagactgactttgataaatcagaattcaaataacctttaatttacacaagtataacaaaccatgtttgatcactaatgggagaacatttgggatcatatgtcaccctcaattttttctttaaaaaaaacattatgaacattaatgccaataaaattcataattgaacatcatgaaatatattatactaaatacatgtaaattaagttaattaagcaattaattaccggattattggcaagaacaccaccatcaataagatgaaattctctgagttgaccatttggggtttgggtttgaaaagaatgagcaggaagatatgttggtgcagctgaggttccaatacaaatatctgataacttagcatctaggcttgagtttctttttacctatataaacataataaattaatatataatattttatagagaaatgaaaatgaacaaaaacaaaattaactttctattttttttaaaaaaaataaaattttaattaaatatttaattacctcataggtagagaagacagtaggttggagacgtttgatatcaaatgttggaattatgagattagtgagtgtttggtgtaacctcagatcacctaatttttctttgagaagtttatgcaaatacttcccatcatattttggtcccattagtgatttaattgattggattatcccaccaaatgaacatctacatataataattaataagaaataaatgttttgagaaatgctaaattaaaggtacacttgctcaaagtctttgtatacatattttaatttaataagtattataaaaaaa

SEQ ID NO: 118515 - DNA, 1137 bp, Cannabis sativa
caagttatttatttttctgcaaatatttcatattctgtctttctgttttgttactgcgaaattggtttctgcagtaacagaattactttctgcttctgcagacgcatatagttttatattttcgtacatataattgacatttgcaaaaacaaagtttttcagaaatatatttaattaaaaccgtgttacattttgatttctgatttccacattttagtttataaattttttaaaaagttgtaacagatcaattataactacatcatcaattaacgttttaaattatgtttatattgaaaatactaaaagtacacttatagtgtgatattgcccaaaaatttcatataccatagtgtgctttgagcattgctataaattaaaacaccataatttaataaaatggtaatggttaggagctttctataattattgtaaaaaaaaataaataaaatttaatattaaattgtaccaataataatataattctatataagagtgcatgatcctatttttcaatttcaaatattgaatgatgtttaaacttgcatgatccttaaatttaccactttcataattaaaatatgtatataaaattaaagtgtcattatctttatatattaaaattggttattttgaatagattttttttttatttttgttaaactttaaaagatatatatacgacaagtattgttaatttgttattaaataatataaaatagatgagaaaaaagaagaagaagagaaagagaaagtgaatgatgataatttctcagttgtttattctaatgggatgaacccctatttatacaaatacaagagttcaaatattaagaaactaagaaaaatagaaactaagaaaaagagaatgttgattacaattaatggtaataaataaaaaaattggacatccacataattattaatatttataacactcccccttggatgttcataataactgtctcattaaaaatcttactgaaaattaaacttgatcaaaagaaaaatagtataatgtaaactaataccccctgatttagacattcgtggagatcttctaatcgatgaattttgatcttgtctgtcttctcaaatgttgatgctggtaataactttgtgaataagtttgcaaga

SEQ ID NO: 118516 - DNA, 1872 bp, Cannabis sativa
  modified_base (1819)..(1831): a, c, t, g, unknown or other
atataaataaaattttaataaagtacatatgttatttcgtatatattataattttttttttttttttttgcaaattaaaaaggttaacatagaatttgaatagtctaatattttcttaatcataaaatatagtcattaaaatataggatgcttattattacattgatcatagtagagtactagagttagattagagtagccttgttttggtccaacgttgaacatcgtccatcctagttttgactttgactctatgatatttaaataaaataatgtgattagatatttttaaaggacattaattttaggagaaattcttattaatgtattttaatattagatttttgtatattttaattaaacaagttatataaaaaaccactaattattgtgttagacactttaaagtactttattataatatttttaatattttttatttttagataaattattattaatgcattttaatatggatatatttaatttaataagttatataaaaaaatactaattaattataaagcgtcacatcagtattgtgttagacgtaattacaatgttctttttttttttttttgacaaatcattatttgtatatttcaatatcgaatctcatatattttaatttagtaaattatataaaaactcactaacaaattataaagcctagacaccttaagctacctaattacaatgctgttaattttttttatttttctcactgggtagagagtataagataccttttcaaaacttccctttgttaaaaaaacttacaaagaagattgtccaaatcccataatcaaaagaagtaaaaattagtgtcccaaaatgacctaagacctactctattatttggctttctcttagtaaacaaactagttttagttttagtctttgtttttttttttttaatattaaattttcataaataaattagacaaaagagacagatggttaagaaagaggaaacaataggggggttatcactttaggggtatttatagccctatcagttatcacatgatttgtctatatatatagacaaaaaaaaactcatgtaatctcagcaccatacccacttgggtctgattctcaccacaagccaacaatttctttttttttttttatcttttaaaaagatcattatataatcaaataaggtgcaaattgtatattttggagtttattatattttctcttctgtcccttttaacttcagtctttatgtagatttgttttctgtgtataccaaaaacccctagtcatgatattaaaagaaaatctttttttttttcctttttggggatatgggccagaaaacggccacccagtctgaattttctgacgtaatttcgattttcccaacaaatgaagaaagaaaaaattgctgaaacttttagggttagagcagtacaatattacacaggtttaaagacttgaaagttacccaccaaataataattccctactaaaattgaacaatttcttctactatcagataaagtactattttaagtttcgatttgcagataagagataaaaaaaagataatagttgaaaaaacagcttgactattcagcttaattgctaaaactctcttgatttttgaagaagtttgttcttttgggctaaactcggcccaagtttgttctgaatgggcctgttctttttggctaaactcagcccaagtttgttctgattgtgccttcttaaggcccataaaagataggacaaagtttgttacttaggagtggtttggttgggaggaatgaaaatataggaatgagaatgggaataggaatggaataaaatnnnnnnnnnnnnnaaaaattgataaaaaattcattaaattttttttcttgttac

SEQ ID NO: 118517 - DNA, 689 bp, Cannabis sativa
gagaagaaggtcctcaacaacgtcattactttccctcctcatggagttttctttgttcgatccaatattgaaatcggtgcttcttctaagcagagagtgaattttagattcacgagtgcggttttgcgtggggaaaattgggagattccgttgcccccatttggacagggctggtttgacactgtgtatttggatgatgagattcgtgttgtcaaagatattaggggagactatttagttgtagatcgagctccttataattggaaagaatgaaaatgatgcagctttttaccatcacagcgttcttcacacacatttgggtacatatattcttgctctttctcataatttatgtgtgtggttttgataaattcatattggtctgtatagtctatcttgataacatgttattgatagtcaatttcctttatgatccactaccaatccataattagatgcttctgctttgctcattagagtatccttggtaccaatatctgtgaatttctagacatagttgagctaagtctagacatagttgagctaaggtggcgtttggttggaggtaatgaaatggaatggaagtaaatcattttcattctattcttttgtttggttgcattttaaagtattggaatgacattctaatggaatgactattctattttaaaaagaaaaaaaaaaatcat

SEQ ID NO: 118518 - DNA, 1097 bp, Cannabis sativa
aaaccaaatcacatattcatttaataatatccagatatatatatatttattaggcattatgcacataccaataaaattaaatattatatcatcacaaaaaccgcatacatatttaaacacataaatatgtaaaataataataatattctcagttaaaaaattataaaaataccctttctgagttagcggatattacaagcccaatccgtcgttgtgcctaaccactttgcctgagaagaaaccacaccagaacccaaaaaaattgaagcgatttggagatataaaaacccttttcaacagtcacatattctcaaagtaatgggaaaattgaagtagtcaataaaataatcaagcacagcattaaaggaaacctcgaggagcaaaaagccatctagctagaggaattaccacaggtattgtggtcctacaataccacccctcaattaacaactgatgaaattcccttctcactattttatgagtgcgaagccatggtcccaattaaggtaggagcgagttccctttgacgtgatgttttcaacgttgaagataatgaaaatagttaacttctccaattatatttattggaagaagggcacaatcaagcccagctaaagaacacaacctatcaacaatgcacaacatgttatttcaactctaaagtaaaggaaagaagtctgcgagtaagaaattttatattatgaaaaagtcagtcataatatctgcaactcagtgcatggggttttcagcgattactgggagggcccatacctcatcgctaaaaaataggtaacaaaacataccgattctttgatcttaacgactcagtctttgatagagcttggaatggtgagcacttgaagttctattatcagtagtaatgacatgtatatacttagctgatttatattgtaaaaaattacctaagtataggaagtatacatgtactaccactaccgtaaataaaaattgcactactgattaatcaacgaattgcacattattttgattggcaaagcttcctacagtgcttagaacctcaagccgaccataaatcaccaaataatacggtccaacatcgttgtcttcttcgttgc

SEQ ID NO: 118519 - DNA, 1777 bp, Cannabis sativa
ccaaccttggccgctctagcgtgctgtataatgtagcttttcaagtttttggtcctccctttgcataagttggccaagctcgttcttaggacgacatagtctcgcgaagcgcaagttaagacaggaattcattagcaaattatctccataaagttatttatttggggccaatctcttgaacgacttgtacgccgcaccccggagcgtcaccatgaagcattaacaccatgaaatgttgcgtttcattttttgttttagggtaaagcttttaccagtaagcttaagtgcaccaacaaaagttatttttcagctttgactttttccagtgagccttattttgtcggtaaaagttgaggctgaataaaactcgagacgaagccccttttcccccttttgccctcttttcttcttcatcttcttctttctctttctattttcctctctaagttcggaagcccacccaccaccaccatcatctcaccaccatcatcattctcaccaccatcatcatcccattaccaccattacctctgctatcgtcacctctgttgttgcctccgcttcccttaaaggtgtgttttaatttttttttaattttaatttttattttggtatattttgatttaggtataattttgtgaatatatatgtgtggattgtttaatatgtagattaatttaggtttagttttgtgtatattgatttttgtttaattttgtgtatatatgtgtgtgtatacatgaatatgtatgtacatgtatgtgtgtggatatatatgagtatgtgtgtgtatttttgtgtatgtatatatataagtatatgtatgtataattgtatgtatatatatgtacgtatatatatttatatatgtgtatatatatatatttatatatacacatatatacacatatatatatacatacaaatatatatcggtatattagtttataattatagttattaatttttttttaattttttggtaaataggtttttaatgtcgatttactcgttgactgaagaaatgctctcgttatatttgaaggttaatatgcttttataatatgttaatacgaaaatggcttaaatactatatttaataaattcatagatttagcataccaatccatggatttacctgaaaatgcctattagtagagtttaaatatcttatatatttattcatagtaaagtagattatgtgaaaaatatactgcgatcggtgggtggaaaatattattgtgtttgttgttttttttgtagatattaaaaatttaagaatgatcaatggataatcgttaggttaccgaatttttagtagcataacattatacttcatactgtaattaaaaattaataacttggtaaattgataacatcttagtttaggctttaattaaataaattgaaaaaaaaaattagtaaattggtaacatcttagttcaaaaatagaagagagaaagagagaggaaggattcgaaatagagagaaaagagaaggctcaaaatttgactgaaaggcttgagtgcatcatctttcaatttgagaccatcactatctatttataggaatccatctagatttaggtttgaattatttgacattaaaaaattaataaataaattgtaaaatagagcataagtggccgaccttggatgtgggcccatcactttaccattttgccatttttcaactatttatcttatttttctcaaaaatgccatgttttccaattcaaccacttaaatgcgaaaactatgtatttaataattaaaat

SEQ ID NO: 118520 - DNA, 879 bp, Cannabis sativa
tatctcataaagtgagatgttcaccaccaaattgaataagaattcaaaatattttttattcacagaataaatgataataattctcacaataatactaaacaccattttattactgtgaacattattatcatgctatgtaactcatatattaatataaaattaatatataactcccatgcatgaattataactctcaaataataattctatgccaactaatataatatgtatgttacttatcaacatctcatatgtaaccatacacataatatcaatattaaattcatatgttacatatttcatatacatgtaacatatatatctatatatcatatatcatatacacataatatatatattaattacacaattatatatgttacttacccacacatatataatatttatatacactttaatatacaatatataatatatactataggctcccgattccaacccgctttagacggcagcggattaagttacgctgtatataatatattagtaaacatatagatattgaggtttattattgttctacaaaagtcattcctattattgtactttcttcaacatgtgtcatatgatttggacccacttacaattaaagaattagattaatatttgtggtatccgatcttcagtactgacttgtattttttgatttaaaatataattctttacagggttatatatgtatttgctcattattaatattagtttattgtttttttaaagaagcattgcctaagacacattaaaatagtaataagacacattaaagtagtaataaaacacattgattttagagatttttacacctcatgtcaaaattgacatcttttttacatttttatcaatacacggttttttaaa

SEQ ID NO: 118521 - DNA, 1722 bp, Cannabis sativa
tgtgaaccatgcagcataaaatgtgatttttggtctttattaattagtaaatctaattatattgaaatgggttttatgtaaggcacaaaacccaacatgatcagcaccagtaataagtatgtcatcaacatacataagaaggagaagaagtttcccacttttttggtgaagaacaagctggtgtttgattttgagttgtgaaaaccccattttgtcagagaatgtttgagtttgtcaaaccaagcccttggagcctgtttgagtccataaagagcgttgttgagtttgtaaacatggttgggaaggctggatcttcaaaccaggaggttgatgcatgtagactatttctttgagttcaccatttaaaaagacattgttgatgtccacttgctgaattttccaattgtaagtacgaatagtacaaggctttatgacagggttgtatgtctttgtgtaatctaggctaggggtttgttgaaagcccttagcaaccaagcgggctttgtatctgtcaactgaactatctttgttgtatttaacctgatacacccatttattggtgactataggagcatcaggtggaggaataacaaggtgccaagttttgtttctttttaaagcataaatttttattcattgcttcattcctgattggactggcaagcgcagcctttaaggttgttggttcggtaactggtgatgtggtggcagtatagattttttgtttgaagataccaagcttggatttggtaaccattgggtgaaggttgtgagttatgacaggtgctaaagcagatgaattattgttgaaattagtatcaacagtattgttatcagcagtactattgcttatcgtgtgtgagttttgggagctctgtgatgtagataatgagctattgggggattgactagatgactcgtttgtcgagttgatagggagggaaggtgggggtgagggaggtggcataggtgtaggattaggaggtatagtagttgtaggaatagtataggcacctctgtcaattatagttggagtaatttgagagagagattgagaagcattaccaaaaagggtgttatatggaaatttatattcattgaaagtgacactacaagctacttacaccctcccactaggatgcaagcacctgtaacccttggaattaagatagtagcctagaaataggcatttagatgatagaaaggacactttgtggctttcataagatcttaaaaggagaaaacatgagcacccaaacacttttagcatggtataattaggggcttgatgaaaaagcttttcaaaaggtgaagcaaactgtaggacaattgatgggagcctgttaattaggtatgctgcagaagtgaaagcttcccaccaaaaggtgagaggcatttcagctttggcaagaaaagtgagaccaacatcaacgacatgtcaatgtcttctctcaactctaccttgttgttggcgactgtgggggcaagaatttcttttgacaatgcctaagtgttgaaacattttgtataaagattcaaattctttccctaaatcagtttgaacaccttttattttaagctggaattgcctttcaacataagcattaaactgaacaaataagtttgctgcttcagacttttgtttcattgggaaaatccacacaaatctagtaaaatcatcaacaaagctcaaataatacctatatgttggaatttatttta

SEQ ID NO: 118522 - DNA, 1353 bp, Cannabis sativa
atgaggttcatctcaaaagcaattcgcaatgggaggagtagcccattcctcttatatatcacaatttatttctacacatttgcaatgtgggactaactcttaatatatacaagaataaactcataaaaataagtagaggaatgaaatttatcattcacttaatttgggattgaacaaatggtgtgtttcaacttagcatagccccaaagtacatcattacaaagaggacatagataagaaattggcatcctatctctaaaaatgccacctttgggtctgaattgtcaatgattagtgtgtaaaattacatttattagattgtacatatataaaatgaaattttagttatttgtctcacaattttcattacaaaaataattcgtttaacatgttatttaatcaaatttgtgttatattgaagattttgcgcataattgatagaagttaaaataatgggataattatatcaaacataaatttttatgcttgatttttttttttaaattttttttttacggaattttataaaaatacaagaaaaataaatgaacgtaacccaaaaataacatctaaataataacaaaacaacataaaaaataatacacaaataacaaaaaattaacaataaaataataagagtacaacataaaaagattatgtaaataaaatctaaaaaactgtaaaaatgttaaaatttctataaataccatatttttatgttgtttttctattctttttgaaattatccctaaaaataaaagtatcaaagattaaaagcccaaagataagaaggcctaactttccttacatgggctacacacttcactttagtgccaatgtttgtttcaatactcttttacaagagaaaaccaaaaatactccaaaagaaatttagttaatttttacccttttttacaaactttattattgtttaatgcgtggagtttacttttcaaaacattatgtttatatttttaagatcactattttaaattttaaaggtgtgagaattattttttatggtgtggagtttagtttactatttgataggagcaaaattggtagtagttaaaaaaatggtaaaaatgaaaggcatcaacataaaaagtgaaaaagtacacattatgagtttttctacaatttgtacaaaaaatatggcttttattttatgggaaaaattcaaaaagatatgggaaaaattgtataaaatatctagttaccctaaagaagtaactggttagtggttaccctaaacatttttccttgtaactttttctttaatgtataaattttccctcaagataatttttttttgaaaaataaccatattttttcttgccaaaaaaaaaaaaa

SEQ ID NO: 118523 - DNA, 1205 bp, Cannabis sativa
acttttagtcacaggttttgttgtgactaaacgtaaatttctttgtaatgcttgttatttgtgtttatatattttatattgtcttgagtctgtaatcaagtctacaaagaaaaaggacaatgctatacctttaggagaaagtttaagcttttaatttttcaagtctcgtcttgggaggaaacaattgaaaggaattcaaacacttgaagttttaattgaaaaagtatatataataaatcaagtttgcgatatacaataaaatcggagtgagaatatataatacaagtgcaatgaattcatccaatgaaaatgaaatacttaattacactatcctagggttttactaaaagcaagttattataattaataatgacaggttagtagaacatatataaattcacttaatttttcacatgatatactccattataaatattccattaatatattctacctatattatacatatacaactactaccactaactaaggtcagaccttaaatttcaataattgattggaaacacatttttgtttgccctagaatcataaaataaacaaatattaattataataactcggacctagttgaaaataatagttggtcaaaacgaaatttacaaaatggaattaataataagtgttttgactaataagaaaaaaaaatatttttttatatgaaaaatagaaactaatcatatagccctaatacatattagtaataataattattattttaacatatagaatgaatttaagaacaacttgggtagccgtccatagtggagtataaacaaactaaagcaaccattttgatgagtttccacaaaaaacaattaaataattatgatgttttccatgaaaaataacaatacacttttatttatttatttatttattattattataattatatattttttttccaaaaaaaaaattcttattttgatcacagatgcactaacttttcttagtccatacccaattgggaaagtggaaactccatattaagttcatgaaaaaaattaattcatactataatatgaagttgccatatgacatgtgttattatctgggccaatgtgtttgccaccttaattattattaattgtaataatatttttttttttggtgattctacaatgcacccccttaaaagggatgtattgatgcacccttaacttgtttcggcatccagaagaatt

SEQ ID NO: 118524 - DNA, 5573 bp, Cannabis sativa
ctatggattttctatccaagtattcggccagtattgattgtaaacgtaaaatggtaaccttttagtcagagggtgaggattcatttatttatgttaggatggttaagggttgttggctgtagtgtttgcctttggcaaattcagatattatcttgttgggaccaaggtgatcatttacaccaatcatttagccatcaaatatttaattgccaagatatatgcaaagccaagactcatttgttgggtgttacttcttcaaaagtttgacttagaaattcgagatagaagagggagaaaaaaccaaagtggctgaccatttatcttggctggaaataggtggtgaaaggcaagatgagatacaaattcaagagactttttcagatgagcagatgctggttgtagctcaagaaaatactccttggtatgctgattttgtgaattacttagtgaatggattgcagcatcctgatctgaataggcagcaactaaaaaaatttgttcatgatgtaagattctactattgggattagtctttcttgtataggcagtgtgcagatcgaataatggagcgttgtgtgacaaaagaggaagttgcaagcatcctagaacactatcactcatcttcctatggtggacactttggcgggcaaagaacagctgctaaagtttttcaattggggtattattggccttccatcttcaaggatgctcatgattttgcaagaaggtgtgatcgttgccaaaaagttggcaatattttagtaaggaatgaaattccattgaattacattattgaagtagaactttttgacatttggggaatcgatttcatggggccattttcgccatcttatggcaatctctacatattgttggcggtggactatatctctaaatgggttgaagcagtaacaagtcctacaaatgactcaaaggtggtgatgaagcttctccaaaagcaagtattcacttattttggaacacctcaggcattaataatcgatgaaggtacttattttgtgaataaaattcttgttgccttgttggtcaagtataatctcaaatacaagattgaaactgcttaccatcctcaaaccaacgggcaagccgaactttctagccgagagatcaagggcgtacttgagaaagttgttaatcctaatcgtaaggattggtctcataggtcactctgattctctttgggcttactagacaacgtataaacacctttgggtatgtccctttatcgattggtgtatggcaaggcttgtcatttgctggtagagctggaacacaaagctttttgggctataaagaagctgaactttgatctccaagctgctagagaggcccgaatgcttcaactaaatgagcttgaagagatgaggtttttctcctatgaaaatgccaagttgtacaaggagaaaaccaaaagatggcatgacaagaggattcaacatagagtgtttgaagaattgcagcaagttatgttgttcaattcaaggttgaagttgtttcctatgacgttaaagtctcaatggtccagaccattcactatcaacaaagtgtatcatttcggagctattgatgtcaaagaagaacagtttgggagggtatttaaagtgaatggacaacgactaaagcactatattggaggtgaagtcgatcgggcaaagacctcaatcactttggaagatgcatgaagaggaagattgccttgcatttggattgttaatttctttatgaaaacctaatgttggaagaggaacacgttttgtaaatattctttgtgaaaaaaaaaagagagaggatgtttaaaattaattttggggtgtaccacccctttttgtataagaaaaaagaaaaagaagaaaagaaaaaaaaaatatatatatatatatatatacacatacttatataattacatatatatatatatctcttttaatttcctacagttactaatgattttgcaatggtgggtgatttttattgcaggtgcaaggcaaagaataacagaaaatggagttgttttaatgtggtgaaaagcaggatttttttttttgaagcagtaagtccaaggagatatagcattgcttcaacatttcgaaacaaggatgcataagaaaatgaaattttgaagcaatgctatagcaaaactgtaactactggagtatcaaattttttttggaaaaatcttgggcatttacagaaccactcacactggggcgtgaaattttctaaaaaaaaaagaggggggctgaagtaaatattcacttattaataacccatattatttctctttaaccctaacaacccaaccttttccatcatttttcttttccttctccagaaaaacatagccgcccccaccaaaatcccccatttccaccattcccattccaccagctccatccaccacgagctgcaaccagccaccctagcattagctctgcctccatcaatatcaatttcaccagcatcgttcaccatagttgaaacccagtggagttccaatcatcacctaaccaccacaaaacgtacctcgcaacaacagctccatctccaccatttcgcatcaccgagtgaatttctccatcgcacagtcgtgtagagccaaaacttgaaaaatcaccatcagtgccagccataagcatatctctcgccattctaactgctcacaaaaattaaaaggagcaagattagccattgttgtgttgtcttcaagcttcttgcgagtctgttgacatacctttaatcatatttgggtgctaattctatttggacacactcagtttggtggaaattcacatttggctttaggtaacattgatatttctattttggtgtgactttgaattattggtgtgagatttgtgcctgattattaaatgaatcaaagaaagatgccaagaaccaagcaagtggctcagaagaagaaacaacctaacctggatgacatcaagcaattcgtaactgccgcagctaaaacaaagttcaaccagttcattcggcataaagaattctatattgagcgagggttgatggtttagcccactaaatttggaaacttgccaagttggttagtggaacatatcaaggcaagaaattgggaagactttgttgtagctccggaacagctttgattgaagttgttaaggaattttatgcaaaatttttagatcattagtggccaacaatatttactgttcaatgagtggatgtcccatttagtgctgaggttataaacgaatacttccatctcagaattgtagaatgtgagtactctaagtgtagtgagaatgtcactgacaagctcatccatgacattctgcccaaattagccaaactagaggttgattgggagattgatgaaaagggaaccttctggtttagaagaactgatctccaacatgacctcaaatgcttgtatagctttgtccaagtaagtgtcctcccaacctcacatgactccactgtgagtagggagagaatgtggatgttgtattgttttatgaaggggatgaataatattgattttggcagagtgttggctaaagaaatttttgactgtgcacactgggaaaaaggcaagttattccttcctgcactagtcatggaaatatgtaaggatgccagtgtcacaatgcaaactaatgaaagcacagttccaaagaaattgatcattattttgggcatgctcgtgtctcgaaacgcaccccatagtcgattccacttctaatgatcagttgttgaattgattgaccaagcaagaaactttacagcttcaattatctcagcggtaagcgcaaatgagtgagcgtatgcatgctcactgggcctatgaaagggaaagagacatgtgaatgaggtgtgcactgtagatcaacctgcccaaacaagtttttggatttctagaattttcggatcaaattcttgagccgtggttaccggttaatgaagtggacgagactcttgtggtgaagagtttgattcttgaaggagtttttcttttctctttagtttaattttactattattgtggttgtttgtgtttgtattattgattgtgtgtttttagtatcttttgctgttaaatattgttgcatttttattttatgtgttgtgttttgttaagttgtaactgagaggattagttgcttgtttagctaggttagcgtagcgctcgatgacaaaaaaaaatctattttcctccattgtggtgtgccttggtttggtgtgttgaaaatgctagttttaagtgttatttttgtctaaatgctagcttaggagtaatgttttcaatagttgtgtgcttgtgttatcccactataccttgagtttctagaatagctaacaccttaagagagtttaagcatctagagttggttagtgtaattcttgaggcaaaatcctagctagctttacaacttagaaatgatctaggccatttttgaacgatttaacctttcaaactaacccaagaatatttaattgtcaacagtcacccctaattgagcgaaaaagcctagttttttttctctacaccaatcaaagttaatagacccacacacacacataaatttcatccttcacaacctaagcctaatcggtgaaatttatcaaggacaaatcaaatattatttgagataaggaagtgaggatacaagtttacaaagtgtggtgaaataatttacattagagatgatgatggggtgtgagtttggggtggtgaaagtttgattcacattacataaaagtccctcttttgctacatatagttatatttgagaaaaaaaattatatatacttatgtgaagctactgttgctgttcaaaagaaaaaaaaatataaaaaatgatatatatacaataatagtagtaaataaaagagagagaaagagacagtttaaactaagtttggggtgtaccaccccttatccaagaaaacgtagtagcttttgctctccttatctagtttgctttggaactaaaaatagcaagagagtttgagctaaaattagttaattattgcgagttgagaatatatttttgggtgagtgcttaagaggaagagaaaagtccttgataaattgaggtggttaggttataagctaaagaaatattatctttcatcctacccgaacctaagcctcacattacaagcctagtaaagtccttttgagctaaggtgtaaagctagactacattagtggagaaggttgcaccgattcaacttatggaagcaaaccttttaaacttgagatcgagggtagttgttatatgaattcaaggtgttggtgggaagcatttgtatatactctagtgattgagttacttttgttaaatattgtggacataaataacatgcaaaacttgattgaaacacgcaggttcaaggcatattcactaccatcatttcacttccattccatataactctgagagcattttcttcactaactaagtttgaatgagtgatatcctctctgtttctagtgttttgttatcgctatcatgtttgtctttgttgttttgttctttctatttttcattactcgaggatgagcaata

SEQ ID NO: 118525 - DNA, 2385 bp, Cannabis sativa
taattcgtacttgaattcaggttggcttttggttttcaaaaaaaaaaaaaaaaaaaaaaaaagaataaccatcacttggtgatctggcgtgcaaaaaaggtagatatccgcgacactccaaggcggttgacatcctcattaggctcttcgagtatccactcgggtatcagttgggcaggcttccatgtttagactcctctgggtctgagagaagtaatataccctctgcgtctgggaagccaagatagagccaagtatacttttgtgtactttttaatcttgacctcctctcgattccaggaggcttcttcatgacaggatcgtagtggaagactttaattagggtattattaagctaatctcttccattatataccatgtgtcacatgcgtacttagaaatacgaataataattcctattaatttatgaaattaactttaagggcaaactaatattgtatatcctaaacttagaaatccaaaatcaaaggaaaataaaaataaagaaatgaaataattttgtctatgtaaaacaaacattagtaaaaagagtttaaaatatttctcttttttgcttgattttagaagatatataatttttattagttagaatggaatatgaatgttaatataaactttattaaagaactagtaactaactagttacataaactttgtaactagtaatcatttattaaataactagtgactagtagttacatgaatttggtaagtacaagtaacaattttctttctttgaaatttttaaataattagaattgtttgtaggttttaaagttaagcatcaatgattttaattggggggagaacatgatttttggcaagtgttgattgggtttctagctagctagctagaggtataccttttctaacttttaatttgtttgaatttattatgaataagcatattagatgagtttgaatatcttaaatattcatttatagtgaagtaggttttgtgaataaatatactgcagtcagatgagtgtaatatatatgcatgttagaggaatttgaataacttaaatattcatccgtaataaagtaagttctgtaaatatatgcattgcgattgaatggatataaattcatttttgttgttctagattgttatatatgtatgtgtaattttttcaagaatgtccaatttattgccgttatgttactaaaatttcggtagaattaagataaattttttgatttaagttatttcattatagttacctttcttgtctttgaatttctctaaatggtataatattttgtataatttggtcaagtaagaattttatcacctaattgagatgaatctaagacttgattaattgacatgattaataatatgtttattaagtttgttataaagatcaagaactctcctaattagtaacttgctagatatatttttctacgatcatgaggtaattaaaaagttaagagtcaaacttttaaaaaggattaaggttacttttacaatggaagaaaattacttttataatgggaattaagaaagaaaataataataataaaaaaaattaaagtactttcacaatgaataccgctatgaaaaaaaaattgaaaattttcgaatagtttacagtaccgaaaatacgtttgaagtttcggcatgtgacttcggacgtggaggttgactaagagattgtaataggaggttgtaattagcactcctccaacttagatatgctattttaaatgaattagtggataattaatttatttatgtatgtacgtaactaataaattacactaacttgtaattaagtaataatatgtattttaattttgcagtttgaaaagtaagttacttacaatgaggagaggtacttgcgaccattgcaacatcaacgactagcgaaattgacataatatttgtactagctagattctagacttagacttttaattttagataaatacttattttgtgttctaaatttttactatacttagacttttaagtactttttttttttttgaattaagtgtttatatattacaatgtataacttgcgactcgaactcaaagactccaacacacatgcacctttctatgtccacttgagctagcctcaagttagactttgaagttatgttgtttcatttttataaatgaataaaaagtcaattataaaagtataaatgaaaaaatctctacaaacaattcattgccataaaaaaataaaagacataattttttttaagaaaaaaaaaatgaaaacgctcattatatcagtagggtgttcataagatagtcgatccaatctaatctgcacgatccaatacaatccaatccgcaaagagcggatatccgcacttgtatagattggattagattggaaaatt

SEQ ID NO: 118526 - DNA, 1081 bp, Cannabis sativa
caaccccaatagcagcagcctattggcttctccaacgtcgtactcaccgccaacgcgcctaagcctctcgtctacagcttcttcaatacgtccctcgcggtgaagcatccaaacccaatcaaccaaagtgaattgatccttttcgtgctgaatcttaacaccgggacttctcccggtcacgacttctaacactaccgccccaaacccgaacacatcagattcgggagaagctttgccagtgtggaagcattctggggccacataccccatggtgcctgggacaccacatagctctagctcagcgtaggagtttttttcattctccaacgctcgagctaggccaaaatcacccaaacgagcgttgaaattagagtctagcaagatattgctggctttaaggtcccgatgtacgaccttttggtcgtactcgttgtggaggtaatgtagcgccgacgccacgccttttaggatcttgtgccgatgttgccatgagagggtggtttggtttgaattgaggtgtttttccacactaccatttggcatataatcgtatactagtaaaagcttccctttctcgtagcaccaaccttcaaaaaagttataaattaacacaaggttgttgagtcaatttatccaagtaaaaaacttaattttttagaggtatttttatattttagtctagttttcataaaaataattttacaggctatactccatttttatatattttactttcttttttactcaatgtttataaaatatgtttggttgttagttctgttaaattgtgagactttgccattgttgttgatgcagcttataaatctagacaaataacataattatttattactgttttaaaaatattagatattaatagtacagaaaaaagaaaaaaaatatatatatctataaaaaacagcataaaatacctgtatactctcttataataactggttaccattcatgttaccataagagtatctagttaccattatttgatttttttttcttcaatttttctataaaataatctttttagaaaaaaaaccatatttttataaaagggtaaataccattt

SEQ ID NO: 118527 - DNA, 2546 bp, Cannabis sativa
  modified_base (1985)..(1995): a, c, t, g, unknown or other
  modified_base (2489)..(2500): a, c, t, g, unknown or other
tgcacagtacattacattaaaaaaatcacgtcacgctaataacacgcctaacgcctatattagttagggtgttacatctagctagctagatgtatattaactttgttattaattaattatgaatacctagaagagtttgaatatcttaaatactcatctgtagtgaagtagattttgtaatatattatattgcggttggatgggtagaataacatgcatgttagatgagtttgaatatcttaaatattcaaccgttgtgaaataggttctgcgaatacatatactgcaatcagatgagtagaatctgcgaatacatatactgcaatcagatgagtgttaaatttattattgctaaatgttgttgtgatcatttttgtaagaagagaattgtgtgtagaactatgaggcaaaggagtcctgtgaattgaatctccctgctgctaatttgaagtaagactgataggcggcctctgccaaagtagcagggaaaattctacaccgtgcatcaccctttactacctgtaagtccatttgtatctcaaaatatttaatgtgaaaaaatgtatcttctctccccatatacatcttccatgtaggaattttaaacttggttggaagatcgagagagttgatccgtgcagaaaatggtaaacctcttgtccgatcaagttccaggtcagtgagttttgggtcgatcaaactttgtactaggctcttaagcaaacctaattgggcttgtatgccttgatcaacttggcctaaccattgaccgacctgtgtcacctatggaccccctggagcctcaaagggtacgacatcatatttgttttgtggaacataaatttctagaatgatcgactgattattgtgcgaggggatgaaatgtcttcttagaacacttctccttcgatttgagtcatccagcaggtcgctttcaggtccaggttagaagttggtctgagctctactcttgaggtaatgaccaggataaaatttctcatctgttgggcggatagtaatttgatcacggggcctggaactaggtaatctgtcttgctcgtattttggtttgtctagcttgagcggctggacttcttatctttgcctcaagtctgttgggtaaatttctcgattaggttagcaacctctctcgtatgtcaattaatttcttcttgttgggcttgtatgatctgaatttgatgatccattcactcttggaattcacgtcgttgttgttcgaacatacaattcacaattgtatggattccctcctggttgctatggggtggaagccgtacgttaggattgtgatgctccgtggtcggaggaacctgaacattaggattagtaaccatcagatcttgtagatcattggattttgcacttcttggttgaaccattgatgcgtgtcgtaagccacaacgaatttattaattatttttatgtctatattactaattacatcagtataacggtaaatacaggttgatcccacaaggactattatcaatttattattcaaaaactagtgacaagaattagaaaatagggttttgacgattagaataaaataacataaataaaaataaaaatgatttcaatgtcatactacgatatgagataaatagttaaaggttattctccaccctcaataatcattcttaataggggtgtttataaaatagtcgatccaatccaatccgcacgatgcaatccgcaaagtgcggatatccgtacttgtgcgattgggttgcattagaaaattcaaaatccgcacttgtgaggattggatgttgattgacatgtaaaagtaaccgatccaatccacacatatttataaaaaattaaaaaattatatatacaaataacattaatgtaaagaaaatagtaatttaaaagtataatacatataatattttaataaatcaaatgtatattttattcttatacataattttttatagacaatttaaaataaaattaannnnnnnnnnntacatacaattttttttcttccttttgttatttactattttatttgttttaatgtgttgttgaagatataaaataactataatttgttttattttgttgctagttatatgaaaaatatattttttttttataaatattaaataatttaacgttaaaaagtaactaatttaaaataatcgatccaatccgtacttttacgaattagattggattggatttgagttattgtggagattggattgtctaaaaaatgaaatccgcactataaggaaaatagtgcggattggattggatgaacacccctaattcttaactcctataaataaatataattttagtttccaattaaactattaatcccgcaaataaagctgaagttgtcaaattatctcaatcttcctattacatgtaatcaaggccaaccactcaataattaactcttttacctacgcagtaaatccacaaagtatgcaatttatttaacttagagaaannnnnnnnnnnnatggagataaattaatctaggcaataaattaatgaagtatataatt

SEQ ID NO: 118528 - DNA, 4487 bp, Cannabis sativa
  modified_base (4247)..(4247): a, c, t, g, unknown or other
atggacagtagatttcgaaaggtttaccgattaacccgaccaatcacagtagtcttcaatgcttcgaacaaaacttgctgcttctttttgggtggctttaccaaacaacataatgtcatcaacaaacattaaatgggtaatagcggggccatttcttgagatcttaaaacctgcaatctcaccagcagtattttttgacataagcattctagataggacatcggctgccattttaaataaggctggggacaatggatctccttgtcgcagcccacacgagggggagataactccttgcaaagaaccattcagcaacagccccattttctcaacctcgatacatttttcacccatttaacaaagctgccattgaaacccaggttattcaaaacctccaaaataaaaccccaactcatcttatcatacgccttctccatgtccagcttgatcatcatgtagcccttcttccctttcttcttttccatagaatggacaatttccttagccactaccgtgttttcagcaatcaaccttccttgaacaaaagccaattgagcaggcgaaataataccgggcaaaagactttatagccggataggtagcacctttgatatgcacttgtaagcgacattgcataacgctattggtctatagtcattaaccccagaaggacactctttttttggaataagaaccaaatttgtgttattgataaactgagggagttcgaacatgttgaagaaatgagagatcatactaaagagatcatccttcactgttatccagtgttgacgatagaaaccagttgacatcccgtctggccccggggccttctcttgccccatagacttcatacaagcctcaatttcttcaaatgacggaatggtactcaatttagcattctcctccctagaaattactagaccttcctggccaaactcaaaaggtaaacaagactttcttttgtccacaaaaatactttggaacttttcaataaataattgcgcaattttttgctggtctctctcccaagtcccgtcagtagtcttgatctcttgaatgaaattccttcttcttctaaccaccgtggtagccatgaagaatttggtacacctatctccttgcttaagccacgaaactcttgatttttttctccagaagatctcctccctggccagcgcctcatttagattatctctggcctgtccaagctcttccgattgaacattacttgctttctccaccatttcaagctttgtcctggcctccttaacttgttgcccaatacttttaaaatggactctattccattttgttagatgatctttcgttttcttcaactttcgataaaaattcaccataggattatggtgaagttggtctttccaagcattttttactacccagaagcatttcggatctctggcccacataagttcatatttgaactgcgattttctaacattcgccccacccttcgtgtcaaggagaataggccgatgatctgatgtggcggcactaagaactcgaacaatagcatttgggtgaagcatcctccagttcacaaaagccagggcttgatccaatctagctcgtttaagtgtacacccactcccggttcctgacgttttttggaaccaagtgaacttccctccatgagcccctaaatcaattacccccgttcttgaaaccattctccgaaggtcaaaagaatacttcgtagcatttcctctgtttgaataatgaagggtctcatgatccaccaacgtgccattgagatcaccaatgagcaaagtcagaattgaattgttgataatgaggtcactaaccctattccaaaaaacttcttttcccgctaaaactggagggccatacacccctagaaggttccacgggtttccaggggggtcagactcaatgacaacactgattaagttcttgtcgccatgagcatcctcacagcgcacccctcttttccaataaagcccaattcctcccgctcttccaaccggaggcacatagacaccgtcaacaaaatgaagtttcccacacaagctgtgaaatttatctaagcttagtctagtttcagagataataatcacctcgggattggattgacggatcaacgccgtcaactgacgaactgccactttgttcccgagcccacggtagttccaagaaataatcttcattgagcatttggagacttttgagggcaagtctccatagccccaaagcaaaaaacctgtgcaatggttttttcattggtaattgtagcgtccttagtgggctgttgctgaggatcttcattctccagtatctctgaaattacacagttgctggtagagtttggatttttgtcaattattacaaaatggttatccaaatcaatagcaagctccactgccgaagcattccaaggatcactatagtgcttcctgtccttcttcgagattctcctttttccttctttctttagacaaatcggtttcgcagacaaggacgctgcctctttcaggggtcttcctcttctccttgatgatttaacttcaagaaattgctggaaaagtgtctgctgtgtacgagttgccaaagcacattgagaaaaattttctgaggggctcctttggaatgggcacgctgaggttcagagcaacggtggacttatctaagcctctattttcaggcttcttcctcagtcgaactggtataaaagatctatggctgcaataccaatacgaaaagctcccaaaaatttgtttcaaatgtggaatgatgacccatgaacataaatactgctttaaaactccaatggtgataaaagatgcaaatggtggtttcttcccaatgtttgggaactggatggcggaggatgctttggaaaaattgtcttttcactccccattaccgagatggttttctgagtggattatcttcaaaaaggctgctaaggatgataaagttagaaatcttctcaaaacccaaaatataagtcgtcaagccgagaatgcggaatgtcgagagcttcaaaggcaatatcctgggaaaagaaggcaggtggaaacgattgttgaaaccaggagtgatgccggagaagttgttctgaaccggtatccgatggtcctattgccggggataaagtttcccctttcgagaatacagcagacctggtggtggaaaagatcatcccagaattaccacttggaatgaaaaggacctgtcaaaagctaaagggggtacaaggcagtgatagcacaacccttgggtctgagacaactgatgaaggagaagcaaggttagctgtccagttttctccaattagtgtaaacaatattcagaatgtggtggacatacagagaatcgatactaattgtggaggagaaaagaatatagccgttgaaggtgttattggagagtcatccaataatgtggcccataacctggaaggcccatttgcttatggcccagaaaggaaaaaggccccattagataaaagccaagtataccaaggcctctttggctctcaagcccaacctcttaagtggccttcacaagagtgttggaacctagcttttgatcaactgttgggcgcaactactctagacaagtaccaccgtgagcagactttgttcaatccaattatggacatcgaagatttcagatgttatgaagcggagcatggccctaggaagcgcaaagctatggatggtttctttatgttaccagccgaaggtagttgcaactcatttgatactcctttgaagattaacgattcaaccagctctcctcaccatgtgaaagagaatttaaatatttctcccctggataatggatgtaacttctcccctggcttgaagaaagagaagatatgttatgacattcttttgtgatattttttttctttctaatggtaaacatcaattaaaaaataataaaaatgtcttcatgtcatcaatcatcattcgtatcatcttcattagagatttctaagaacatctctaatggattgctaaaatgttgtgttatagtttagcatttttaataaaattagctctctaagatcggagatgcgaaaattaatctatatttggcacaaaatatagttttgtgatatttttgaatcaacttttactattatgctctaagcataattgtaaatcttgatacaaaatttaattctcatctaatactttatttttatttttttgaataatgatgaaattttattaaatcaaatcattcaaaantaaagatgcataatccatgggtaacgcatccccagaataagtacaatcagcctcaacaagagaagatcgcgcaatagcatgcgcaaccttattagcagatcgcttaacaaaattaaaagaaacatcatcaatacccgaacacacagtcatacaatcagaaagtatatggccataaggagaagccatatgtttaaacttttgtaaatccctgatgactctcaaacaatccgactccaccac

SEQ ID NO: 118529 - DNA, 1311 bp, Cannabis sativa
ttcttcatctggttgctttgtataattggtttcctcattcacgtctgtcatatgttactcttgaaattgggaagttcttatatgttgtggggactcatgtcacaatcgatttaccatcattaatgtttgaaaggattgtcgaagcatcggaatgcactagtacaaggaacaagcttccttttctgagtttgattcaataaatcattatggatgccaaacttcctctgacgacccgtgattatcaagtcccaaatccagtactcaacaagagttttctatcagttgttcatagaaagttctcttcgaatgctctatcttcatctaggccatccaaaagcaaaccacccttgtttaagggtttatctgattctagctagcaaatgcaaatacactcagattttaaagcatttattaaatggtacaagaaggatcaaaagcgttagttggcatttgaggcatctatgtataaattagctcaaattatcaagacaattgttgttcagaatcattatggagagtcattaactccatcaattgacatttctcttctgattttcatcgagattcctttggtgcttcttcagatggttctaataatgctgctaatgtttagggggggcacaccagttctgccccagtctcaagtcaggtgcctcaagaaacttcaagcacgcatccaatctcaactgtttagcctccagttgccactactccaacaacaacctctcaggatgaatctccaacaataccttcccaagaggagctagttattgattactctagttgattttatattcaatgaatggggagaagtttctatcttttaaaatctttttgcttttgttcttttaaaaagacatttatcctattatgttttcgtctttggtttatgtggttatattcacttggctatgtgtggaattttttttgttacagactatcttttgtttgtcattgaacataatctgtcaaggggaagcttgtaagatctaggtgttttcatgagagattatgtccagtcgtgtctagcatgttagactggtgtaactagctttttacaatttagaattgtccacgtcaaacttttttaggtctttctgttacaactgtcttcgttttctgttaacactaagactttttagtataaatagttgctattattttcattaaataactttttgatcggagattctttaggtcgagcttcgttgttttgtattctatctttctctattttacaggttaaagctcaaaactttatttattgatcaagatttgaagatgataagttcagactgaagggattttagt

SEQ ID NO: 118530 - DNA, 2083 bp, Cannabis sativa
gggacgtgagttacttatcaaagggcttcgatataaaatagggaatggatttcatatttctactgcaaaagacccatggattccaaccatttcaaacttctttccaattacttatgttggctccccaacactactagtatcatacttcattaccaagacaagagaatggaacctttccttgttaaaaactcattttggtgacattgatgtggatagaatcttatccattcctttgagtttttttcctactcatgatcggctaatttggcactacacaactgctagaacttacacagtgaagtctggttttcacctagcttcggatttagatgatgctgagatggattcttcttctcactctcataaagaatggtggaagttttttttggaacctcaaattgccctcaaagattaaaatctttgcttggagagtgatacacaatgctttacctgtggcaactgctctgtttcaaaaaaaagttctaaatttagcagcttgctcattgtgtacacaagcttgggagtcgattggccatgccttattctactgtaagcacgcaaaagctgtatggaaacacttttattttcctattgattatggaaagacactgaatttggttgatggtgattatcttttctatattgcaaatctccttagcaagcatgagtttgaaatgatgatatgcatcatgtgggtgatatgatatggactgatcgtaataagatcatacatggagaaaagagaaaggaaggttatgctttggttgcatatgctactaattacatggacaattacaataaagttaacaatcttcttcctcctactgttgcattatcttcacctactgctgcaccttccaccgatattgctgcaacacacagtctcccaactgaagtagttccatggaagccaccattgttaaacaagctgaaacttaatgtcgatgcaacagtaaatacatcagaaaaagttctaggtattggagcaattattagaaaccatgatggccaagtcgttgctgcattatctaaaccagttcaaggatgctttagatcagacgaaatggaggtaaaagctctctttcatgcgctaaattggataacacaactctcgctgagaattgatcatgtgaaaactgatgctcttcgtcgttcaacagcaattaataataaatccttagatttatcttctttttttgatttaattttagatatccgttgtcttctttcttttttcccaggcatagttgtttctcatgttaggagaaatgctaaccaagctgctcatggtttagcaaaatatgctctagggttggatgtagacacttgttggagaggagaaattccttctcctattttctctgttgttgtaaacgattgttgattataataacagtgaaactttctaaaaaaaaagtactctgtgaaataaataattaaataataaataataaaaaaaatcatagataaaataaaagtaatatcgattaaagtcttacatcggatataattaataatattaaaaagtgtataaataacagtaacaatgtatgggttatcaattgattttgcggtttttttatttttacacttcaaaataatttttgtttttttatatttttacgaaattttacatagaaatctctattgcaactagcagagcaacttaaattgcaactaaaaatcgtatagcaacccacatagaaagaaaccactttagaaacccactataaattttttttaaaaaaaatattatatagggcgattccctattgatttttgagtggaacccatacttctattaattaacccattcaaaaaaataaagaaaaaaatagagaaaaatcaaaagaagaaaaaatggaaaaatgacaaaaaaaaaaaaaataaagaagaagaaggaaaaatgagaaaaaaatttgaaaataattaaagaaacaaaagtaaggaaaaaaaaattgaaataaaaggatgaacaaaaaaagaaaaaaaatatggagaaaaaaaataggaaggacgaaaaaaatgaaaatagaagaagacaataatttttttttttttttaaagaaaaaagaataaaaag

SEQ ID NO: 118531 - DNA, 1039 bp, Cannabis sativa
agtaagattttttgtagtgattctagatcattgagtctatctagacataaagatatgtatcagttacttgcaaatgctcttttaataaatttaaaacgaagtctgtatagacgaaatattggaggaaaattacaattttataaacattggatacttatgccgctaaaaataaatatttaatttatatgttgcttacaaacttaaaaatttaaatacttatgccgctatttaccctatttatattcatggtaaaaaaatgacgacaatggtatatattatttaattattaaacaattgaacaagtatcacattaaaaaaaataaaaatctttcaatggaataaaattcaccataattgatcatcactaaaatattcaccatcactactagccattttcactttcttctaaattcaacaatgtaggctaatagccaacaagtttgttacagcaaagagaatctgccatgtggcatggtacactagaattcacaaaaggcacaataaataaaaccttcccttgtattacttaatgaatctttcataccaccacccctcaaacgtaagaatgagcttgtcactccaaattcataagtaatgactttgaactttggtttagtaagaacctttgtaaaagaatttgcaattagttctcgagtaagaatgtgcctcacttcaactttcttttacaagacattgtcatcgatatattttggttaagcatgataaattggattccgcttaaaatagaagaagatagagaagaaaagaatgttgaaaatcctacgaagaatgcctccagtattgacttcggtctctgtaattcgcgctctatattatgttgtttatttccctctgaatttcttcctctaaaactattaaagtccacttcttttatagccaaaaaatgataaaataaaataaaaattgctgtagaaaaataactcatttccttaagattagaaaacctattctggttaggattagaagaggaggtgagttttctgctgcgtggccataacactataagaaatgtcacttt

SEQ ID NO: 118532 - DNA, 1126 bp, Cannabis sativa
  modified_base (1052)..(1065): a, c, t, g, unknown or other
acaccttgcattttaaaatatagtgtaattactaaattatgtaattaccatcttaataattatcctacctaagaaatttttaacaaactatatattttaagtaataaaatctatcaaaaagataaattttttaattattctttttattagactatgatggactgaattagcaaggaacttatattttttaaatatgtaattggctttcaaatctttttatattttagttttatatactaccttttattttattttttgtgttattacttttgatttcatatatttttttaagtgtgaggcattatttaaattatatcattaaataccaattgtcattgtataccatgtatatacgtggtatgtttttattaatttcaagattatcgtcacgtgtacatatgtatacaaagtgatagtgtcaatttacatttaatagtaaaatttaatttgtgcctcaaattcgtaaaaaaaaaaaaaaaattgaagttaagaaaatattgctacaaaaaaaataaataaataaaaggactaaatgcatataaattaaacataagagaggatcaccatcaattaccctttttaaaaatttaaatcatctagagtttataaattatatttaaaaaggtaaattgcggtaaaaatatttaatattttaaaaaatgtaatacttaaatacctaatttttatttttagtagccaaaaatacataaactttttctctagcgccaaaaatattacaagttttaaaatattacacgttcactatcaaataatttttaacaagttaatgaagattgtcttttttaagcaaaggaagaaatattttatttaaaacaaccaccaagcgcttgaccaaacagtagctatgatccaagcaaatctcctattaaaaatgacttccatattttaaaaaacatccatccaatgctcatttttgaagaccctatccaacttagagtaaatgcaagcaccagaatcatgtttattcaaccagataaagtgagcaccagaagcttttaaatcatcgacctgttggattttatgccctaaannnnnnnnnnnnnnatataatcagatttactaattaattaagatcaaaaattgcattttttgttgcatggttcac

SEQ ID NO: 118533 - DNA, 1932 bp, Cannabis sativa
  modified_base (1883)..(1888): a, c, t, g, unknown or other
aaaggttcaaatcccactaattacactttatattttctttttaaatttatttacgcccccctcactttcaattctgggtccgccactgtgtatgcaattgaaaatattgtcttgttatatatactatactcatttagtttcttctatttgcctgaaattgagcctaagtatttcctaaggttgattcacacgttagagtttgtaaggaaattccaattaatacaattctctaaactagagaatcatgattaaggatacgaaccttgtctccttcttagttcttacaatacaaaaaatgaaatttttgccaatgtatttttatatgggcaaaaactaagtattatgctggtaaaataaaattcatttttgtcagtatatttttgcactggcaaattcgagttggtattgaaacttttaccagcacaaaataaaaaatgttagcaaaaatgactcttttcagttcataaatacgctggtaaaagttagatttttaccagcacaaaacttttaccagcacaattatgcacgagtaaaagtctaacttttggaagcaaaaatatgtgttgggaaaagtcttacttttactaacataataacgcgttgggaaaagttttaacttttgccagtaaaaatatacattggaaaattaaagtcttatttttaccaataaattaacacgctgaaaaaagtcacttttaatagattgatatttgacttttgctagcacaataatgagccagtaaaactttgtaatttaattttttatttaatattagtaaaataatacgtgctccacacgtaaaccactcacaaaaaaaatataaaatacaatatttatattatatattttataaaaataattatagtattaagatatgtattataaataattatattattttaataattttacaaaaatcattattttactaattttttttataattattaataatatttatacataaattataatatatatgtatattattttcataattaatacaaatataattatttatattgatttatgtaatttttagctaatataataattattcataagaattaaaatatattattataattatataagaaaatctactaatttttataattaatgataatatctatgattaattataatatatgtatactgtattatatgattatttatatattgatttgttggataattattggctaatatataattataaaaagaaattaattgaaaacaaaaaaaaatatataaaaatataatgtgatttatattgaactaaggttgaaaaagtaatttaatatgtaaagcctaaaaattattgacacttttatatagttataaattatttaattttaatttttatcaattattttaaattaaaaaacatgaaagcttaattataaaattatacaataaaacataatttttaatacttgttggctcttaaagcactagggcatagtgggcaatgatgtggtcaatacttgttgatgcggttgtttatcaactgatctaagaagatcgtaagggctatgctgaatcaagtaggctaaataaaactacaaaaaataaataaggacactaggctttatagtagttcaccccacatattgttatggtaatgtggctacgtctactttatcttttattaatcaattccaacagtagagttatatttttaagagtgtgtggagattagtacaaatagagatttctaggtaaaatctatatcaaagtttatgaatataaggttcatgggagacccaatactcataaacttgataatggtggttgtaagattcttggaaacattacaccaataaaaataagaataaataatggtttcttcttcttagtaaatgtaacaccctaactaacnnnnnngtattacgtgatttttaaacacactgtgcagctcgttgctaatc

SEQ ID NO: 118534 - DNA, 1702 bp, Cannabis sativa
ttaaagtagggaaataatggtagtgtgaatattataggtacgtaggttaatagaaattaagggagcatgtggcaagattggattatcgtaattttagttagggtgcttgtgtgtttggtgtgtgtctttcttgttccatagctgatgtaagaagaacacatgggactatagtactgaggtgggcaggtgtttcatcatatgactgtatttccaccatgtttttttacacaatcaaaacgagttaccatgaaatcaaacactatgtacatgttcctatataacatatatatatttataggcttgatatataataatatttgaattgatcagacatatataggtgaataaaattatatgtatatatattttcggcttattatatattttcaagaataatactaagacccaaaattttatgtacatctttataaaaataatatattagtgttattatggtgttaataaaagtattttatatatttcaattaatttttaaaatttactattaatatattttttttaaaaaaattctttcataatttttttgtgttaatttgaaaatatattttatgatgttttcatatattttattttttaattctaacattattttatatattttattttataaatactttatttttaggatattgatcgataggatgtgaggaggaagagaaaattagtataaattaaaaaaaatatataaattttacccaaaataaaaaataataaaatgaagtgtctaattataatttgttaagtgcaaataaaatattaacatactttcacattttggtcctcaccttcaattttttcacatttatattcccaaccttaaagaaataaaaaatagtattgttcgtatttttcactttttaatccatttcatctaccaaaattataatatattactttttgttattgaatttcgtattttataattgctaatttatttgaaatatggaataataaagttgatattaaactaaatattttgtagttacaaattaagattgtaactacagaacgaaaaatcaatgaagatcaaaagtgcaaaaaaaaaataaaaatatactaagtttttagacgcaatatcaacaatctttgcagattattacaaatttacggatccatgtgcaaggataagatttatgagtaaaatctcaaaaataaaaatcttttaaattatacataaatagacaccctcttaacaaatgaatcttgctaaaactttaagtatattcgaactcccttcgatcaacttgaagagttcttgtttcctctcgaggcaagacttgaaccaaagtccttccactaaagtcttgaaaaaccttcttccactttatttttctacttgtagacttgattgactactcaatacaaatacaaagatataaaaacagatgtagagtcaaacactcccctttacacaaagactctctatttacaatataataatgaaaaacagagattaaacaaataattaacataccagctaatatgagtaaaatatttatagacaatatactcatattcggtagctaatacaagaactaaattgtccatagcctaaaagaaaaactatcctgaacgattgctttgattagctcaatataatttttgagtatcttttgtttaggttattatgactagtgtttgttagactatatatatagtgtatgtaatatagcatatacaa

SEQ ID NO: 118535 - DNA, 1423 bp, Cannabis sativa
gaccatctcgtgatgccacgtcagagtatcaattttgggataaaacctgtaaaatcacccctcaacaaattctaagcaaaaacaacagcaattacacagagaaacacaaagaaccattattgagccaagttttagttttgaaactcaaacttgctcaaccactcaccaaaccaacaaaaccagccgaagagaaccttaaaaaactcaattaaaacccgtaaatcaaactacaacagcatccaattcaaatagaacctaaattccagaaaagcaagctaaaacctaactaaaagctttaaaaacttaaagagtagaattctagggtttaccttgtcaaatctttccaattgatactgaatcacactctaaattcagttagaatagaagaaaaaaaaatagaattagaacctagggttcctttaggttcgaaaagaaagagaaatggaagagagagaaaattaatttttcttttaaatgagtcataaattaatctttattcaataaaataatgataataatcagaattatattaataataaccaatcataatataactaaaactgcaaaagataacaattactctcaacttaagtaacctttaagtttaggagtaaaatggtccaaaactataactccacctaaaatctgatacatcaaatattacttatgtttatcccactaagaaaaatattctaaactcattcatgtgactctaatggccattcatcgcatttttcatcgaatccgaccaaaaattataaaaattgtaagtttcacatatagtaataataatacacttaaagtttgataaaatcttcagaattaaaaaattacaactctaatgtctattttctaaaaatgggacccacaacaaaaatattcacatataactataaaatatagataattaatgctaattgccacactaatctatatttcaatcatgcggtcattacaactataatgttgtagccgacgggtttttcatactcaactatgatttagcagacaacttaaaatatccaaagaacaattgcagtttagctaaacacaaagtaaataaaaaactataaaaaggaaccataatctttctttagatgattaagatagcaaaaatagtaactgtataaatgtctatacaaagtgataaacaagagaaacatcatcttctagtccaaataatcttcacaatctattacaatcctaattacaacccaaaatcataaatatttcttaaaccttaaacttttaaaggacaaacgataatttacacaacaacatagagcacaatcattctaaaccatcatcacacatatatacatcatatatacaatttatgcatagaatatataagaaagcaataataagacacacgaattttatagaggttcagctccgagcagttaggtaatagcctaatcct

SEQ ID NO: 118536 - DNA, 1405 bp, Cannabis sativa
tcttaattaccttctttaacattcattatttcctattggtcatatatatacaattttagaaagagaaaagaaatgcaattttcaatctctcctgcaacattgttatatttggtgcaagaaatggagttagttattattgattagttatgcgtgcgtgcatattatatggcagtgttctcctacagtggggcccacgatgtgatagaagtgcaggaacaggattacgaatcgtgtaacgtctcacacccaatcataacctacaacgacggtgagacggtggtcccactgaaccagcaaggaaccaggtacttcgtctgcggtcgccaaggtcactgcctcatgggccaaaaactccaagtcaatgtacttccctcccctactaccaacgaaggcgacgccgataaccctgatcgtcgcggtggcggacggcaacatgctagaccacctcctcctcctcataataataataataataataataattcatcatcaaataataataataataataatcctcacgatcagcacgagttgccttcgttggatcctcaggtttgtgtttgtagcggtggtaatccggagaaggtggtggctgtggctgactctgcgttcggttggttgatgccgttggttactgcgttgatgattaatcttgttggtggtttggattatctcgttggtgtttttcatctcgtcatgatctgattagtagtgacgatgatgatgatgatgatgatgatgatgactgtaataatgataataataataatctgttttggtgtgattgctgatccccccactacgaactattttaggtactaattttcgttggtttaatgtgtcattttggcttctgaaaaaactgtaattgtagtgggagctatactcaaaattagctagaattactacttttgtctattatacaaattcattgagtctcatttgatcagtttgatcattatcatcacacatatagatatatatacctgttaaatttaatacacatgtgcatttcatttcattcaacagtaatcaacacaaaaaatgctcattaataatattcaagatgatcaaagcatctatttagaggagcattgattctacaataaaacatatgttcaatattggacataatatctccatgagccatatgttgaaaccttttgaatttccaagaaaatcacaagaaagtagagattgtgtaaacaaccatattttcacaataccattagtcccaataaagggctcataattattaataattatatatgatggattatttaatgtgtcacttatagtcgtcattaggctatcatattcctcaaaaataattagtgactattaaccatctctttacaggttaattaatatatagttgtgattgtgattataatattatccttat

SEQ ID NO: 118537 - DNA, 766 bp, Cannabis sativa
ttttttcggtgtcggtttttcggtgttcggacggtcggtttactcggtttggtcggtttcttagattttttgctcacccctagtttctccttccccacaacatgatcatgaacccccaccaacaattactcccttaccatctactggactacaaatcactgccccatgtaccattccccaaaatactcactcgatgatgacatggtctaaaaatggcataaccaaacccaaagccttcacagccatttccaaagtatcccttgaaccaactaccctaaaggctgctttacaagatcccttatggttcaatgccatgcaaaatgaaatttatgccttggtcataaataaaacatgggtgctggtgccttattctccagaaatgaaagttgtaacaaataagtgggtgcaccggattaagtataactcagatggtttcgtggatagattgaagtcacggcttgttgcttgaggttttcagcaaactccagggttagattattttgaaacatacagcccagtcattaaaccatctaccattcgggtaatttttacacttgctgcctgcaataattggataattcaacaggttgacataaataacgccttcttaaatggcgagcttcatgaatgtgtctatatgacccaaccacccggtttcaaaagtgtcgattatcttgatcacgtatgcaaacttaacaaggccatatacggcctcaaacaggcacctcgggcctggtttaacaagctcaaaacacacttaattcag

SEQ ID NO: 118538 - DNA, 1311 bp, Cannabis sativa
atgtaaaataaaaattattgaaattggtgcacttaaatttttaaaaaatttacataatagaccaaattttttaaaagaattacaaaaatatatcaacacgaatttttttttacactttgaacgtttttattaacaaaaatatatcatcaatataaacgataagccgttttttcgttgttttatagtttatttatagttgtcattatattattttttaaatttttttgtagttaccgtaaagttaatttctcgtttttcttttttttaaaccaatgtatttttataatttcaaactttataaatgtatttttataaataaaaattttaaaccgtaaaattataaaaaaaatactttagaaaaagtccccaagttttttggtgtaattaaaaattcccatgaaaaagcatacatataaacacacgtatgtctataggtttctacacaatcaaatcaactgaaaatctaaggagccactaatataaatacatgcatgcatggctagctttaaattaatcaaacgtgaatgactaaacaatatgtagttgtctctatttttaattttttaaaatatctgtaattactggtttaaaaagcatgtgtagaaatcaccaaataactttattataaggaatattatttagtcgtgtacttaacaaccaaggctcttatatatattatatataattatatattactgttaaaatatttagatataatatataatatatatatgtttatatatgatcatgaatgatcatgcacgcggggcacactcggtggtgggaggagtcagaagcttcaaggatacaaaagagagttgagattctaataacactgcaaattatatgtaatcatatatatatatatatatatatataaatttagatataactaaaaagaaaatataaaatacaaaagaaaagataatattattgatgttcaatatcccactccaaaaagaggcagccaaaccaaagaaaagatcagtacaattgaaacagtgggagtattgaattggccatatcaaagtgatggctcttctattctctatatatatatatacatatatataatattctatcaaataattatcaccccatatatgaatatttatttattttgttcatctggtaattaataagaaaaatataaaatttgattatttgattttcatctacaattatagtacattactcatttttactctctatcattattaattatatatctcactatatctattctatataaagtgtacctatataaccgaattcttggtttatgagaaattcgtgggagactttttattt

SEQ ID NO: 118539 - DNA, 1427 bp, Cannabis sativa
  modified_base (116)..(119): a, c, t, g, unknown or other
  modified_base (1312)..(1336): a, c, t, g, unknown or other
tattttgtgatcattctacatacattttgtaactccataatgtatgttacaatttgacaaaattaatactttgtcacacttaattatttacaacttaattatttaatctaaatatnnnnttatataaaataatataacaaatatagatatttatttttttatttttaattttatgtgtttttttgaaacatattttttttttttgcaaaagaaaaaaaacaagtctactaatgtatacatacataccacatatataaagcattcctcttttctgctattttattttattttcataaagcagctactttttttaactaaaaaaaatcacatatatacatgtatactaccatattatgtaacctctatttatttaactttaatcttattggccgaaaaaactacctcatgacatggtcatgaggtataaactaacagtcctacagtaaaaattaccctatgtatttattatcatcatccataatagtggtgcttgactctcaacatggtgtattattgtttttcatatccccttttattattaaaatttcacacttcttccccttatagttactctcctggattgttagaatatttgatgtgaattaacattattaattgctcaattcatattagtattaatgtataatgataactatataattagtaatacatggtattatcattggaccataatgagatagacataatatactaagatgctcggaacccatagacacgttttaaaatatctttggttagcctattgagccaaaacaattaattctctccaattggacatctagccccaattaactcatagtctctaataataagaatatatgccgttatggtgaaaagagataggtgtgaataagggtgttgagagaatgatagagaagtgttcgtcaaacccttacacactttagtgtcatttggtaatacttttgtttttaaattttgtaatcacaaaaataaaagtaaattttttatttttgaaaaatataaatgtgatctatagccacttttgtttttcaattttagaaataaaaaacaaaagtgtgtttttgcaaatatgaatttcatttgttaattttatttaagttaagtttgggttcgggtatggggtcggggccggggtccgggtctagcaccaagtctaggtcacaggtcagtggtcctaggccaagttcaagtttgagtccgggtcaggagtccgcgttcggggtctgggtctgagtctggggtctaggtccagactggggtccgagtttgtgttcggggctagggtctatgtaacaccctaactaacatnnnnnnnnnnnnnnnnnnnnnnnnntactgtgcagctcgttgctaatcgacgagatttatggaaaaacgtggttaattaaaattttgctttttaattaaacttataaaaccatatt

SEQ ID NO: 118540 - DNA, 2175 bp, Cannabis sativa
tttttttttatatacatatataatttttttaggaaatttgaaaatgactcacttgataaagcatttaatatcatgatttgagtgatgaagtccacactagtcgttgaataatttttcatactttctcataaaaaatactttcaacaagttacaaagaatataaagtaagatttttcacaagcctcaacaaactattataattcttggagtaatcagtttgtttcataggctaaaatcttatagctctcaactatagatctttacaacacaagaaattaaataataactcttcaagactcccacaacttctcacaactcaaacaaataaaaataacagttttataactgttttacaactagcttttctcaactcaacacaacataacacagagcaacaatattataaacggaggagcaacctatccatttggaaaaaaatggttcggtttgccctagagagagatgcaacaactcatttgtatagagagataaaccaaaaaaataaaaagaaaaacagagagagttagagagagtttgtaaagagaaaaaaccaaacaagaaaataaagagatgagagagcaatagagattacctgctcgttttgtggcaaggaatctccaaaaccttgtaacacaattttgacattgatagtggagaatcaagctacttagaaggtcacttgacggagacgtacctcgtgatttagggggaactctgatatcattcttctgtgttgttctcatatttgatttatgttgtgatttatgttttctattctttctctaaatcaataaagatcggttttagatctttgttgatgctattttttcctttgggtttctgttcttgtatttggctactgcaggtttggagcttgaagaaggagcagcagtgggttttttggaagctcaagataagagcttgtagaagaagaagaaaataaggtttcggctactagggttaggaggaattagaagaaagtgttgctagggtttgctgaagcaaaaagattggttttatactgccttaaacgacaatgttttgagggaaaaaaggactcttgatccgcacaagaggcaatggtctattttgactttggttttatgactttggggtttgttggtgtaggggcatttcaggtattgcgaattcctacagtggtatcagagcttggtgaagtaagaagattaaaaaacacatggatataaagtcaagaaacatgaaagatcataaaaacattgaagaaaccagatctgtaattatcaagaaattgataaacaggataatactaccctaaaatacatgatgttacattcttacttttattatcttgttcaacttgtttaacatgagtaatattagagtggatgttgacaagtttgatggattagggaattataggatttggaagaagaagattagagctcttcttgctcaaaaaaaattacttaggattcttagtgaacttatagaatggccagaaaatacttctaaatctacacaagaagaaatacttgaaactgctactgggttaatcatttttaacttgtttgattctattatcaagttagttgacaaagatgatactcaagcaaaaatatggagaaagcttgaagattagtttcacaagaaatctttgattaataagatctttcttcaagaaagaatctttggttacaagatgagcactagcaagactcttgatgaaaacctagatgaatttctaaggttacatattgaattggcaaattttggtgaaaatgaggcattgagttatgagaatcaagccatatatcatcatcttaaactcactacccgaatcctacaaagaagtgaagaatgccattaagtatggtatagaacaaaaattactctagaagaagtgatctcagccttgaagtcaaaggacttaaagatcaagaatgagaaacatggaagttctaatggagaagtaaacttcagtaagggaagaccgaatcaagagaaacttgggcacttcaaaagtagaagttacagtggagatcaccacaaagaaaaacgtcactacaagggaagatcaaactcaaaagaaccacctaatcctacaggatgttactgttggaaatattttaccaggatctagatttacaaccatgtatgtttcattaacatcctgatatgaattctaaaacaatg

SEQ ID NO: 118541 - DNA, 1686 bp, Cannabis sativa
gttcccatatactaaatttatgaatcagctgcattaattgatgaatttctctcccagtaccacagttctattcaattgcatgcgaaaacaatcctcacaaacattactccccatcgatcctttattattcatttaataataataataataatatatcaaaattcaaaatctagtgcaataattctatagttgatcaccataagttttcaagttggctaattattttgattcattgtttcatttaatcaatcaaactgtagcttggtccatagtgtgaataatgaagaggaccatgtacattttttttatataattaataatcttattttgatatgaaagggtcacatggagattagtttctttcttgtacaaattatgtaaatggaagaaaagagaaataaaactcatttaaaaatgtcacatgtagtgtttggcttctgttgagatgggaaattaaaggattaaatgcaccgacatatgcttgcttagaagctttgggtgttttaagataagaagagaattattcttttcaatcctatcttttcacttctttatattatataaatatatatatatttatattcatgtttacatagttaatgaaagctaagctatcatcattagtcattacgcgttttaatatagcccaaactttatattttattaaatgttcatcgccctaataattcccaatttccaaccaactttcatattggattttggagtttagcaataagcagtggagatgtatacatgtattatacccacgtgtaataagttgggggctttttttcattttcttcttttttttttttttgctgcataatgattcgttgaaaaactactcaattattgggtttcaaaataaactttgaagctagatttgaagtcagccaatgcataaatataactctgtcaggaataattataccactgaaatttctaattttcttacgtttatactgtgggatagaatttttttcaaaaatgtcgtgtaaattttatattatatgtgttaaatttttactgttgttctacggttgttttttagttgttctattttgtgttcaactgttgttatacaaaaacacagtatttttgaaaaaaaaaatatttgtgtgacagtatttttataaaagttaaacctaaatttcagtatttttgtaagttttccaaacaaaacgtataagtataaaaagaggtttgctagcatctccaacgggccaacacccttaattatcaaaaggaaatttgatgttctatacttacatatacctcatatttttcccctaaacacataacacttaatatttgtgggatatgacatattttaaaatatccctaaaatacccctatttacattaccccctcccttttctcttcttctctttactgtcgagcttcccagggctaaaataagatacccatcggactccaatcgggtccccatcggacccgacagacccaaaagaaaatttcagcacatgcatcggaccccatcggacccgtcgaacccacaaattttttttcccagcacgcacatgcattggacctcccatcgaacccgtcggacaccccatcggacccgtcgaacccaaacaaaatttttttcccagcacgcaagcatcgaaccccccatcggggtgcccattggaacccatcgagccatcgtcttccccaaactgc

SEQ ID NO: 118542 - DNA, 1564 bp, Cannabis sativa
  modified_base (1309)..(1328): a, c, t, g, unknown or other
taggtcgaatactcgcacttgtcgtttctctgaaaattctcttttatattaattaaataatatattttggtgttgcgaaattcactcgacaacagttatcgttaagtgtatattaattttttaatcattgttttaacacttgttatgtcaatatcacgttaaaatggaatggaagtgtaacataaaattaaattgtaagaaatgaaattaatgttcatagtttttgacataacttgaaaattaattttgaaagagaataatgaacaagtagtcgaagtaattattttggaacaagtgttttgttgatagagaattcggtacatacgcatctgtgaactcattatccgtctccattccttgttgattgttgcttgtttcaactccttgagaagcgttgttttggttgttacggtttggacacctagtcatgggttgaggagcaacacacgtgacaatgactcgagtttcttgggacatgttctccacttactccttctctagcattacatgtgccttttgttatcacaacttcagggtctcttaaaatgttagggttttcccggtacctaccaggttgtggcgtgtttccttccgggttggagctcaacttgaagtcctcctttaaatatgttgttagtcttgctatttcttcctttgcttgttaaaataagctttcaaatatggcagcatagaaattcatagtgtttgtttgtatgtctagagactcgtaccttgatagctcataaaggctttcttgttgtggtgttgattggttgaattgtaggtgtacacatgccttggcaagcatgctccatctcttcatgagtagtgaacttgggatcttcctcatgtctagtcgattcagggttgcctatatgtgtctacacgagatcccttgactctcaaagatcatacaactacattgtaaggtcgtttgaggttgtgaataataaacttgatattttgtttctgaaaattggaattttccaatcatgaacaccctctactcatcttgttcctgctcgccacagataaagtaatcattttcaagatctaattattacacagctttttagtacatgtttcttgtgtataattttgcacattgttcatattacataatcaataatcttgcgtgagatcgtggttatggtgaaaagaaaaatgtttttatattttgaattaaggggcattataaccaaatttaaagcgaaagtaatcttcatattcatgtcttagtagtacaaattcattgtgactagtgggaaaaaatctttcgtgatatgggtccaggccacatttcacaaannnnnnnnnnnnnnnnnnnngtgagatttttactatttcgattagaataattgttattgcttgaaaactactttttttctcaagtgtccaataaaaaagtgatgcaaaatggtcttggctttgtccctgtgagattttatgatttttcaagatttgtggggtgagattttaagagaatactaacgagtgtaagtgtaaagaaaaaacttgtaaaaatttacctaaaaagaaaaatattttcaattttttaattagg

SEQ ID NO: 118543 - DNA, 1251 bp, Cannabis sativa
  modified_base (1123)..(1142): a, c, t, g, unknown or other
atcttgataaatgtttaatgattaaaacagatcatagtcaaatttaaaactcagctgataaatgtttaatgattaaaacggatcatagtcaaatttataacgatctaagacatattcacaatgaagatatagaagctataagatcaaaattctttcaagattagtaagtaatttcctcacaaaccccaacagatgattctattaaacatatcaaaattaattttgaatctttaaaaactttacaagcatctataaacatcatggccatctaatagattttcataattttataactaatattaataaatgagaatttactcccacaacattgttgtagaaggatccttaagcaggaagatggacccagctcctatatatacgtacatttgcagcttttaaaatatatatatatatacctgaacggaaatggagaaggggccagggttggccttggacgaccgattcggtggcgtccctgatcaaacggagagagggagagagaaccgaggggagagggcaagaagaggggtctgggtcttggtcttgtaccgagagagagatgagagaggacatagggtcgagaggagggtccgggtcaccgagcgggatagatagggggctcggtcgccaagcaggatagagagggggtcgggtcgctgagcgggatagagagagggatgggtcgccgattgtcggtctgggttgcgtgagaacaagagagaagaaatggggttttgtttgggttttctaaaactttgtgtgaagcgcgagagagatgtttagaacgatggacttggggttttgttttaaagatatatgagttttaagtttcagtttataaccgagaataaagaatcttttcgtcttggttatgaactgacacttatactcaatttgtatgtatatatatatttttttaaattttttttggtctcagttatacttttagtgtcggtctattaacggacactaaaagtcattatatgtgtcagttataaatcgagaccaaaaagttgaggtgttctttagtgtcagtttttttaaaaaaacgtccatcgaaccgacaccaaaagtctattttgtagtagtgttttaatatttcggtgttgaattatcattgtgnnnnnnnnnnnnnnnnnnnnaaaatctgcgttaacggtttggtactttcattgagagtctctatgaaaaagctcagaaaaagccttcccttcttttaaagaaaaaccttctcctttatggctgaaaatc

SEQ ID NO: 118544 - DNA, 3946 bp, Cannabis sativa
tggaggcttgaagcggggacgttacagataaagctgcaaaggaggcttgtaaaccttttgctgttattctaccgtattacttatctatgctagattttaaaactcttaggaatgaaataaggttttctataatagagccatttgaaattattcttgtttctagattgcatgactagggtacagagtaaacttttagagtttgctttgttttaatttctttttttttttttggttttttttaaatgtatattcatgtttgttcatttttatcattcatttgatttttatgttgtttcctgatgtttttgtagtgtctgtgacctttatcaggcagctttttgagagtattttattgatagtaagcctattttttctaaggatttcgatgttgaagtgcaccatgattgtttggttgttttattttatcactatggtttgaagaagcacgtgaaaaatattgatagtgaatctgagtctccatcaaatatctaacagaaatcatttgatgttttttttttatataatatgttgtttttaagttattgttatgttattttttatattttataattttttttaatgttatgggtgcttatatttgtgtttttatgttaaatatgtatgtaatagatgatatttctctttaatatatatataagttttcaagtttatatatgtttgagttgtttaaaatattaatttattagatgttttgttgctttttttaattattatttaaaaaacataacttattcagatattcttatgcagattattgacattaatttttaatagtaatagaaaaataatgaaacttgtatgcatttttttttttcattagtatcctatactcaaatgtgaacatgagtcttcatcaatcgttgttaagaaatgatttgttgttttggatcacattcttggtgttttagttgtttggaagatttttattatcttgttgaaacaatgttgttgatcttttttttttcttttttcagtgcgttctagatattatgtaggattgttatatttctattttcttgttcttcatgttaaacatgtttcagttggattgtttatgcttaaatatatatatatatatatatatatatatttgttacttgtttattttgtcatttttttatgattgttttaaggttagttttactgttgttttcgtatatctctttatcacatttttcaacattctggttctactccatttttaaacattgacaatatcatctaataaaaaataaattacaaataatcaaatcattcatatctcaattccatatagtatcctattgatttaaaaatcctataaagtatgtaaatagatcattgcatcactttttaatattaatagaaaaataatgaaacctatatgcaaattcttttctttagtatcttatgctcatatttatgtttagttttttcgttgtcgttccactgctgttctttaggtgttcttgttttctttatttttgatgcattgcactgcatattctcttgttgagccacagcttcccacatttattgcacttgttatgttgtttccttttccagtcagcttccattctctttcttttttggtcttctagatttcaacatttaaatgggaggcaagactattacgtctttcacaattttgtagtacatcccactcactttggtgtcctattgggtactatgttccttcataagttgctagtcaatttttctttatgtagtaatctgagtagtacttgtattggtccatgctcatctccttcaacacagccacaacatgtccacaaggtatttcattgatttagaacgtgttgcacatgcaagttctctctttgaggtctactatatatgatttttttcattcggttacctcaaaaaaaataataagtgattgatttaacatgtgtaatttgaaatcaatatttattaaacatagagaacgacattgggacaaccatacaaaaatactagaaaacctataataggcccaaaatgattatgtttaacaatttaaagtatagaatctagatctcacctccaagttcaatgagtatgtgttgattttcagtagcatctgttctttaggtggtgccaatatagtaaatgtgttttgtgcttttgttctattgttatgtatctattgttgcactaatgctgtaaagcattctagtagtattataattagaagctcccttgctactaaattttctaagtttagtgattctgctatatttgaggttatggtagaatacctcttgttttcgctgtgaatccttgaccatttcccataaccaaattttttaaataatgtgttatgcgcttgtccaagccatctagttgtgtcatgtggtactcaaattgtctttctatgtatgctttcactgctccaaagaatggcaggttgtacttaacaacatgtgttttgaaggttgttttaaggttgttcaacatgtgatatccgcagtatgtgtgtgtaatttctgggatatttctcttgctgctttaatcagacactcatgtctgtctgaaattagaaactgtttttctctgaagccatatgcttcttttaatttttttgaaaaattatttccaagattcgtcattttcgaaatcagcgacacagagtgcaagcagaaatatgtgacctactgcatcttgtgtgcatgcagacaataatgctcctccataagctgtttttaggaatgtaacatcgaccactattatcggcctgcatgttttccacccttttatcaaagcatccaaagacataaaaacaaacttcaatctgttgtcttctattgttttcaaatccacaactgatccagggttgtttttgtgcaccatgtgcaagaaacttagtataaggctgtgtatgatttcttagcattttcttttaagtcatttacaacatgatctttacttctccaagctttcatgtagttcatctttattttgtacatgtgttttaattctccttttatatctagtggcgttgcttttgtctttatgctcagaaacttaggtttaatgcattctcctatgaattttgttgttgcttgcctttggtcttcatatctaacatttattggacaggtgtggatgttcgagaacctcctgattataaatgtattagttgacccatttttttttatgctcatagagaccaattacagtttttataaacacacttcagactatatttttgagagcacgacctccataccttgaattggaagttatttttgattacgtagtaactcaggaccctcttgagtgcttctttgtccttgtatgcctacccttttacaactttagggtagaatttatctgttatgagcttgcattgtcgatgtcaacctttgaatcagttttttttacaattgttttccagcttttctaccatttcttcagcaataagattttcatagtcaaccatgtcgaattggttgttgtcacctacttttatttcaatttcttcttcttcttctattggttgtttcagtgtgcatgatttagttattggtgcattgttctcaagcattcccacattttgttgaacttgtgctgttcttgattcgaatatatgtattgcagcagttgttatgttgttgttctatttgttgacgcacaatagatatgtggtgaaattagtttctttgatcttcaattgcaagtaaaagaaaaggctcacattgttgaatattttaatcggtggtattccatcttttgcttgggtctggatttctagggttgtttttgtgggttcgcatcagggccggccctgaaaaaatatgggtccaagaccaattaaattttggggccctaaaaaatatataaaaaaaatatcaaaaaaaaagtattataagatttgaacccatgaccttggacattatgtcatccacctcaaccaactaagctatgaatatttgttgcttat

SEQ ID NO: 118545 - DNA, 839 bp, Cannabis sativa
aaaaaaaaaaatccttccacccattagaaaaatttctcattttataccaattacttctgaataaaaaatatttataaaattacaatttttcacataaaaaacaaccttgcagattttctaatcttttgtcctaataaccatatagtagagtaaaagttttcaggattgtaattcactttagaataaattagtttgatttgaaaccatatggtttgtattttatgattgttgtaaaaaaatttagaaaacaatgttcctttgtttacttaattttgttacctttcaaagtttataatattcatacaataataataaatcaatatcaatattaataattactcccaaatgtcatttattaatatttttttaattatatataaataattagacagtttaactttattttttgacatgtagacggtctaacttactttaaactagtggagcaaattctaaactgaccaaatcaaaaaaattataaacaatctaaattgaccaaaccattgatatcagattcatttagtttgatcccaaataatttaattcgaatttgttaaaattttaaaccatgaattacgaattttatgaacagcctcaccaaatacattaaaaactgctactccctatctcagatgacctctagcctaatccctccccaaacctttttcttctccagtgacccaaaatcaagctttgggcataaagttgtacagagacacactggcattagcaagtgttgagcaaacaccaattcgatcacaccagtaggtgtttctttcatgcaccagaacagactcaggttcaacaactgaacctatccaaggaactcgaatgcaatt

SEQ ID NO: 118546 - DNA, 1174 bp, Cannabis sativa
ttaattctctcttttctttaatattttattaattttatttatattaattaatataaaatatattttttctttaattttctcattattctaatttatttattctacttcaaattctgatcttaattctcttatttttttaattaattattaaccaataaattttttttagttaaatattatataatatataattataaaaatcaatcaatagtccaatttgccaaaagaatttaatttattaataaaattaatcattccaaaatcctaacttacaataaccctaaatctaagcactaccacctcctcttaataattaactctctcttagtgctctgttcactctatctctatctctattctttcctaacttatatttctatacaatacaatttaattaggctatatacacatagtttatacactttataatatggatttatacatacaattatatttattaatgtgaagatttttcatgaaatgtcatgctacaattaatattatactacatttaactttaactttagtgatttcacacatacaaatacataatatatatttcgttcctctttcaatgcagaataattaataattgttcaacatcaaatattttaaaatttatatactctttcctaattttggtggctcacacagatttttgcattataccatttattttgtttgttgttcatttataatgtatgttcaatgttttgtatattgatatgtttatacattgaccataaataattcttttattattattatttatttatcaaagaaagaatttcatgaatcaaaggacaaagtcacaaggcaaacaaaaaacccacctaaaaaaacatacccctcgaaccaaaatgcaattcactaataatctgtaattacaagaattggttttcttgaaaattctttgaatttcatttacaacatacaaaactgtgaaggaaaaaccctcatgcagacatttgttcctgttctgctattcaggggcggacccacattgtagcgagggggacagtcgttccctgaaaaaaaaatcgagaaaaaaatgtatatgtattttaattagttacaacatatatttgtattgaaagatgatatttgtagacataatagtaatcttgtaatggttaaggtagttggtaaataggttagagggtaaaggttcaaa

SEQ ID NO: 118547 - DNA, 865 bp, Cannabis sativa
agatagttagggtgttacaattgaaataagttttatttagggcataaaacccaataggaacatgagctaatggtacctgaggagggggtacaacaagaggaccctattgcctaagtctctaaatctcctcatcctatctttgatgtctggcttgcattcctgcaaacctcgtctcccaattttgcaaagcctgtggcagatttgcattaccaccaccacgagcccttctacgacctctaccttgaccgcaagaatgagggggattctgattttcctgaccacttccagcctcaaccatattaccctaactcttggtgtttcactaggcatccattctatagcacggaatacgaattcataagtcaaatcagttagacagtgatcataattgtaatctaattaaacgtgcacttattctgctatcatactattgacatgctacctatcatacttttctaagcatgcttatctgacataaactactaaaacatataaaaggttattgaactgtgagtcgagcttgtctctgatgatgattctgttaggtttcatgccctaaaaatcttgcaaagatatttctgattattaaataagagttgaatattttgatatatgcatgaatattaagttattaatatttaatattaaataatttatataaatattagaaaatttcttattcatatatgaagctgttacttgtagctgtacagaaaactaagatcacttaaccataaataagaaaaccatcaacatattaaagttatggaactttaatcaatggttgctagtaaggttcattgatgtctgttctacggtgcaagtaatcttagttcggataactgatgtagtgagatatctaagt

SEQ ID NO: 118548 - DNA, 1600 bp, Cannabis sativa
acccagcgtggttggccaatctggtcttggtacctaaaccaaatgggacatggcgggtctgcatagacttcaccgatcttaataaggctttcccaaaggactgcttcccattgcccgaattgaccaaatggtggacgccacctcagatttcaagttgctatccttatgcctattcggggtacaataaaattaaaatgcatgtcgtagatcaagaatgtactaaaacagaatttaacataaaagaaataaaaaaggaaggaagaaagaaagaaactgttggtggaatgaatccaggccgccactctgcttcttctgccgttcttgactgcttttaggtctaaaatttgcttcccatattctctttcttgcagtgtcctttttatttttcatcccagattttaaaaaacgaaatttgtctccagctgcacgaaacctcgctgcagccatggattacctcgccgcggcgagtgtcactttggccgcggtgatggattagcttgccgcggctagtgggccaacctcgaaaactcctttctaccagatcttggctgcggccgttaataaatctgccgtggccagaagtgaaccaaatcctaatttttcaatttttcttggctcaacttatcttttatcgtacttttgaaaccctgaacgtccacagctatgggaaacctgaaaaacatagaaaacaagcataattctgtcctaaaacatcgaaaaacgactctatttgtagcccaaaacataggctaaaaatagcctaacatacgccagcccagaaaatgccaacatggaaagtatatgttgatggggcattcaatgaaagtgggtctggtgctagcatagcaacgatctcatcgaatgggttacgactccaggacgctctacggttcacatttctagcttctaacaatgaagccgaatatgaagccttaatcacatgaaattttggttcttgttaaataaggaatttgcagataaaaaacttcttctctctctctctctctctctctctctctcgtacagctcaagggctggtgctatagcgaagactagggcgaggctagggaagctaaaatcggagctcaagaaacctaagaagcgaggtccaacctttactactgatgtttgaaagatgaagatgatggactcagtcattggtgtcaaaccaatcgacttctcggaggaagaaggtgatggggaaccagtgcagtctgtgcgagcgagatattaatctattacaagctccgttatcacctaattcatcactacaagcaattaagaggcaggaagagatcatcaaagattttgattattttcttcaagcgaatcaaaaatgttctgcaagtgtgcatcaaggtactcctatcacaccccctattttacgctctggtaatgtggtgaggaactaagacacgtctttcaagaattctggtaactctagtaaggtcaagattactttagatgatattgaggatgaagttcatttctggagctcctctattgtatgttatgttcttggtgctaacctgtaacgccctaatctatagggacgctacgtgtgtgattttataaactagtttaatactaatagaataat

SEQ ID NO: 118549 - DNA, 1042 bp, Cannabis sativa
aatataaataaaaagttacccttgaatttctcataaatcaaaaatttcagttatataagcacactttatatagaatagatatttcttatcttatcagccaatggtattctcctactacgaatacgattctatatcctattttctatttggtttatatattttggctagttttttgtctcttacgttgagtacaatttctttttgaagcatgtgaaacatttcactatgaaaaaggcaaacaataatagtggtctaggggctcaccctcttatttctattaggggctacgtgtttgttagttgtgaaacataaaaaagttaatcggccatattgtctaacttaaacctagtgcaattattttattaaaatatgtgacgttctcaatattaaataactaccttaaaatatcttataacaatattactcatttgttttacatagattttgtaaatcagatgtgatttttaaccaataataatagcatttagataaatcggtttttattatgtaaatatttatattggtcaagtttttaagaatatatacatttaaattatgatattataagatcgaaactattgtctattttatttatatgtacatatataaataataaatccttgtggggatagaatactatatctcattgtgacaacactaatgtagcactggctcattatcgatttatttatgtatctggccaattaaaaaagattgcccagaattttcatatgaggcttttgtatattttcattaatatattagctagttttgttgttgattagcacttttagaagagtttagttaggtaaatgtcacttagcttttgatacccccaatctaaccaacatatgcatacttctccttgttaatttgtgggagcaattgtgtgagagtgatagatcacatcgagtgtgcatgtggttcttgtttgtattagagttagtcccacattgctaatgtgtggaaatgaattgtgatatataagatgaatgggctactcctcccattgccaattggttttgggatggaacctcattca

SEQ ID NO: 118550 - DNA, 1356 bp, Cannabis sativa
aaagacacaagagtttttatagaggttcggccccgagtagttcggtaatagcctactccccttgatttgcattgacttaagaacaaggaatgcaataattctttttcttagagctcttacaataatatctctgaatatgtattcttaaataagttttcgaccttttgcccagtgagaatagatcactatttatagggctataagctttagggaaaaagtttcctttcggtctacagttgatataattggcaagattacacattaaatacagaatacactgatcaagggatttggacagctcgccatatctctgtgatatgatcccaaaattataaggatttcttttgagattcacgatgcgagtgctgaaactgctaagtgttggcgtgctgttcggactgctcactgctcggttaagaaggcttcgtccgtgcgaatatctatggtgctctgttcggcatatctcttgcgagcaaatatgcaaagttgattccacgtgtcaccatcgtgtggtgccacgtcagagtacaaaaattgagataacaatttataattacaatttttttgcaggcttctcaaaacgtaaaccctaataatatttatttttatcttttggcaataaactgttcaaatatatcgtgtttctgtttaaacaattttagtgtctgtttaaacatttctgtaacaatactacaattaattatctaatttaaagaattaagttagtaatcataaaaatgaaaatttctgagtatattccactttaatcaaagtacatcaaacaaaatttagagaacacaacatgatgcactctacattttgttttttgaaagaatttcattaaataaatggccaagtgatttaattaataagagggctcagcctcaagtaaggcttgagatggagttaaacataattatatttagctaagtcatgacaacaccattaatgattcatgaataatttaaaaagataaaacatcaaaagcaaaacaagctgttataatttcagatatgatgttgccaagattgaaatcctcctaagcactggaaagcagctttcgaataataacttgtcagtctaactcatagcgcgacaatgacaaatcctaaataaaatggctaaagcttcaaccgtcagccatgggtgtcatgaacatagcatccacaaaccaagtggtcattactagaggtgtacaaatgccctaggccacatttataaaagcccatttttataaataaagttcggtatataattatatgttagacccgagtcgggcccatattttaaaggttaggcctagcacaatccaaaaatataaaggggtaagttgaaaaatgcctcttttattcatca

SEQ ID NO: 118551 - DNA, 979 bp, Cannabis sativa
cacggtttttaataattaattattctattagtattaaactagtttataaaatcacacacgtggcgtccctatagattagggtgttacatccttagtacacaaagtttcacttaaaaatacaaatttgggtttcttttggacacaaatgtcactaagaaattgttgggcctgtgggttcccaagcccacgataattctaactgatagtactcataatgcttggtgggccaggaaaccaagacccaccgtgtccatcagtccatgttttttgaatttaccacagaagtagtattggttagtttattactaaccttagtttcaattatgtcatttgtcgaaataacatgtccattttgtggagtaaccccaagtcgtttcccttttgagtctgaaatttcgaatatctcctcagtggagaatccagctatgttctcattgaccaaaataatatggtctttcaatgcattattctaactcccataatcacgagattgatcgttgaagttggaaattgggtggctgatatggggatcgtaatgagcagctgtcatggtcttaattttcgatgaggcattaattacatgagatcctagtgtcatcttcccttctgaacctgaaacgtccttgccagaacgtagccacgaagaggctgttaagaaattttgtcgtctcgttggagctttcatgtctatgctacacggtttaacaattttctctataggaatatcatagatcttatcacggattttttcagcatggtccataatgccacaaataatacagaaaagtggggagcctttcgtatttgaaatacgcataaaaagccttgccacttatactgtgaaacttcatccgtcttttgagaggttcaacgttgatccttatgttgggttttgtgccctaaataaaactcatttcaataaatcagatttacgtattaataaagatcagaaataacatttttatattgcatggttcac

SEQ ID NO: 118552 - DNA, 1208 bp, Cannabis sativa
ccggtataatgcttgtagaggattcagatttttatgactttgataaagatagaattgggagaagctttaagcaaggacaggtttgggctatgtatgctgacgatgatgggatgccaagagattatggtttgatcgatgaagttgtttctgtaaatccttttgaggtgaaattaagctggttagattttcaggatagcagagacgaagggttgctttgcttggaaaaaatgggctttaatctatcttgtgggagatttaaggtttctaggaagacttctattgattcagtgaacattttttctcacgttgtagattgtgaaagggcagctagggaggtttataggatttatccgaagaaaggttctgtttgggctgtgtatactgaaccaacttttagtgccgaagtaagaaatgttacaactacagacaggcggcgacactatgacatagttttgttcttaacaacttatagtgagatgcatggtctgagcatggcgtatcttgagaaggttgctgggttcaagactatattcaagagacgtgagattggttctcatgctattaggtggctagagaaagatgaagttcaatttttttcacaccaaattcctgcaagaaagctctctggtggtgaagcttcggaactcttgaaagattgctgggaacttgatcctgcttcccttcctgcagatttcctatcctcataggagagattttgttttattttatttttggatttcagaatcgtagggctcctttgtacagttttataatttcagtatgatggaggagtcatgtaattttgagggcaaatattgagaaaaatattcaaataaaaaggctgatcattaccttaaattaaatctattaaattatagtatttatgtcatcccatcattaccaaccacctccataaagttgagaatatgttcaactactgtgagccactacttaacattcatcacatcaggacttcccagaaacactggaggtgtttacttacggaacctttcgtacaaaaactccatacggttgccaacaacaggttgttctgttggcaccgcaggaacagcaacatgctgaggaggcacagcacgaggaccctactgccttaacctctaaatttcttcatcctgttggcggattcggtcttgcatttctataaacctctgctcccaatctggaggagcttgtggtggatttaaagg

SEQ ID NO: 118553 - DNA, 1869 bp, Cannabis sativa
  modified_base (1758)..(1769): a, c, t, g, unknown or other
  modified_base (1816)..(1821): a, c, t, g, unknown or other
aaaatagatggaaaaggaaaattgctaacagaatacgagttttggaaatttcgccactaaaatttaagttttgagggttaattgctaacaaagtgaaagtattataagttttaccgcaattaactcaaagtaaaatcgatgtacgtgttgacaaataattttttattttattttattattttgtttagtgaaaaaataactttttataaaaaataaaagaaatgtatgtacttttggtaattgttagagtatctccaataagacactaactatttatagttgttaaaattacacacatcattctaaaatattattattattatttttattttatctttcaaccatataaaatttggcatattttcttacaaaaaatattctaataattgataactctaaaaattatcccatggtctcatattacattaaataaataattttacttaaaacgtaaccatttttgaacaaaaaaaactattacgtggtcattgtttatatttagcaacactttatataaaattaatctaaaattggaccacatgtcgtatgtgacaactaatttaatgaacaatcctcattgaagatgctcttatacaactaccattggaaatgctgggtgtattttaacaaaaaaaaaaaactttttgtaaaaaaatatatgttacccgagttgagagaaatgaaaaaatgatgatgtgtgtattttaacacctattaaatagtacttcccattggatatgctattagtatttctcttatttcaaagaagcttcgttttggactagctaattaattataagagtttactatgtccgtatcctatttttctttttccgagttcaaatattcgttttgttgtattttcttattttgaatttttcctagccagttggaattataatggattcgttactgtattaattaatttataatcagaaaaagatgagttgtttctactttctatattgttaagccaacttggcttatgaaggcatataatttttaaatcattgtatcataaattaataaatcccagtagactatataataatataatatatatacttcatcaggtaattttattgtatcttattagatattaaatatcaacttaaaaacatgtgacgatatattatcacgtaattttgttataggtgtattcttttttttagacatacagtttattcaaatttgttagcttaagtgaccgctatcaacagtaggaagatgtatttcaatgagctaagaatattgttagaagatattataactttattgtctaaattttcgggagcagttttatccgatgtggctcgttttgagaatttagcgacccatggtttgacaaaacatgcatgctctgcggttagacgatgagctatcctaatttgagaaagtttcagcaccggttgcgaatgtctgcgtcgtaaattcatgaatgattctaatcacttcgtccaaaaaaaaaaatatgccgacacatatttttgaattgatacttaacaatcaaaaaaggtacgactgcaataaaatcttaacataagatacttttgtctccacttttttttattaaggtcatatgtgtaataattacaaatgttaatagaatttcgctgcaaatattccttcttttttaaatatatgtgtattttcttttcatttttaaaaatctacaaatttcttctgttaattttcaaaatattattattattattttaatacatttactatttaatttaggggaattaccccatatannnnnnnnnnnncttttttttttcaaatttacggtggtttgggtttttaaagtggttgnnnnnntagttgcaataggagtttctgtacaattttttgttgcaatttaggttg

SEQ ID NO: 118554 - DNA, 1182 bp, Cannabis sativa
tgatgcttctttcaatttgtatttctgatttgatagcttcgttatctgttgttcttacaaatttaggatcataattataagcctcaaattattatataattatatataaatatgaattctacacatattgatatttccttctgattttgtttttcactttaatttgttcttctgcaattaaccaagtaaccttaatatgataattctgtttatgttttgactgaacattgtaagactattctaatttgctgcatttaaattttctaattttcagcattagatatggatgttgatatagatcactataccattcttgggctaccaactggtgaggatggtgctaagcttacagagaaagagatatcgaaggcgtataaagtacaggctttagttttgcatccagacaagaatcgagatgatccgaaagcacatgacaagttccagaggctaaagtcctcatatgagatattgaaggatgagaaggccaggaaattgtttgatgatcttttgaaggttaagcaagagcagcaacggcgtcattctgaacgcgattccaagagaaggaagatggtttctgatcttgaggaaagagaaagagctgcttttgctgttgatcctgctgcagagaagcgagagaaagaggagagaattcttaaggaacttaaagagcaggttgcaaggatacgtgaaatgcatgcaaataagggaaaagcttcagtgtcgaagactgacacgaggggagttagtgaagagactgccaatactggcggcgtgctgttggataagaagaggatacttaaggtttcgtgggagaaattcggtgagggttacacggccgagaggttgagagaattgttctcaagatttggtgatgttgaagatgttgtcatgaagaagaaaagaggctctgcacttgttatgatggctagtgaagatgcagctgtaagtaactaagagtatactattgcatcataatttattagggttaatagttcttgaacagcttatttggctatattgtaatttgtaaatgctcattttatgtgttattttttataggttgctgccacaggcacagtgagtggagatatctctaacccgttgctagttttaccctatcaaccagctaccccggcgaagattccaactcttcaaaaacccgccgaaactgaaagattgaat

SEQ ID NO: 118555 - DNA, 869 bp, Cannabis sativa
ttaatgacaactaagtaataaattatatcaaattttaattaaatattttatataattttatataaaaaattaggtgtgtaatatttaccaaattgcgttattataatggaagtcaaacacgacttgtataatatgatgttaggcttgacctctcgaattgttataagaattgataaatttataaaaaaaaaacttatcaacattacattcaagggtggtgttattgtcatatttgttgtatataaaatagttttggaaagatttatagtgtcatgtcaccgcctcctatatcttttctatatatatttttatttattaaaagtgactatttaacagtaattcttggtttaacattttgttattctcattctgataattttaacgaaagctaacccgtccgttaactattgccattcacttcaaaatgcaaagtgaattcttcttttttctccctcaatctaaaaatcaaaaccattttttttctagaacccatattgtcattgccacttttttctctctttcaaaccaatattgcaaaaaaaatttagtcatcctcttctaaccctaccgatagctgcaaaggagggaatgctggtgaaaaacaagagtcaatgatccctctaaagattaaccctaatcaacgatttcaagagattccaccatttccaaaaattagtaagtttaatataatcgtcaaacccaccgtttactgcaattttttcttcatccccattattcttcttttttctatcttattcccaaagcccatgttatgattcttcatgttgggaattattttaccagaatctagatttactaacatgtgttagaactattattttctatagtgacaaattatgtccagtagc

SEQ ID NO: 118556 - DNA, 1393 bp, Cannabis sativa
aaaaaaaaaaaaatacttaaaattgtattttttttttgaccatttttatggattatatattttagaaacaaggttattttcaaattgaagaaacataatatatatatataatgttactgtaaaaataagatttagacatttgtttagagcaatcgaaaaataatgaatcgtatttttgtaaaataaaactaaaataatctgtaaaaaaaaaaaaactaaatccacaaaatgtaaattttttgttatttttaagcatttatgaaataatctttatattttggtcaaaagataagggttgtcattttacttttaaagtggttaattatctcttaattagttaacgatttttatattatttactatatcaaaatttatgagaaatgatattgaaatttgaaatgttccgataatcatatattttttttttttaatgcttaacaccttaagatatgttatactaaattattatatatgctggacctaatttcatcaagctattgataaaacagactctaatagccaatagtacctactactgtacctccaaatccaaattataaaacatgattaagattgtatttcaaaaagaagacttccaatgtttggtatatataatatataactatttctttaatcttaagagaaataattagcttaataataacaattgattaggttattatatatttctctaatcacacgcatcttatttcatatacacatatgagatagttaaatttgaagctaaacatttgttaatgaaacaattaaagcatatatgtcaagattgttttgtgttgtatgcctacctagctagaaggctaatatatatacatatatatatatataaatatatatatttcaataagttttaactaaaaaatctcatgcactataaaatgtgacatattattattattaatgtattttaatatacatattttaatttaataaatattaaaaatatatacagaaagaaaaaacaattaatcataacaatatatttattgaagaacacaatatatgaaatacaagaaaataaataaacaaactcaaaggataatttagacacgtgaaacacttttttgaaagtagattcaccccctctacttgaatggtgctacagaatcagcgagcaactacttcccaagatacaatgactatcgagcagtcaaaagcaccaccttttctactctgccaaactcgaaatcaaactttctttctatcaccgacaagagactagagacaaaggacttaaagaaaaaactagagagtgagaccacggttggctcaagggtagggcagcaaggacccacgtccaagacctcccattcatcccaaaaaaactctttaacaaaaatgctaaaatttaatttttaaaaatatcatattt

SEQ ID NO: 118557 - DNA, 768 bp, Cannabis sativa
caatcttcttgctggtcaacataatggtatggcaaattcagaacctagcacatcgacagaagctacaggtatcatcttatccttaaatcttgttgttccccaaaatgaatcttggattatagattcaggagcaacaagacacatttgcaacaatgtaaggttatttcaagccatctatcccatatccaaaacaaatttaattctccctaacaatgagcagctttctgtatatcaaagaggatcaattatgatcaatattgacttgattctcactgatgttttatatgttcctagttttaaattcaacatcatttctgtcagtaacctcaccaaagataacaagattaaggttaaattctatactgacaaatttttcatacaggacaaccttcacaagaaggtgattggcagcggtaaaaacaaggaaggactttacattttgggttccaatgctacaccagaaactgttcttgctgtttctgctgatgtatggcactcaagattggggcacccttctaagaaacgcctttctttacttagtaatcagttacaatgtaacactaatactttacacaattctactccttgctatgtttgtcccaaagctaagcaaaagaaactccccttttcccataataatcgttttgctgcaaataatttcgatttaatacattgtgacatttggggaccttaccacatcccatctcattctaatttcagatattttcttactttagttgatgatcattctcgtttcacttggattta

SEQ ID NO: 118558 - DNA, 521 bp, Cannabis sativa
aaactgcttgtagttgcattaagcaagccgttggtggtttgcctaacgttgacccttcaagaatttctagtgtccccaaagaatgtaacattgatttcagtttgccccctatcactcgagacttcgactgttctacgtacgtattcattaataaatacatgtactatatatatatatgtaggtgtatcaactgttgattatattaattgcactaattaatatgttttttgttttgtacatgcaggattaaggctatgtactggtgattatatatataatatatctatctatgatattgggatcccctcaaagatatatatattgtaccagataagaccttcataaaataaattgtagcgctattatatctatatatctattaatgtactgatcatcgtcagtctttcgttttatgaaacaataattaataatgtccttttgtgggaaatgtttatcttatttttaattatcaatgaattatatgttgatcttattattgtttgctctctctctctctctct

SEQ ID NO: 118559 - DNA, 552 bp, Cannabis sativa
actgtagcgtgccttagcattagggcgttacaagagtattgtggcaccctatatgtctcacacaaatcagtaatagcatcagctaaaccaagtccacctctagaagctccttgtatcattatgtcaaagctgtgcctaatgatgtcccccacatttagattaaatcctttcataatggcatagacatatttcatcctatccatttgagcatcagaaaaatgtttgtttgggaccaacctgccactcacaaaatacaaccaggcacgagccacctggctcaactcacatcggtacaactagtacagtttcccatcatactcatgaaaccttaagcccaggaagccaatagtctcaaccatatcaacatagataaacttctcctcctcctcgatcattcgtaggtgttgctcttcatgagtaaaggtgggtagtgaatatacaacatgaagtgcttgttgtcctcaaaagtgagtgttttaatatttatactcgcaagtgcacgaatcgtttcggaatatagtgttcatgtaagtgcaaggtcgaacccatggg

SEQ ID NO: 118560 - DNA, 746 bp, Cannabis sativa
attgcctatgaatgtgtctaacgtgaaccgaaaaatggtgattttcgatattggtgtttctagactctgcttcggtacgttcaaaccaattcttaggatcccacgaacttggaatttgaactcctttggtccaacaaacaacttaaacacactcaaatcttggttcatttaaaaagacggtaaccgtaaacgtaaaatttcgtcatcctcctcttgacgtttctggatggcttcggtgctcttacataactccttatagcctattaaactcaatgaaaactctcatcataacccaaaaattccccagtcctctcaaacccggttcttgtattgtggtacgtaaaggaattttcaaaaaaatatgaggtataggaggctcattcacaacacaatttctcaaccttaaatgcttccaaaaacaccttatatatagtctaggtcactaccaaaacttaatcgtgaccattaaattcaaaacataatatccttactgtaggatattaatttactactatatatatatgattaataataacaaaaataatattatatactaatataaattttattattgaaataatattatttataataccacatctaatttaaattcaattgttacctacttcatattttaatattttttttatatatctcttaattactctaaatcatagggacattatattgtgatattttgcacacgcaagtgcacgtatcgtgacaagtagtaaattcaccaagag

SEQ ID NO: 118561 - DNA, 844 bp, Cannabis sativa
acagttttacactgttgggaaagctttttggcgacagttttgaactatcgtctattcttctcattttgcaacggtcgaatagaggatgattatagaaaccaacgggaataagttacctgactgtttaaaatcgtcacgaaaaactaattttttagtagtggtacatatctcatctttttcaagaaaattcaagcatagctctacttttttccattattacatattaatgaaattcattacttttatttaattattcaaaaaaagtatttatttaaattattattattcaaaataaaaaatggaagattttgaaatataataatattaaattattgtacttcacatctagcaatgttgaaaatgaaaggtgtcttgtgggtcgtattttcacgtgcagcaatgttgggcatgaatatgttttcatatccaaaattatttgaaatgaaaaatattcctttaatataccttgatattatgtctagcacaaaatgaacattaaaaacttattatgtactccaatcttaatggacatagaagaaacaaacgatgaaaaaatctctccgagtgcccattatgccacagatgaaacaaaatgtaggggctctttcgtatttaatattaatccaaaactaactcccatcatccttcgtaatctttattcgtcggcgtaatggtttatcaatattcaaagtgactcgaatccgaagaaagtccctccatactccgataaaattcttaggatcatattcaagaaacctcccataatattacccaccttttcgactgtactttcagtcatacacccaggctccatatcatggagttgaacccagatgtcaagagt

SEQ ID NO: 118562 - DNA, 1099 bp, Cannabis sativa
  modified_base (980)..(999): a, c, t, g, unknown or other
ttttatgaaaaagatttaattttgtagtcaattttgatgccgtcatttgtaggatgttagagtgacattcgagtatgtaaatgtctctttagttcggtccacatgtcaactgcccccatccattgaatcataaggcttttgattttttgaatgtggactgttggatgactgttgattcttgtcgcttcgactagcctataaaaatccctcatttttttcctcaagatgtttttgccttcatatttctcagaatcttcacaactagtcaaaattccaagcagtccagactttcttctactctttttctatcgttgccaatgtaatatcctgaaatcctaattataaataattagggtttattatacattatgggttaattaagtagtcttcagtagggttatgatcctgctaacctaatttagcataaattataaattttgccataagtcgattaataagcataatttattaattacggagatttatttggaatatgtagatataatgtaagttgtaaggtccatgtttttggttgatagattatatctaaattatattcagtttcatctaacatgtttgtctgttgtgactagaagtaattattctattagtgtccacgtcatttagtttttaagtctgttagtgttaagagttattattacttttggtaattttgttgaatctcgtttggcttgtgtatatatataactgtttctacttagagacttagctaactttctcatcgtctcttttgattgcactattagatttgagtgtggtatctttctttgttttttgtttttatatgtgattgaaaaatttggaggtgttcatccatagtttgaagatcagagcttgacagagctaagttcagacagaagggatttcagttacatcttcatcatcaaagctgaagggatttcatattgaagcaaagtgttgaagaagagccctacatttgtgttggaatatattttacnnnnnnnnnnnnnnnnnnnnaagtatgtttttaacatcctaaacatgaacttctaaaacgatataaaacaaacacataaaatgtatgagaaaccttacaatggttgcagcggaattaaat

SEQ ID NO: 118563 - DNA, 1361 bp, Cannabis sativa
acgtactcgtgtagaagagccattcattccgtgggtgtaagggcccaatggaagcttgaagcggggacgttacacaatctatctatatattataaggtaaggatacagtagactctttaaataagtgttttgatagattctttatctgtttcaatatctatgagagttttttagtttttggtctattttttttttattattacataagttgtaactatttagaacaatttataaattttcaaaaatttttgagtagtttgcaatgttgaaaataaaatttacatattttattgcacgtgcaactatttttcttacatgcgcgatagacaattgtttaaatcttatttttgttacggtaaactatttagaattttataaaaatttataagtgattttaaatagcaataataaaaaaaaaaactaaattattttactaaatgttaaaacaaataaaaaatttaccaaaataatcttttacgggtctacagacatttccaatattaatatattatttaatgtataggccgtttggtgtggggtatatatcaacatggagtgtattatacatatttatatcatcattaaaaggtatttttaatgttatttattgtatttaatttatggaattttattattattattttttttttgtgattttttaaataataaatatattttaatactaataaaggtgtatttatatgggcaagatttcaaaagcgcacgtcttttatgatagtggtcaataattatttttcaacacatgaatagactattgcataattaataatttatatgaaaacttaaaattgaaggagcaaaaaataggatttaaaatagctttaattaaaagagtctataaaataagtcaatatgaatttaactataggagtggaataaccaggacaccacacctaaaagaaaactatagatgttaaagaaaattttatataaaaaatcttttaattgccttttagaaaaataaaagtcaaacatatgtaattttttattagatataattatttgaatccatattatttgttcttattttgtatttaagagaataaaaattaaaatcttcttttttaaaatatgaaccatttttctgtattattttaataaattatgggtgtagctagaaataatattataaagaaaaaaaaaataagggtgaaaaaatattggagaattactaccccatatattatttttcaactttttgtttcttttttcaaatttaaagtttgagttgttccgattgtttctatgtggaaagtatacggatttttgtggcaatttaagttccttcgttagttcgtatatgagtttcaatgtagaattccgtaaaaatatattaaaaa

SEQ ID NO: 118564 - DNA, 2295 bp, Cannabis sativa
tttgccgccatttaccctttaaaaaaagataataataatgtatgacatagaattattgatttttggttggatgctagcacacattatccaccgacaccttttcttttctcatcattcttttcttttatatataaatataaaaatattagtgatttgtttgaaaatatattaagcaaaaaagaaataatatacatcctttaaaaggctattttgttacattttttttttatctatttcgttaaaattttgaattaattaccatgtcaaaaataatcagtttagacatgtgtatatataaaaaaatagtaatactatttgtgtaacaaaatatttaaattgtattcttggtatacatatacaataaatttatttgtggttcatagaaattacagtatacatgtcataaaaaaaagtgtcgcgtacgtgtatgagaaatgttaaaaagtgttactggtgtctagcactttcttaaatgttatattgttattggtgtaattaagtatatcgggtctccatttgattagtatgttatgttggtcacgttgaaagagtcggaatggtttaatttggaatcaaaaaagtgttgaagttgcagatgtgttagtgttagctcaactactcttaatcaatggaattatgctcaagacagacaatttgatccatcttttggtttgatgactcctgaagatggagaagagtattggcaagcacctcaggagaataagattaagatcaacactgatgcaggaatttttgaatcaacaacatgctacagctactcgtgcgtggcccgtgaccatgttggcttactggtggaggctcgagcgtcatgtcgtcaaggtgtaatgaggcctgaagttgcagaagcaatcggtattcttgaagctctaagttggataaagcagcagggctagtgtggcgttgaagtggaatccgactgccttgttgccatacaatccattcgtagctcttctaccatgagttcttattttggtagagttgtttctaaggagttgttgattgagttaaacaataagtctatttctttaaattttgttaaacggtatgcaagcaatggagctcactttctagctagatctacttgttttattgctgatcgtattttacaagcgagcaatgctctctcggagtttatttctgtattattaaatgatttaattgaattaatgaagttatttcattttatcaaaaaaaaaagtatatcggatctcatataacttaagaaaatagtttataaagaataacgttaaccaatcataaaatatcacatatacaaaatatggccatcagaagtactacccaataaaaatgctgtgtgtgtatacattacgtaagaatccatgacgtagccttatcccacgtaatcaatattacgtaggagaaatttgttaaggattttgttttttttttttatttgaattatttattattattattagaggaataattggttggtaggaaaatattaatatttatattgataagaagtgatcatatacatggtggggcatgcaaaaaatatttgtttaattaaagtagacagtctaattatagttttaatattgtttttttttttttttcaaatttgatattattatatatttattatgtatagtggtttgcaatttattgtattaactaataagtttaacttttatcaaattatgtttcttgaatttttttagccgttaaaaactccctttgaattattgagattgttagatttaaagatttttatctgatttcattcaattttattattccagtgattgtatatatattaaactatgttttacagactttgatatttaccaaatcatgtccctcgaactttgacatgcactaaatcatgctctctgaacttttacgacctttttttactaaaattggaaaataaaagtccttaaatctaacaatctcaatagttcagtgggcatttttaaggacctagcttaaaagttcagggagcataatttggtacatgtcaaaatttagggcgtaaaaatcctaattagctaaaaaaaaaaaattattctaacttgttttttcttttattgttttctatgattataaaaagaaaaatataaatatatatactatagtgtactaaactgtgtttaaattctaatttagttattgcaaacaaagacaaattttggtgtatagtgggaaaaaaatgatcttttatattaggataaataacggtataagtacttaaagttttaaatttgtaagtggtataaactcaatgtttatttttagcggcataagcac

SEQ ID NO: 118565 - DNA, 687 bp, Cannabis sativa
ttcgagtcagtgccaaactccaattgaactaaaagttctattttctcaatccatatctcacaagccttacaattacatatttatagtaaatcacactctttaaaaattactaataagcccctacactatttcatagtgtaacagtatgtacgatatgtgtagagataaataattaatgatggacactaaaaatatacattttattactgtaatttataattaattaattcaacatgctgaattaagaactacttttctagaaacaaaaattttaacgaatagaaatgcataaatgcttcttgacaaatcatatgtatgttagaaatatttttgtttggtatattgtattatatcttattgtattgtatagtataatattgaagaaatattattggtggcaaaactacttaaactatacaacttttgacacctaaccccataaactaattttttgaccacaaaacaaccaaaacctcactctttattatgttatttacacttctcttaaaatgatgttgataaatgccaacgtgtactacttatacatgtctgaatttaagtggcccatatcattttaaaatataaaaaataaatgatgtaattacaaaacaaatatttattaatctttttctcacaatttcgaaattgcatttcttaaatgctgaaatttcgaatttatttgaaaaa

SEQ ID NO: 118566 - DNA, 1284 bp, Cannabis sativa
ataatacccaacactcataacattggcatggcatggtatggacaggggtgtagcataaactcaatagcagaagcagtgacgtcagggattagtggagccataacagcacatggaagacaatcgatggaggaggaaacaggctattccttcgtcaattgcaccataacaggcactggaaaagtctggcttggtcgagcttggggagtttacgccactgtcgttttctcaacaacttacatgtctgatgtcgtttcttctgacgcttggaatgattggagggacccctctagagatcagtttgttctttttttttttttctttatcttatttattttgtatagataaatttcttaattgtgttctaataattagaataataataataatttgttatgatggttattaatttaggtcagtcttttttggagagtatcagtgcgagggaccgggggcaaactccacatacagagtctcgtacgcaaagcagctccagagggccgaagcagcttcttttatggacatttcatatatcaatggaaatgactggcttttagatcatcctaatattatttcatctcaatataaacaggattaccatagaaattacaatgatcaattttcttcatactaattacttagatagctattgttatcatcttatttacacaattttaatatttatatatacataactatttctatgcgcatgtgatgtgatcgttcaatttgcagtcttgatgtattttttcttataccaaaaaaaattgaaaaaaatacttaataattattagaatttaaattacttttaattgcttgatcactaattaactctctatgattttgatgcgagatatgagaagtgagtgtcaattatgctatagtgaaatacctttatagtttagatagcttatagagtttctgtgtttaatgcttgttgcctgtttaatttatcacgatagtagaaaatttgcatgtaattaagatttatatgtttgagaagactatataaattaccttagtaaatctgctattgcataaaaatgggtaataggaggataatcatattaggccataatcaatagatacaattgaaatcgaagacctaactttaatcattattaatttctcttttgaattattttctttttaatttcactatatctttaatgttcttaaatttaattttcttaattttgaatttaaccaaatagaagtaaagatttaattttaaagtactttactacaatccttgtgggatcaacctcactcctagtgagtctacta

SEQ ID NO: 118567 - DNA, 1087 bp, Cannabis sativa
taaataagtgatgaaagtacttttgtctctttattgatatttaaatgatagagattacattgaaatagagttttatttaaggcataaagcccaacagaaactcgggggcgggccgcgtcatgcaaacgccatgccgcggcacttgggacgagctcccaggtctcaacgaaaggggcgggccgcggcatgctaaagccatgtcctggaatctgggttccaaacccagaaaccaacaagcttcaacacgaaaaatcagctcccaaacacatccaattcatcccaaaacttaatcaaactctcaattcacaaattaaagttgctagcaaacattagagagttaaaacacatattttatgcatccaatccatccataaaacattcccaaattcagattacaacccaagaacaccaagctccattcaagaacaaaattcaacaaaacttcttacttgaaaccttaaacttccaagcatgtttcaaccctattttacagcaacccaaagcgtcaaaaatacatggattcaagcttgaaaaacacaccaacactctcatctaaaacttaaccaatatacaatcaaaagttcaaatacaaatatgcttaaaccaaccataaaacaaccacatgcaacttaagagcatcatatacctatttcatgttttcaacctttaaattcagcaacaataaccaaaattaaagctgtaaaactacctcaattatagcaagaacttccttcaattccatgttccaaagatagcaagattcaagaattctcaaatatttctcaagtgaaagaaataggttagaaagggagggagagggttcggtatgagggaaacaaaactagaaaaatctttctcatttacttaaaaattcaatcttttatcaattataatttaaaggtcaaaatgaccaatttgcccctagggctaacaacatactcatgcacatacaagggcaattaagtcatttcacaaaaaaaataaacccaattaatttttagatttctcacacataaatataatgccactaattaatcccagaattgtatttcggccccgaacgcagttcgactcgaaatacccggtt

SEQ ID NO: 118568 - DNA, 2655 bp, Cannabis sativa
  modified_base (2578)..(2582): a, c, t, g, unknown or other
ttttctttttatttttggttatttttaattatatgtgaaaggaaacgtttataccaaatattagccaatatattaaattaaattgtcttcttctcatcaacatcttttgatttcttccacacgttcacaattatatatatataaaaaatcaaaccaaacaaaattacatgaattattattaatttttgaataataatacataaagtagtagtaataattgtaaatatttataaataaaaaaaattataaaccaaaaattttaaaaaattatttttactctttaaacttttttttatttacaaaaatacattttcagtaaaaataataaactatttttttagttattttttaatttatttatagttgtattatagttgtcatgaagttatttttctaattattttatagtttatttataatttataattgttgcgaggttgatttcttgttgttttttagtaatttttttactttttgctgagtgtattttataattttaaaactctacaagtatatttttataattaaaaattttaggccgtaaaataataaataaaatataattttttttttttgaaaattctcataaataaaaactcatgaaattatatataattaagtaatttacggcataaatatttaagtttaattctcggttgtaaatgaatatctaaatttaatttttgacggtaataatacttaagttataattctgtaacttctgtacctgctgttaattattaagtaatttgacacgtgacaattcctaattgggccaggtcattaaaattttattttattgaaaaattaatttaaatataccaataaaaaaataatacgtgtgtaatgaattgacacttaatagttaagtacttataaaagttccaaaaatataatttaaatatttatttacaaccaaaaattaaacttaaatatttgaactacaaattaccctatataatttgaatataatatgggaataagttgagaaatatttttttttattttatatccattaataaaaaatactcttaaattatatttcattaaaatgtacctgcttttatgattacattgctcattataccttcaatttctacttaagtctaacacataatttatattaatctaaaagtataataaaaatatcatctatatggatatattttaaaaaatataaaaataaaaatatttaaaataaaatagatatatattataatttccctcgatgaatataaatattttgctttctaggaatctttggatagactttatgtgggattgtgtaaagtcaattgacaatgaatcacttttttctttaattttgtgccaaacacaatcttatcttattattattagtctcttgcttttgatgtcaaaacaataatcatcaatttggacaaaatttaggactaacaataaaagaaaagtataattattataattagcttttaataataaccaatttaatatacaattctctactctagtttgtcttatattgggatatgaaaagataatcacaaaatccaaacacatatatacaagtttgtgaatgatatttcttttatacttcatatttatcataatgatcatcaaaaacttacaagacaaattgggactcaaattcaaaataaaacaagtcatctttgaatttttggcattggaacaattgattctttaagataaataatatattgtacttaatttttttattatgattatcaaagtgaattgatggagttttatttttctcgaaaatatatgtctaactcaaaaatttaatattgtggctcataaattgactaattatactatttaattagctcaataataaagtttgacggttatatagaaaaaattgctccactagtttgtactctaattctactacaatctaaataacaataaacatttttattgctaagttgatgaaaaattatcaaaaattaaaattgataagtgaatatgttgatttaagtagggtggaacattagactggcttattgtgttcaggtgcttcgactttaggttttcgtgttttggatgtggtgcataccgaactcatgtaattagttaatggatttgtgttgtgttcgaatttcaggtttcgaatcacatattgtcgagtgttatccaaaatgaagaaacatctcattgtttgatgcttttggaaaaaaaaaaaaaacaaaacaaaacaagatcttataaatttttagtactttaaattattaacataatacatattttttttttactatttgtaatctttattgttttttggatgaataaattcttatagaaataattcctctaagatattctccaccctacatttggtgggaaatatgcaaaaaatgttggcaagaactattacacaaaagaattattgatcgatcaatgaaatgaattagatttatgagtgattctcttgaagtttggcaatcattagtgatcgcacagttcaagtcaatactaaactcttcaacttagttattagtacttcggagtggtgcagactctccgacttagctattgaatgaatcttatgcctgtcaggtccactcctaggtcttcnnnnncctatcgtccacttcggtgactccaaccccgaaaagatgatctcttccactaacctcttcacatgaactttca

SEQ ID NO: 118569 - DNA, 1844 bp, Cannabis sativa
cgttgttgattccatagcctttactaaacaaaagaatataaattccattccattctattcccattcccattccattttcacttagtaaccaaatatatatatatatcgttatatatgtcaaactcaacttcatttatcttttttattttttttttattttttcaaagccgatggaacaacctcaactcatacaatataaaaagtactactaggagggaatataagatttgtacagtgatcttggacaatcccttgggcacttatgatgatgtcgggcaacctttgaatgctctaggtcactcatcgaaggtcgggattgaccatgttgaagaagaggctcccaagttgcgggttctcgagtacagagatcagcagcgatggatatctcctccactttcctatgggccaagaagcttgacaacatcaaggaaatgggactcgtgggaaaaagtccaatgtgtcaagcccactagggtcctgttggcgcattatctgttgtccaactggatggcttggtcgggtcctcatatcgagcaaggggctgtcctacccttgcatccctatttcagggacatatctaacttctttagcctgtgtccgactcagattaccccgaaagacattaagtacctgctgacgcttttcattctcttcgcatagttaggctagccacaactctcaccttacgaggtaggctactactttgagctaacatctgttttaaaacagggcaggtccggatacttttactttagccagttaggtaacaaggctatgtcaaaaattgggaaatactctaggagttatttccttgcctgggatgtcaggtatgtaagccaccacttctagaaggttccaacattcattcgctcaattccaactttccatttgagggatagtgccaatcatatattgctctttctattcccgcaggattaaaatttgaaaaataagctaaataatcaactgcctaattctcacatcgtttgatgaaaaaaaaaaaaaaaacaaagtgaaataagatgaaaagattgcagcatcatagtaactttaagaacacttatattcagttttatctactgttcataagatacaacagtggaaactgttgcacagcatattcattcaatctcgtagcttaagtacttaattattgtgcaaggtaagtaactgcaatactaacaatctcttcagttgtagagaacttggtattcccaatcactaatagcgatttgatggcgagccatcaaagaacaaagaagaatcaacaacaaaacaaaataaaactatatcacacagacaaaactaaaacactcaaaaccatgtcacaaagacaagactaaaacacttaaaaccatgtcacgaagacaagactaatcacaatagtaaaaatcgaattcaatagcaaaatataatcccgaccaagccgcacctatgctcaggtatgaccaatgggctcagagaaaaaagatagcctgctatagctataaatttaagaacgaaaaatcctaactttttttgaatggatacaaattcatgtgtattattcattaataataacttaacaaattattttcaaaaatagaaaacaaaaatttaacaaatataaaataaaataataaataatttaaaaaattatatctaaaatactatactaaagtaaataattaaaataccgcacaaagaacaaatatattagctagttttaaaaatagagtaatttgcggcataaatatttaagtttaattgccaattacaaataaatacataagtttaattttttgctgtaataatacctaagttataattttgaaacttcagtaggtacttggttaaataaattg

SEQ ID NO: 118570 - DNA, 821 bp, Cannabis sativa
gctgctccatcaaaaaaaccccgttgctgccaagtaccttccatgtccatactattccttttagtatccatcagaaacaccagatcaggattaacactgtggatcaaggatcacatcgaattgactgcctgaggcttgccaaggcctcgacagttccacgataagactaacattgggacatggggggcatgtaatggcccgcctcctcggcctgagaaaaatccgacttacctccattctcattatcctgattgatgccttccaaggaattcacattcggatttgactttcttgcatcagtgtcctcagtgttggaacaatcctcacctgaaactggaataaggatcccatccctctcacgaacattttccactgtttcaaatataatccccaaatagctttttttttagttgagcccaatttcttccaaaccctgtgaacagggctggcccatacaaaaggattccacctccctatcatcaagcctcctttttttccctgggcaggggcccaaaagaggcttcccactgggcttatgcaggcccactatatcttttttagcaatgtttttagaattttgcctcatcattttcgtagctgacccacttataagatctgacacatctttgaaaaccatagccaggtgtccgatttgtgattctgcgggaccacccgtgtcagacacaaccttgccaccccattcttcgtacagttcgtacccccgtatgcatggcctcaacgttcacctcaccctcctccaccacatccttgggatcagtacccttttccgtactcaccacttgtccctctggaaaggacac

SEQ ID NO: 118571 - DNA, 2776 bp, Cannabis sativa
  modified_base (39)..(51): a, c, t, g, unknown or other
  modified_base (1518)..(1525): a, c, t, g, unknown or other
  modified_base (1651)..(1651): a, c, t, g, unknown or other
  modified_base (1955)..(1962): a, c, t, g, unknown or other
  modified_base (2131)..(2135): a, c, t, g, unknown or other
  modified_base (2200)..(2220): a, c, t, g, unknown or other
  modified_base (2749)..(2750): a, c, t, g, unknown or other
ctttatatgtgttttctttttatcgttttagaagttcannnnnnnnnnnnnaatcaacatacttgtgagtagacctaagatcttggtaaaataaattccaacaagtttcactagaaggatcgcgactctcagcaggttcatttcaaaatccataaataaatgcatcccattcttcaatgtgttgcgaggaaataaaaaattcaaatggactgaagagtatgatgaagccttccagaaactaaaggagcacttaactaagactctggtcttatcaaatccagtagaaggagaagagttgtacctttacttggtagtgtttgatcatgtcgttagtactgcattagtgcgagaggaagggtgagtctaggtgccagtgtattacataagtaaaagactgttgggtgcaaagtctaggtatcatataattgagaaattaatctttcgcttattgattgactccaggaagctgagaccctacttccaagcccatgccattaaggtgttgaccaaccatcctctccgccaagtgctatagaagccagagtcatccggcaagctactaaatgggctatggaacttaaccaatttgacatccaatactagcctcagttgtcgatcaaagggcaagcactaactgactttatagtagagtgttgtggcatgagtgacgtccctaatgagccaatcctggaactgttaggattttatgccctaaataaaaactcatttcaatataatcagatttaataattaattaatgatcagaaattattttatgttgcatggttcacatgattactttcatgattatatatttaatgtataaattttattaaatccaaaacatatagttattcataataacagtaatgtcatcatagtggaaagtaattgtgattatatgtttcaaagtctttagtcccatgatttatcagtgcactgaatttacattgacatggttactttcatgattatatatttaatgtataaattcttttaaattcagaacatatagttattcataattattgtgatgtcatcatagtagaaagtacttgtgattatatgtttcaaaatctttagtcccatgatttatcagtgtactgaatttatattagcgtgataatccgtgataaaatttacttacacattgatatgtggtatgtcctttccagggcattagtaaagtatactagtatcgaatatatatcggactagaccaatattgacaatggaaaagatattataaacttaccattgtatctttctaagtcaatatcacttagttgatcatagataaatagatcttaatcctgagatggttaggttctagctcaattatattatttgtgttctttggcttgtttgttaaagttgactaaatagagcttcccaatacttatatcttgggaacatggtagtgtgactgagtgggagcgctaatcatagatatggaatatatatatcttctataactatatagaaatgaaatcatgattttctttgagcttggcttannnnnnnnaaatggaagagctcttattttagtaattatattagtttaatgaaatatcatttataggaagctaagcattttaaggataaaatacattgagtggtagaacgataaatcatctatagaggatctttnattatttggattgaaacaatgagtaattcaaagtgcatctatttttggtatatagagtattttatgtaatcaggagtgcacttttgaatctatagtggagtcaagaggagttaataagttgagaaatttacttggtaaattttcgatctacttattgggaggttggttacatagggccatggtccccatactaactgggataatattcttttatagtctcaattaattgattttaattaatcaaataggattctaaataaagactaagtcttatttgtagtctcaactagtgtggggaccatgnnnnnnnntaatcaagcttccaataagtagctctagaatttaccaagtaacttctctaacttattaattcctccttgcaccactataaattcgaaattgcactcttaattatatggaacgctctatatgttccctaatatagatacactatgaattatccattgttataatcctaannnnnaatgatcctctatagatgatctaaattgagtagggacaaatttaccgttacacctttcaatgtannnnnnnnnnnnnnnnnnnnnctacctataaataatattcaataaactaatttaattactgaaatgagtactcatccatttatctttattaaaccaagcttgaaggaattcatcatttcacttctatatccaaagaagctatagattccgtatctataattaacgctcccactctattgaactaccatgtccttaatctgtatgtcacgagaagatccattagttgactgtaacaaacaaattgaagaaaaaaaaaataatacaattgaactagaacctaaccatctctgaattgagattatttgatctaagatcaactaggtgatattgaattagatagatattatggtaagtttattatatattatccaagttcaatatcggtccctttcgatgcatactccatacatagcacttatccaagtgcaagtaaactacattgtagatatcctatcagttaaattctgtgtactgataaatcataggtatacctttaatcacattatctttattgctttccactgtgttgactgttgggttttatgccctnnataaaactctttacaatctgattagt

SEQ ID NO: 118572 - DNA, 895 bp, Cannabis sativa
ctgccaatataaacagagcaggcgatagtggatcgccttgtcgcaaccctctatgaggaaagaacttttttagaggacttccattcagcaaaaccgtgtacgatacactggtgatacacttcattattaggttccttactcgattgtcgaaaccattatgaagtaaaacaccttcaatgaaatcccattccattttatcgtaagccttgtgcatatccaatttgattgccattaggcctcctttcccacgcttcttcctgactttatgcactaattcttgagtcaatatggatgactctgcaatccaccgcccagggatgaaagccgattgcagaggagagaccaaatcactcatataggggcgtaaacgattggccaatatcttagcgatcaccttataatgaaaattacagagactaataggcctgaattgatccattttaaccggggcctctatctttgggattaagcacataaaggtatggttaaaatttggatccatcctgactcaaaaaaatccttaacagcatcgaccaatctctctcccactatatcccagaatttcctatagaaacaaccagagaacccatcgggtcttggggctttgagagggtgcaagctgaaaacaacttccttgatttcctctgcagaaggaatttccccaatactcgcattagccatcctactaattcttccttcaattaaaccatcaggattattgaaagagggaactccagaagcagagtataacttggaaaaatattcattaacaatgccagttatcttccttctgtcatcccacaattttccttgcttgcagagtccagatctgatttcttcgttcaggtttttatcaaaaaaaaaaaaaactttgtaaaagtatataagtaatatt

SEQ ID NO: 118573 - DNA, 987 bp, Cannabis sativa
tgctttgaaaacacttttgaaaacatattcaggaacaccatgatttaccagctgcccatgcaaatcaataaaatatattaattaaaacaacatcacaatataattgtatttttaaaaatacccaataattatggtattagagatttaattaagaatatagaaatatgtatgcaaacaataaatttgatgaatatgatcatatttttaaaggatatatagaaaggatactattaattatttcacgcgctacgacaatcacacggtagttttagaaattaaaaagctgaccagtattttatatttagctaaatcatatacatgcatatatataatatttcaaattcaaacgtatatagatccatataaaaactcgtaaatttatattataaaatggctagctatgcaatttagtgttctttctggggattttgttttttttccatattggtcaacaataactactaaaacaagataaaaaattcattggagagtgtatttaaagaagacagaaaagaggtgggtgttgtgggacctacgtgacacatttttaattaatgtattaactaatctcaatttattttttaattaaaaatataaagaggcaatatagtgcctattttaaaatcattttttttaaatggattttaaaatcattttaaggtgcatttgtttccacttgattgatgtatacatctgattaggtcaggtttaaattgattaagaattttgttttgtatttttgtaatcattctttactacttgatagatgtgaccaaataagacatgtgattgactctttataggtctgaccaaatgtatagcatacattatattacttaattttttcatgccttttcataaaaacgtcattctatataaatattgttattattattattataattaatttttttcttgtcagatgggttcttttctttttcgttttttttttttttttttgacaaaagaagaaaacttcattaatta

SEQ ID NO: 118574 - DNA, 727 bp, Cannabis sativa
gctgagaagaagtgagtgaacctcttcaatagtcggctttacaggcctagccaagatcggagtcacaaacgcattgtactccggtcctagaccattcaacaaataagttaagtgttcttgtgtagatataggttcaccaacagaagccaaagtgttgcagagagttttcattttctgcaaatatgctgatgccgtgagcccatctttctttagattttttagagcagtgcgataattggagcttcgggcgaatgatgcagtagagtaagttctttcaagtgaaacccagatttcggccgctgtaatgaagccaactatctgtccaagcatggaatcggaaatagacgcataaagccaactcatgagcagccggttgtatcgatgccaaacggtaaactcgggatccatctgatttgaggtggaatccgtgaactgaggaggacaaacaatggtgccatcaatgtaaccttcaagaccattagctatgatgatgttttgcatttgcatcctccaaactaaatagtttgtatcatcaagctttactgatatggattgattgaaggaagggaaatttgtgggtggaattgatgagtttgaaaactgcaggggaggagaagaaggtgtggcggcggcagtattggtagggttttgtgggtttgtgattgtagggttttgaagggggtttagggtattttcatcttccatttgtggggtagagctagtacaa

SEQ ID NO: 118575 - DNA, 1813 bp, Cannabis sativa
  modified_base (185)..(187): a, c, t, g, unknown or other
tattaaattttttcaaatcttgcattgaaatagtctttccttctatttctaaatagaatagtcattctactaaaataatagaaatgtcattctatcggaatgttattccaagggttttaaatgcaaccaagcaaaagaatggaatgaaaattatttcctttctattccattctatttcattaccnnnaaccaaacgccaccttatttctttgattaatttttaatgcaacgtgagcttttggagagagaactttcaacattgtgtttaggattttgttgtgcgcgaaagcaataaatagtgaaaaataacgatcgataaatatatatatatatcaaagcggtaaataataaaacacatagaattgcgtagtttggcaattcgcctactccacgggagacaactaatattattaacctaagtaggaaatatacataataccaatacaaattttctactaataatatctcacaggtgtttccctaagtgttttccaaactcactaaagtgtttcctaaaattgggttgtctgtagttttgactttttggaaaataacatccccttcatcaatgatttcacgaacaaaatataaatgaacattgatgtgcttagtgcaatcatgatggacttgatctttgccaaacaaatgacactctgactgtcacaaaaaatctccacgttcttctgaataatacccaaatccttggtcaatctgagaagccagatagcttctttgaatgcttctatcacaaccatatattctgcctctatagtagacaaagctattgttgactgtaaagttgatctctggcaaagtcgacctgccattgttaacacataaccagtagttgatcgacgcttatctagatctctagcgtattcagaatcaatatattcgataagatgattaccatcaatcttgtttctctcaaacttcaaaccaatatctacagtacgatagatatactgtagaatccacttcactgcttgttagtgacctttatcgagattgtacatgtaacgactcatcatactaacaacatgtgaaatatcaagtctagtacatatgcatacatcagggcaccaatagcatttgtatatggaatattcttcattttcttcttctcatcgacagtgctaggtgacatctttgcacttaacttaaaatgaggtgcaagtgcatccatgttaaacctttgcagtactttctttagatattgagtttgtgttaaacagactgtgtttacaactctgtttcttttgatctccatcctaagaatcttcttaacttctctaaaatctttcattttaaattctgcacttaactgagtctttagcctgataatctccaccttgctcttagatgaaattagcatatcatcaacatataagagcaaataaatgaaagtaccatcttagagtttctaaaagtgtacacagtggttgtattggctgcgggtgtacttctactctctgatgaagctatcaaaatgcttgtaccactgtcttggtgactgcttcaaaccatacagtgacttacttaacttgcaaacccgattctctcgaccttgaactttgtaaccaattggctgagacatataaatctcttcatctaaagtaccaacaaaagctatcttgacattgagttgagctaactcgagattaaattatgctaccaaagccaacaaaattcaaatagatgaatgattaacaataggtgatgtaacgccccgatttcccgagacgtcacactagctaatccgtttaaaatcatttaagataaagacaataaaagacttctttaatgaaaaata

SEQ ID NO: 118576 - DNA, 1656 bp, Cannabis sativa
gctaacaataaagtttttaaaaaaaaaaaaatatgaataggaaactagtcgttggtgttttaaattctattaaatatattaaaacaatttgaattttttgagtttgaatatttattttatatattaattaatttatatatttattaattgtagtttatattgtttgttaatatttaatcttatttattaatgtaattaatattaattttatttattaattaaaattaatttattaatcttatttgttaataacatctaactttaaaaaatttaaataacaacttcaaaagaaaggcattatcgatctatagaattctgagacaactttgaagactgcggtcgataacttaaaacaacaacttctcgactctactcaaaaattaaagctcagcaagaccttgacgaggctaacaaaaagctcgagaatgtcaaggagaacgctcgtgtaaggttactttggtggccaagtgttccatttataaagcctggttagtgaatccagacatggatctcaattttttgagtgaagctgccgaagagatgttggagtatttcaagctgacttaggaaaaaggagctggctctgacaaggaagatgaggccaagattgctgaagaagaagaagaaaatgttccacctaagtctcctactatgtaagcttagttttattatcctttgaacaatggccttttggtcgagaccatattaggcctttcgtggcatttattatgaatgtaattaattttattttgttttgttggatggctaactttactaaattaattacactataatttttatgccattttaatatatacctgtttcctctattttgggcgagaaaactttaaatattttgaatatgttatgtattttttctcatgaataaactttttacataactttatcaaaacactttttctcaactttaagcctcgagtgatcagtttgtattggacttttttgatcgcttgtgtgcgcgcagtttatgctcaccaatttgttgagtaaagagcaaacttaaatactttgaatagtacttagactattttgaatattttttgattgctcgtgcgaatagttagtcctctattcatactttagcttgtatactatttatcacgactcactagggggtctcatttatagtacatgctatatgtgcgagcccttacttattcagatgacatttagcttgatgttgattacaagacttttgatactaatctcgtttaaaattattattttcatttctactttgagaaagattctaattatttaactttatgttgttttggactagatttaatcaaatatttttttttttatcttttttgcatgttttttatttctaggcattatcggatgaacctagttatttctagatatattgtcgagcttagttattatatttcatgcccccaaataattttaaagagaaaaatttatgattacttaaaatattcatctttattaaaataaatatttcaagtaatcataaacttgtggtgagcattactattggatatagtggtgcagtataaaaattttcttttagtcataacaaaatgactaaaagtgaaaatgttgtgtctaattataaataataattcctatgttgttactaaaaagtctatagctaaatgtattagtcac

SEQ ID NO: 118577 - DNA, 1108 bp, Cannabis sativa
  modified_base (1044)..(1063): a, c, t, g, unknown or other
gtaaataaatatttaaaaaaataagaaattaattattttaaaataataaataaaaaaaactatttttctttaaaaattaaaaaaaaaacttaattctctaattccctaattccctcaagccctcctcctcctccttcttcttcttctaaaaaaaaccctaacctaaacctcctttcgcacaaccactacccataataatcaaccccacaaaactagtcaatgcctacggtagagtaaatttatggtaagaaagaaagaaacaatagaagtcgagcatcatccatttaaaaatggagttagggtggtgagctggtcaggcagctggatcgatggcttctagcagcggggactgtcaacgactccggagctgggttctgggcagcgctaaaattgtgagaagtggctatagaggtcgagttgtgggttacactaaaacattcactttcaaataaaataatgattgaaatgttaattaatagccatgcttctccatgtttaccagatgttcggctccactctcggcagagatcatccaatcttgtttgtgacggtactaggcggagcttggaggaaagcttagtggcagatctgggttctttccttctcccaaatttcttgtaggtgacaggatttcaacggagactactcgtctattcgagatcttgtgttgccgacgccgtcctcgtcgtaaccatgccgcaagagacggcgaatttgtctgatcaaagctttttggcatgtttaccagatgttcggctccttcaaataaccaaagcatttatgtatcagatgatagtgtttagggcatagagagcttcagaagaaggaatcgttgactgttggtgatggtgatggtggttggcttcgtagtccgccatgaatggaatggggttattgtgagcttggagttggagactccactcactgactcacacagttgaacttattttacagtcttgatttagttacaagttttaagaagtgggggaattagggtttgggttaggttaaggttcggattttttttagcagagaagaagaagnnnnnnnnnnnnnnnnnnnngaagaagaagaagaagaagggaaatagggtttttttttttttttt

SEQ ID NO: 118578 - DNA, 2088 bp, Cannabis sativa
caagaattataataacttaacgatataggagacccaacgggggctagagagtcttttggggctgttcaaaaataggctctttgtactaggggagaggcccaacaagtgtgtggaaggaggttttgatgtatggagttgggctcacgtcaaaatgagggcacatctgccattgaggttctattttgctaaatcctacactgtagccgaactagcacctgtctagctcattccataggtttaccgcttgttgtctgggaggtacgtcatctatgttaaacatggcaaatcagtgccgacgccacaggagatactgcatttctataagatcaagtctcaccaattgagagatcacaaggagaaggtgggcttttatatgttgaagcgacacaacaagagtattccttgccccactaattacaagaagtacatgcatgattttagggaattttatttcttcacctctaactttgaactgaggaagattcttacgctcagctgggatttcaaccttgcaagtaagtcttattcccttctctagtttttaaagttctacttttcctccggtctgctgtattttgatcctttacatttgttattttctagactgccttcaccagtcacctttgacaccagagctggaagagaggataaatttctataagtccttctcacccaaggagctgcaggtggaaaaactgatgaccaggaagaacctatgggaagtgagttatatctccatatcagtgtagatcacctctccataaaggatgttgtctaggatgccctacagggggactcggatgaatttaaagatgccatcacagttataactactgaggaggctttaaaggcagtgaaggccaatgagcaatggctggaggattggaggagacaattcttagaaggcctgagcgaggccaaagaactttccatccgctttaaggaggtgattcccaatgagggtgcttcaggagtgagcaatttcggtagtggtgagatgcctttcaatataattagggttcccactatgtcaaatttcaagaccgtcaatcaatgtgaatttgacccatagtttttgaatttaagtcgtcataagtacccatgcaatatatatagatagagtacattgtatcatttagagtcctaaccatttcattccacctgtgcaccatcatgtcagagtggacgcatttagtgaaatttacttcctaggatcactctagtatgaaactaatttaggtcgagaggacatcgctctatttgctagggggaaagtcaattatgctaggatcaatagtttgtaccctcttaatgtcttgcatgctgtcttttattacaatcatatttgatgaacatcttatttgttgtgggtagatcaagcagccactctttagatggggctattaaacaaatttttgggcagcatcaaaactaggtttaacgagattaagagatagctcaaggaagcagagtcagtagcaaggggaaccaagcttctgggagcagatctcagaaaccagaaccttcagtctcgaatctagaggctgctcctaaggatccaggtacagaggcttcttctactaccatcgtagatctgaccgagcatgccctatttgtggagcctttaatcaagttcctttggagatttctggaagggataactcatactacgatgggcctatagtgatcaataagaagcaaccatttcatctgacggtgacaccaacaaaaaggcaagggtggagaccaaaaagaaggtcttagaactggcagcctcgaggaggcacacaatagatacttagtcccagaaggggtcaactgctcctaaggctagaaggctgcctagggtaagcactcacacctcaaaggacattaaagatcctcgtttaccaccccgagcacctaaatttatgtcagccaccttgacttaactgtccagggaaaggactgagctacctctactacctccgacacctttcacacttcatgtcagacctttgcagttgacggaagggcacgaagcttgcctagaagtagtggattagttctaccaaaaaaggcacatttgtgaagttaaggagatgaaga

SEQ ID NO: 118579 - DNA, 948 bp, Cannabis sativa
  modified_base (81)..(88): a, c, t, g, unknown or other
tttttttttcaattttttttatgcattttaaattttattttatttcattcctattcctattctcattctcattcctattcnnnnnnnntcattcctcccaactaaacgtcactatatgtgtacagtgttgcaattaattggtatttaacaaaatattaactgaagataactcaaaaactaaacttaagtttggcaaattttgcctccaaactaaactttacaaagctctttactgttggaacttcactctcccaaaatgttttgtttctagtaattccacatacgtaccaaggtcagctttggacatttatgggctatagtaggctcttatttagaaaaaaatatgatactttcgaagtaaaaaatttatgtatttttaaaagagaaatttttttgggccactggatcaggtaggctctagacatatgcctaactcacctacattatttatgtacaagcattagaaactatgcacactactacaaaaatgtttattcccatcggtccttaaataggttttttttcaagaacagttgctaatgaagttacgtgactgtttaaagctgtcatcaatagtggagtattcacaacagttttaaacagtcgtttatagtgcccaactgttaaaaatagtcacgaaaattgaaaaacgagtgtaacgggtatccccgacagtttaaaccgtccaggatactaattaaaattttcatttcagaaccccaaccgcacgaaccttctctctatctcgaaacctgataattttaaatagttagggataccatttcaaatataaaaactaaataacattcattccaaatctcatttcattcacaatctctctcggtcctctgctctctctccttgaccacgagccaccaccatcctcctcctccgcgacgactgtccctctccttcgccaccaccgtcactcgtctctctctctctctc

SEQ ID NO: 118580 - DNA, 637 bp, Cannabis sativa
gaagaagacgaggaagaaaaaaaatttaaagatttttaaataatttatttttattttcaatttttaaattaaagttataatttggaccaataattcttcgacacgtgataattttaaataagtaaacaaattagttaaatttaggacttataagaaatttgaccttgtcattatttcttgagattgagaactaatttacatcaaaataaatttattggagacttgccataaaattccccttattttattatgagagagtatgcattttttttaaattgtcattttttataatattaataaagaataactcaaatttcaaaattattaatttatttataaacaatataaataaaacaagactaaatatatttaacataatatataatataaaaatattaaatttaaatatatttaacataatatttataaaaaataaaccaaaatttgttatcaaaagtatatgcagtacatatataaagtagaacacactgccttaaagcatctttaatagagatgcaaatgtaaaatatacttcaatttgttaaaagtctattctaatagtgtgctaaattatgatatgaaaatctcacataatcaaaagtaggggtgttcattggatcacatccaatgtttttag

SEQ ID NO: 118581 - DNA, 5148 bp, Cannabis sativa
aaatattggggtccaaaataattaaattcataaataataataaaatactagaaattagtgcaaattgccttttctaatccaattgactaaggcggtcgttacacccacttagcttgactgaggtaagttttgggtttaaaaataccagctttggacctggtaatcatatgatgtgtggggactgcaataagattttgattctcatgtgttgaagcttcaacaacaggattcagagtttcttgatcttaatttcttaattcttcactgtggtgttcctgctgtgtgtgaaaattatctctgctgatgcctacagagataccatcaggtgacatagatccatgatcaagtgagtcaaaacttgaaagtggtgagtttgagggatttacctgatttggtgaagatgctggtgtaggagtggaatctgtggaggcttgagatggtacaggagcatttgtattttgaggattagagctgaaatgtctgaaatgaatgttaggaagttgtgaccaagactcattgtgtatgacaagtttcttctctggagcttgagtgttcaagaaaccagattgaaaagggaacatgctctcattgaatacaacatttcgagagatctatactcttccagttgtacccaagcatttatagcctctatatgattcattatatctcagattaacacacctaagtgaatggaattgaaacttatggttctggtaaggtcttatgcagggatagcaagcagctcaaaaagtttcaagttgcttgtagtctggttttctatagaacagagtttcgaaaggtgttttgttgtgtaaaactggtgttggaagtcgattaattagattcacagaattttgaaaaccatcaacccaatacttgagtggcatactttcttaagcaaggagtgttaaccccatctcaactatatgcctatgcttcctttaagctctcccattttgggcagaggtgtgaggacttgagtgttgaaagtgaattccatttgctcttactaattgctcaaacacttgatactctccaccccaatcacactttatgcttttgattttagtatcaaactggttttcaacaaaggctttaaaatctataaaagcattcaatgcatcagatttttgttttaatggatatagccaggttcatctactaaaatcatgcataaagtgtatgtaaaatttaaaatttgtattcgaagcaattggtgctggtccccacaaatcagtgggtatcaactcaagcaccttagaggctttatatgaagacagtttaaatggtagcatgtgacttgccaaatcgacatgcttcacggaaattttccatttcattctttgaaatttttacattgtttgactcacatacaagtttaaggactctagtggatggatggcctagacgtctatgccataaatccttcttgggaagatgaaaactggctgtattaacaacacttgatttggacagacttgacacaccacaaaacaacagtgactgaccctgatttgaagcaggtttgttgggaaactggtagagaccatctctaagcactctttccaacaacaccttctttgtgatgttgtccttcacaaaacaataatcagagtgaaattcaacaaacacaccattattagaagttagacttgacacactcaaaaggttgggatatcagacaacttgacataaacaatgcttttctgaatgggaaccttgaagaagatgtgtacatgtgtcaaccagaaggttttgtagaccctacaaggcctgatcatgtatgcaaattgcttaagtctctatatgggctcaaacaggctctaagagcttggtttgacaagttgaaagacacattgctgacttggaaattcaaaaactccaagccagatacttctttattcttttacatcagtaatgggagtattattctttagtgatctatgttgatgacattatcgtgattggcaacaacaatgtcaacttgaacagtttcattgagaaactcaacaaactgttcaccctcaaggatcttggggcattgcacttcttccttggcattgaagttgccagagatgaaacaggtctttacctcacttagacaaagtacattgaggatttgcttgaaaagaaccaaatgcagcacttgaaaccctgtcctactcctataacaactagaaaatctttatctctcacagatggcaaactaatggagaacccaactaactactgaagcctcattagagccttatagtacctgaatcacaccagacccgatattagctatgctgtgaattctttaagtcaattcctcaaagaccccacagtctcacactggaatgcagccaagagaattctaagatatctcaaaggaaccagcacacaaggcctacacctcagcagctgtgacaagttgaatctaatgggtttttctgatgctgactgggcaagaaatattgatggctgaaggtcagttagtgggtactgtgtatatcttggagagtcactagtttcttggtcttcaaagaagcagttagttgtgtcaagatcaagcacagagtctgaatacagagctcttgcgcatgtaagtgctgaaataacctggattgagtccttactcaatgaaatcagatttcctcttcctgctcctcccataacttggtgcgataacatgagtgcaagtgcattagcctcaaatcctgtataccatgctcgcaccaaacacattgaaatcgacataaattttgtgatggacaaagtgttgaacaaagaacttgaagttagatatgttccttcagctgattagatagcggattgcatgaccaaacctctttcacattcaagatttctctacttgattggcaaactcagagtaaaaaagtcaccctctcgtttgaggggtggtgttaagagaattgattagttattactttctgttaatcctctgttttactggactctaatgactggtttattaattgtaaaaggttgtacggattttgttatgtatgttacctttggctcgaacactagggccacatgtcactttgtaattttcccttggattctcttttcagaatataaatagaaaatgtcagacctcagcctctttgagctgagagttgttttcaatcctttttcgtgtataatttaactgaggatgactctaattttactcctccattatctaagcgtgagcgagctcctcctaagaagaaatcgaaggtgggtgcccaagaaaaaatggctgaagatgttgctggaaataatgataatgttggtgttgttattcgaactgagggttgtttacagtttctttttcgtgtcccccttttttctagattttcttgtatttttcgtttatcaattttgtgtttctagtttgtgatattctaggttttccattttaaaatttcattgtgaggaaatataaatttacataatacttttttacaaagtacagggaacatcaaaatataactccaaatgttgaaagaccaaaaccctctaggttgcactgtcgcgatatttcatattttaatgttgaggaaatatgttttagatccaactcatgtcttgagttaggaagctcttgaattgcagtcagacttgtcctacgaggaacagctagttcgaatcctcgataggaaggagaaggttcttcgaaacaagatcatagccttggtgaaagtgctctggaggaaaaacaaggtggaggaagtcacatgggagttagagtctgacatgtagactcaatatctagagttatttaggttagattttgaggacgaaatcattttaacggggggataattgtaatgaccgcattttagaatatggataagtaaaagcaattagcgttaattattgatattattttataattatttatgaatttatttaattatagatcccattattaaaagtgggtactagaattataatttctcaatttcagagattttatcaaactctcgagatattatttgagttatatatgaattatgctatttttataatttttgctctacgacgacgggaaatgctatggatggccatttgagtcacattggtaagtctagaacctttttttagtgtgataaatatttaagacagttagaataccaggtttgagcggggttatggtttttgaccattttacccctaggcttagtttggcttatgcttttgcaccaagggtaatttagtcatttggtaaaggggataggtggttgttttagggcttgacacctagccaattttatttcagcatgagattaatcaattaagctttattcattttggaagaaaatagaaaaaatcaagaaattccctttctctttcttccttgctcgaacaccacaagaaccatgcgcgcaagacctgggatttttttggtgtaaatagaagaaatgttagctgaatttaagtggttttaagcaaaggtaaccctagaactctaatccttgtgttattaaagctttgattttggtttgaatatgcaaatttgtgaatttgggactgttagggttagatttgtttatgattcagtttctaagttcaatttaagttagaattgaattcctgcagctggtttagggttgtggtgtggtggatgcacaagtttgagttagaaaacttgagcttggttcatccatggcactttttgattttgtgtgaatttcttggttctattgcttggataatggtggttgatgttattataggtgttttggaaagtttggtgaggtttggacacattttgtgcaggttttggattatttggggaaacctggtgcaaactggttaacctatttgttagccttgtaaaactggttaaccggttctgggaaaggtttcccgaacaatccatttcattaattcatgtccatttcagagccttggttgggtgattccttgttccttagggtattgtagctttatttatcaatagcagaaccttaagttggaggtttgggtttcccagattaaggttttggcgtgttatttacccgattatgttatgtggttaggccatccatccaacacgtggttttctgttaaggtcggccaactcacttgaattcagaaatgaggtaagaatagcgtagaacatattgttggaaatattttaccaggatctagctt

SEQ ID NO: 118582 - DNA, 2024 bp, Cannabis sativa
agtgaatcctatggactaaggggggaattctcttgcaatacttgctcaagataacttgagaacttacattaatggtattcccaaaggctttttcactaaacaattacctgataacatcgactcgtggactaaggctagttaacgctccaatcacgtaaaaactgtatgtgtctttcttactttttctcttttaattgtttatttcttcagttcatattatttataattcgtttttcaaaaatatcgataaacaagttataagacaaatatctataaccaaattcattttatattatttatttagttaattaaataagatttaataaagaatttaaaataaataattattacatttatttaacataccatatagatcaaattctacatagtttttgaaatagaagaatttttacgtaattgttctaaaagcctaataaaattttaccaataaacctttctttacatcgccaaagaaatagttcttgctcatgtgttgagatttaattaagaactctatatacactattatcttactagcccacacagtccttttgtgtggtgaaggtctggaaaattaaggtgtgagttttgtcatcaccattctaaggatacaacatatgaaaagaatcgaggataccctaataggctttgagaggtaaatattcttttcatctgtttacttttaatttaatatatatacatatggtgatcttgggcatatgatacaattataatcagtaataaccctttcgttgggtacgtgatttagtactataaaacaaacatgtcttgatgtgggggaacccgtggagacagttgtttacttagattaggatccgttaccattggacccttctgatcggtgggaacttgcacactaaaatccgtcaccatttgatcagttaatttagtggattgagatcttcttgtcaaaaccatcgttcgaggatcaaagcttctcacagattgtgttcgattgttctcaataaaagtatcaaaatatttacctcacttttggcaaacaacattgagtctttaaagagatgagtttttgaataagaataataactaaataatatatatgagcaaataagaacacaaggaaatttatagaggttcaacctcgtgattatggtaatagcctactcctctttttgttgtattactttcaagattatcaagatcacaaagagctgacaagttgagtttctcaacaatcttgatgaaagcttacaagtattttgacaacgtaagtgctctctaaaaaatatgaacttggatccctaaacaaaggaaatattccactatttataggaaagatataatgaatgttgttacttaaaataataagaaataaataaaaaaaattaaatgctaaatcactagaatatttcgactgtacagatatttaaggaaaatatcttaaagaatctaataacactgcatccttctgcatagaggattctgctttgctgactaaatacgttctgcttgcattacgcacatgtcaagtttagatacttgctgaagactcacataactagttttgagcataaacttttctggacggaacatttggaagcaaataacccattcaggtctcaaaatgatctccacgtgtcactttattgagtgacttgtaatcctgtgtgtaaattgggataagaattacttatataaatggtaggtagtcagtggcggaacctcattatgccgtgcagtggccatggccccccctaagtgtttaaagtaaatgtatatatacttatatatataaagagagagaaagaggaactaaaaaaaaatatatattatattttttaagtaaaaatatatatattatatattaattacatgcattgaaacttattttcatacccttttatttttattaataaatctttttattgataattttcatacattttgttttgttttatgtaaaaattataattcggttaattagaatttttttcctcccgaactttgacatgcactaaatcatgccccctaaacttttttgg

SEQ ID NO: 118583 - DNA, 967 bp, Cannabis sativa
actattagtagaaataaataaatacttattctcacacaaattgtataacaaataaaatttaaaatatatgtatatttttaccgggtattacattacataaagagataggtctcaaatctcccatatcacaagggtttttcttctttgggacaaggacaatatgtgtgcaatttagattagggggaagataaccattagaaaagaactcacataccagagcaacaacatcctttttaacaatgctccaacatttttgaaagaaaccgggagtcatgccatcgggaccaggtgatttttcgggatgcatctgaaatagtgcagccttgacttcttcttcagtaaccgaagcaaggaggtcgacgttctgttgagcagtcaacgagggacgaatattgtccaccacaccagccaaatggacattagaagaacaaaataattcctcaaaatagctttgaataacatgattcaaacctgaattccaatcgcaccagactccattaggcccctgaagtttggtaattgcattattttttcgtcttgtggttgctgaagcgtggaaatatctgctgttgttatcaccatctctaagccaaagttgtttcgatcgttggcgccaaaatacttccctttgagcatatatttcaaaaagctgtttttctgcttcattgtaagctgaaatatcatcagcatcatggcttcccttgaactgggcaattttctttttccaaaaaccaatcctttttttaaagcttcgagtgagatttttcccccaagtctcaagattctggccacacaaccttattttttccataatctctacagaattatcattgccccagctgtcttgaacaatttgaaagcacaaaggttctcttaaccaagagttctcaaatcggaattgtttaatagcagaaaaaacatcactcacaatgttaggttatttttagtattaattttagattaagtt

SEQ ID NO: 118584 - DNA, 2346 bp, Cannabis sativa
  modified_base (1847)..(1848): a, c, t, g, unknown or other
  modified_base (2293)..(2295): a, c, t, g, unknown or other
aaaaaatgtcatatttagggtaattaagtttttatgccatatatatcaaaacatatcttcattttcccatatttttgtaaatagccctaatatttataaagaaatactaagaggcactttaaggtgtcaaacatcacaagtcgtaatattttattattgatacattaaaataaacattttaatttaataaataatatgggaatctgctaactaattttagggcaccaaatcagtatggttttgggcatctttaaatgccaaataacaatactattcttatgactagattttaggaataaaaatcttctgtcaccaaagttctgtctcccctctgtttcaaattccatactaacttttggtattatttcactgcgaatatttgcatgatttatttgaactattttgaatagtggtttcaacatctttgtcatcatcttgtaatacttcatcaaagcttgaaatataattttcatcattattttgtaactctaattttcgacgcgagagaaaatcttcatctaacatattactctccatatctatcatcaataattaaaagtgaaacatttaccaaataaaattcaaaataccttattaaacttgaacataaataatatctatctatttttttattattatttttatgtaagattatattcatctaaaaaagatagtgtgaatggaaaaaaattgagaaattgtaaatttctatcttaattgtttatatataatcatataaaaagataataccagttgaaataatttttttgaactttacagtacaataaaaatgaatttaaacaaaaaagaataatataacgaaatattaaaacttatcttaataacacaatatttaggctaatcagtccatattcaattcaatcatgttataaaaatgtttatgatcttattttatctaatcgtaccaatcacatccaacaagtattatccatcttttaaataataaataataatagtaatgatcaaattttatgtagactaaaatgatgagtaagaataaaacaaaatatgcttaccagtcctttcaaagatgcgttcagagattgctttttcaaattgttgtgtacacctttcttcacttcagacttttttaggattcagacttttttaggtttttcaattgactacggaatatcaatgtgagcaaatgagcaaatgacaatatatattaatattttattctattaaaagaaacagaacggaaataaaaagaaacggaactgttaattatttgagaaatagaaagtatcacgtgaattttaaaaaaattgaacaaatgtcattagctcattattacgacagaggagagacataatattagtgacaaaagattttcattcagattttagtaatcaatgtaacttcctatatggttgcttactatttataggtgatccaaagaaacatatataatttgatttgaaaattttgtaaaaatttttataaaccaaataacacgaataaagtagaattctctctagaagtctttagccgctgcttaatttttttttttttttttgcctaatcagggctcaccaaccatttcttggcctaacggcgtggctttgatcaggtctagttgattcacacactatattttgatttcctttgattttagccctataatattgttttgccatcagttgatctcctgacatctccaattcctgactgcatcgagaattttgatgaaaagtattttattgaactaattgcccctaatcccataagcgcgagtcgacctatcaacatgttataaactgaaggcaaatccacaactagaaatttctgtatcttggtcattatatatatttaaaaataaaaannatatagatattttatataaaaaattttaatttaaatttaaaatacttaaaatattatagatatttttaatcatatttttaaatttatttgtttaaatttggattaaaataaaaagaaaaattatataaatattttatataaagaaatttaaatttaaaatattataaatattttaaattacattataatattacaatatataataatatacttagtaaataatgtaatattttaatttaaagtatataaacaaagatcaagtgtattggggttttgtgatcaagtgtattaaattatttaaatttaagaatataataaattataatatatacattatgagattacttaattaaaaaaaaaataaaaagtacgcatatatataattgtatttaagtgacataccaatgcaacaatagtaaaaaaaatgggaaatttgattttctannnttacatatacttaatattttttttttaaaacacataacatttaatatttgt

SEQ ID NO: 118585 - DNA, 1034 bp, Cannabis sativa
cgactacacctcaatttcgaaatattgttcaagccattttcatatttgatgagagaagataactttttagcacaaatcgaaaagaaaaaaggaaacaacgggttaccttgtctcaaacgacgaataggcaaaatattcctaataatatcaccattcacatttatggcatacaaaacactaatgatacatcacataacaagtccaatctaaccaagatgaaagcctaacttttcattatcctttcaaaaaatcatcaatcaatacgattatagacctagccatatccgcttttataagttagaaaccccttcatagttcatacctttcttgtgacgctttgatgagtcctctctctctcgagaaaaatacaaaagatattgatttttattatgattatgtagctagaatataaaattaaggcattaatttaatatgacaataaccgtagaaaagtctttaacattaatttctagcgcatttgttaggattggaagtgacaatattacattttggccctaaagatacaaaatccttcattgaccgatctatgggcaatcagagtgatcaactaagcgacaataaataataaataaggagtatcacgaatatttctttttttttttaaataataataataatacattggtcaatgtttaggttttgttctctagtatgacacaaaagtagtaccaccgatcacaattagatattcaatatttggcagtcggttatcattagattgaattgatttatgcacactcctaagcctgaggttaactttctctctatttttttaaatctcagtaggtctagtggtatgtagagttgatggagaacaagagcttaaggttagagctatagtgtcaatgaatttattggtgatattttaaccttaagaataacacgcataagaatattttttatacggtaacaaatcaaataaaatatttgatttgatttataaaatataattaattatttaatacttaattaaaatattctaattatgatcatatttaattacttaatattta

SEQ ID NO: 118586 - DNA, 1175 bp, Cannabis sativa
aagatatggctattgttgttccgaccaagatgtagagcattgcacatggcttgaactcgttaatcctggtgttatccttttctattttactacttaattcaatacttgaattttgagatttcttggtatataatttctttattgtattgcttgtttgttggtaggtaaactgaatcgaaagtcattaatattttttttattttgcccaacattccacctctctttctcctctctctctctctagaaagtcacacacacacacccaattggagcaccctttgtcggagcatccttgccaaattttatcaacttagcttaaccaccaagtgcatagcaccaatccaaactcccttaccaatattcttcttaaaaaaaataatgggtatgtaatttatttactaattgttgtttgatgtagttgtgtttagtggcatttagtttgatattaatagatctacacatctattaatttgttattgattatttggtgtctgaaatgaaacttcagtgaatctaggtttgtttggtttttccgtgttttaatgatatttagtgacatgtgttgggacatatatgaaattattagatctaagagatgatgttcatcgattgttagccacatgggtcacaacatacaacgatatataatggttagtttgttagagatgttgtttaacgatgtgcaacaacacgtgtcgcgacatgacgctaatatatgtgtatgtgatgctaatcgtgatgcttaacaatgtttagtgacatgttttgcaactttttgcaatttatttgtgttagatgcaagagttaattcttaacgatttatagcaccatgttttatgacatttattggtaaagaattgcgttatatttaagaggtggtggttaacgacatttgtcgataattggcgatattttgtgttatcatcattttgtgatatttcatgataattagcgatacttagtgatatttttcgacgattaaaattaatttttatttgcatattcaattgtatttgtggttatgttgtatgacggggtttgggctcttgaaggttttaactagatattcaagaaattgatgtttgagattgatagtactttagaaaacatatgtgaaattttgtatgaagatttagaagtggacccttttgtaacgtccccgcttcaagcctcca

SEQ ID NO: 118587 - DNA, 674 bp, Cannabis sativa
aaaaatagaagtaaatttgattaaatgattaataaaagtgatatttttcaacttatcccattgtataatgtgtcatacacctcaaccaactaaactgtgaatatttagcctaataaaactttacatcttttattttgggtctctgaaaagtggggccctaaatacgggcctagcccgtttatgcctagggctgacattcttttagttcgctgaaatttaaaataataaactagcttaattttatttttttggtaaaggaacttagtttaattaataccataagaatgaaaactaatattggaaggaaccatagatttcattagagatttagaggtgcacatggtttgggttggtcgggttgagaggcttttagcgtataaacctaataactttggtatgtcgcaactatgagtcgttcacatatataaacaacaaaaatggcatttttgttaccagaaaatgtttcatttcagtaacagaaatgaaatagaaagctctataatgatcttaagtggctagttttgtgtataacatatagtttctgtacttttaatattgagtgatttgttttatctaacgtatatgcattccaaaatatttccaatgttctgaaaaaaaaaaatgaaaaacttggacaaaaagtaattttggtatataagctgttttcttgagct

SEQ ID NO: 118588 - DNA, 596 bp, Cannabis sativa
agcttgaactatttccccccaaaaccaactaacttagctgtcatttaaacatgacaaatccgagagtgacatttggcacttattgatttatgtcaaaaacactacatatatatgggtgttttaacggtggaccctcgaaaaatgggtgcaccaatgcactttctttgtatttttaatatttgaatagtaatctcaatttttataagaaggtatatattgtaattacttaagacattctgtaaagtcttaaaaacttaaaaataatcttaaaatatggtatatcactagtaaaagaaaaatgagcttcaatgaggacaaatttcattagtgaagggtgtcttttttttataagtgatgactatcaatggtgacatgtcctcattaaaaagtcatcagtaataactcatcactgaaggtaagtatcagtgacgaaattcaaagtcatcactaaaaataaatatcagtcacgataatgtcgtcattgataatgtgtaactttttttaaaatgttagggcaaatttttttaaaacgttggggtcgtcactaatatgtgttagtttttttaaaagataataattataaatcaaattatttt

SEQ ID NO: 118589 - DNA, 1092 bp, Cannabis sativa
  modified_base (989)..(992): a, c, t, g, unknown or other
aaccaagaattgccgttagatagacacttttaatatataaagatatgtaataaatatatatggtactactattaataagtaatattatgaaaatttaagtttttatgtttaatttttttatttaattagaattttttttatatatattatataggctaaaattatttcatttaacggaataacataataaaaaagttttttagcaaaaaaataataagaaaaagttgagtttgatttaaatattttttatatagtgtaaaaaatgtatttttcgatattttgttttgattaagttgctaaattaatgaatatacaaattcaaatttttttattatttgctatcagatcaaaatctaatggtaatacttattgaaaatttttccatatatatatataaaattatttacctaaatgtgttgtaaagagtataataattgaaaactcttttggtaagagcatatcacttttactctcacccatgagaatatatatatatttttatattctaatggttaaaaagtgaaaattaaaaaacttaaaaataagaaagaaatcattatagatgaagagaaagaccataaaaaaacttaaaatcatgattttttttaccaaatacaataaccaatttacaggaggcactacagaagtttatttatttatttatttattttaaaaaataaataaaaactaaactacataagctaaaaaaatactaaacataattttattactgtataattaattaagaaatcagttacaaccatatatcaaaattggtttcttaatcaaaaatccatttaggaaaaccaacttatatataaattttgtaaattaattataaaccattaaattttgattatataaatgattgaaaaataaatttttatttctttttatatattaaaaaatattaaatgtatatagtttgttcattagtagaaaagtcttaaagtacttcatatgcatcaataattatagatatatgatcnnnngatatggaaattaagatcatacaataggaattgaacaaatatatagtcttggagtacgatcattgtcgcaaataaaaatttatattatcattaatgtgtt

SEQ ID NO: 118590 - DNA, 1088 bp, Cannabis sativa
ggaacatcagtacactcagggcggacctcatagaaagaatcagcaggagttccggaatccctccacattcccaatgaccaaaaataactttcacagaatcaaagaaaatcccaaatcaagcttcaaatctaatttttaaaccattcagatagattgaatgaggtcccagatcccaaatacatctccaaaaccaacagatcaaataaagtttcaatctttgtttgatttttggtgaagaaagactaaatttttaatggaatgggtgttattgtataacttaattttgggttttgttgtcaaaattttggtttttgataactgggttttggagatgtgggattgttgttgatgattatggtggtgggtgtgggggtggtcatggtggattgtaccctgtcaaagtcgcaatgggaaggttccctattccaaccacacctccaaccatttaatgggtcaatattattattaagggaaattctagctctaataaaaggatgtttttgtgagaatctaaatttgagaagatttttatttttattttaattctcaatttagttaatttcaaaaagaaaaaagaaagtctcaatttagttaaggtttttatagttatttatttatttatttatttgaggaaaaaagaataatttgaataaaaaaaagcataaatcgaaagagattcaaggaccattacaggcatgagaaactaaagtaagttaggcagaagacttggctaccagactcgagagatctaaagtgagagccactttagctaaagaatatgcaagaatattattagctcgcttataatgagatagaaatgtgagagaaagacttctaaacacgaaaaatatagagactgaattcattagacgcaaacagccagaaaatacacaaatctaagtataccccaatcgcctacaaagaataaggccttacagcacggtcgaaacctccactatatgcagttcaaacatgccattggctggagtagcaacataacaaaagcacatcaccattggaatgagacacaatcgctcccatgccaaaatgcttcctttcagagcaaataccaacatccacaaacaaag

SEQ ID NO: 118591 - DNA, 796 bp, Cannabis sativa
attggaacccctcaattacttccaattacacagttacagtgtaattacatggtcagacaaaaatgccaaattgtgtaatgacacccaattacatacaaatctaattacattgtggctttccaaacgcacccttaattttttgtttttcactttcataaaaaaaattccaaaaaaatattattattactattattatattcatttttacttccagcatcccaacctaagagagagaatgggaacatttggggttggatattgtttttcggtttcaatttgagaaacaaccaacctaaattgagagagcacttggtttttgatccatataatattatttggttttagaaggtttttgacacaaagggtattagagggtatctggttttaaaaagtattttttttcatatattatttggtatatcatatctattgcaattttgagttatattttttatgtgatttattttcattttatatgatttttattttcatttcatatatatttgaaattaaattatagttgtttttttatggtatttatttccattttgatatattaatatatatagttaaatactatttgtttctattttaaagttaaattattttcatttgcaatttgacttgtttctattttcagtgtgaattatttcttttttttttataatatttgtttctatttcttatatacatatataaatatgtggctaaactctatagttgtttttattttttatggcatttatttctatttttaatatatatatatagttaaatactacttgtttttattttg

SEQ ID NO: 118592 - DNA, 606 bp, Cannabis sativa
tggaagacctaagaaaaagaggagaagagaagctgatgagcctcctccaggagcaaaaaggctaggaaaattgggcagatagttagttgtagtaactgtaaagacaagggacactataagaaaacatgcatgcaaaaaattgtgcaggtacatgtattcattattttgacactacttcaagctcagttgttggatttatttgcacacatactttttgtgagtttgtaggtacacgttacaaaaagtatcgaaaggccaccaagcaataatccatctgacgaaacaatcaaaaggagacggagaaggcagaagcaacaacttagggaagaaggtgcatctgctggagtagctggtccaagttcttagttgttgggattttagtgcagtcgtgagtgtagattttttgatgttaatgcagctaaaactatgactttatatagttaatagatacaattcaagtactgtggttttactattacaacaagtattttgatggatacacttaaattagtatggttttgttatcgcaactagtattttgatggataaaattgaagtactatggatttattattgcagctagtattttttgatgttaatgcagct

SEQ ID NO: 118593 - DNA, 1506 bp, Cannabis sativa
  modified_base (1434)..(1472): a, c, t, g, unknown or other
ctgaaagcccttaaaaaccgcctctaaagcccaattttgtagtagtgaattttaggaaatatggatcaaatctacattgactgacagtgttgaaatcaattatagtgggagtcctaattatagggaagggtgtctcaccactactggaggtccttgctcttggagcaccctcattatgcactacctccttgaattagatattgagtcctttagcctcggggaattgtctcctccaatctaccagccattgctcatcagccttcactgtctttagagcttctttagcaataataactatgatggtccccttaaccttgtttaggtcatctcatagagcatcctggaccgtatccttcaaggaaagatgagtcacgtcctataagacctactttttggaggttctcagtggtcacaatcttctctacttccaactatttggatgaaaaggatttgtagaaaattatcctctcttctaactccacagtcaaaggcaattggggaagacattctagcaaatatgaaaaataagaaattagtatatatcaaacaaaatagctccttataggcaagaaataagtatatataaaacatgaaaatatagttgaaacgacgaattaaagaaatacaactcatagacaaagaaacaacatacctgatattgataatggataagttatgttaatcgtcgctggatcaacctgggggagttgatcgcaccttttgcaaagatgagatactagagcaatcaacgaatcaatttctacgtcaaaatctaggctcacgatttcttctactgtaaacgtccggatcactggagatggaaggtgtgggaactgatgtgccttaatcttcaccagcaaatgaaggcaaaaatttacggcgttttctagattgaagaagaaagctttgtttcgaattcaatttgtagttcaggggattccagagatattcgtatgctttaaagggttgaaaaagaaagaaaattggtaaacaaaagttacaaggggtatttatacgcaaaaaggcaatccacatgaagaagagatagaagaccacgatcttctctccataaatgttccatcctaagatcggggagtccaacaatctatgtgcatcctcgcaattaataccctccaaaaccgaggtgtaaatcaatgatgaagacgctcctttattattttttgggccaaaatatgattgcaccttgtcactcacgcgcgactaacacgtggacatatcattatcacagatgaatcagcttccgcggtcgagtggcatttaaaatgtcaaaattttattccttaatttccacatgtccaaattaagagagtgatgtaagctttcaccatgcgcatcaatctagaagcttgaagggtaaatattatccacattttcggtattggacacgtggactctgttgggttttgtgccctnnnnnnnnnnnnnnnnnnnnnnnnnnnnnnnnnnnnnnnataaagatcagaaataacatttttgttgcatggt

SEQ ID NO: 118594 - DNA, 869 bp, Cannabis sativa
  modified_base (27)..(31): a, c, t, g, unknown or other
actaatcagattgtaaagagttttatnnnnngcataaaacccaacaaaaaccacataaggattctcactattgggtagccaaggttcacccaaaactgagattcgtgtaccatccccaatacagaaacgaatacccttgtgtaatagttgttgagcctcacaaacacttcgccaaataaaacttgaattagaaccaagagctgttataagaaaagatccagaaggataatatcgggctttgaggatcctagctaacaatgaattgggtctagtgaggagacgccatccctgtttacccaaaagagtgaggttgaaatctctcaagtcacgaaagcccatacccccaatcgtcttatgtttacacaacttttcccaagaaaaccaatggatactattctgcaacctttttgatgtttgccaccaaaacttattcataagtctctccatgtctcttgtaatatctatagaaagtaaaaatacgctcatagcgtaactaggtagtaattgagccacaaatttaatcaagacttccttacctgcccgagagagaagttttgattcccaaccttgtaatctttttctcaccttgtctttcaaaaaacccaaaaccactaatttttttcttcccattgtcctcggcaagccaagataaaaactaccatcaaccgcttgtggaatagcaagcaagctaataatactatctctcaaagccaaagaaccttttgtcctaaagctgcttcaaacttacaaagaacctcttgaatctttgctgcctcatatgttgtatgatatgtgccgtaagccacaacaaatttactattttttttaattccaatacttgcaattattttagtataatcgtaagtaag

SEQ ID NO: 118595 - DNA, 873 bp, Cannabis sativa
tatctaataaatagaattcctactcctttattagataacaagacaccatacgaattgctatttgataaattgcctgagtatcaacaccttcgctcattcggatgtctggtttttgcatctactttatcaaatcaaagaagcaaattctccccaagagcccgaacttgtgttctaatgggataccctcaaggcatcaaaggatacaaattgtatgatattaacaataaacaaatgtttgtatctcgaaatgtagtgtttcatgaaaacatttttccatttcagaaactcaatactgaagatgccaatatagatcctttcactcatactgtgctccctaattctatgataaataacacccctgtctatgagtatcctacaggtcctagtactgctctcgatcctccaaatcaaagagatgaaaccagtacaattgacaatcaaataagggaagaacctaacgctactgttacaccagcagccccaacgcaactaacaacccaagatcccccaagaagatcaagtagacaacacaaaccaccaagctatctgagagactttgaatgctattctctcatccaggatcactcttctactccacataatattaataaattcatttcatactctaacttatctaaatctcacaaagcattcatttttgcagtatcgtccattaaagaaccgagaacgtattttgaagccatacaaactttagcatggttggaagccatgcaatgcgaattaaaggcgctttcggacaacaaaacttggtctatagttccacttccagccaacaaaagagccataggatgtcgctggatttataaaattaaataccatagtgatgggagcatagaaagactaaaggctcgt

SEQ ID NO: 118596 - DNA, 895 bp, Cannabis sativa
aatctaaagctaaataattagactccacataacaaaaagaaagaacaatgtgtaaagtttgtttgttttatctcttaataaaatattaaagaaactaatatgtaagcttttgattacgataatcttcttcggtgaagataatgttattcttaattctcaaagatttaaggtaatttaaatgttattaagaaaaaaaaaataatctaaaagtatcttaagcaataatccaacataatattacttaaattaaattttgagacaaatttattttttatgtgttatattgtctttaatcttctatgaattatgaagacataataaatacttgtgaggatattaattttatttaaatttaaaagtttttttcaattattttaaattattatatatatatatatattttattttgctttagtgggtacccaatgagtttcccacaacaactaatgtgtattcccttaccccaaatctgctgattactaaacagggatagagcgagaatagatacataaattggtagcaggaataggaattacgctccctgtacattaatcgcctaattttcatctatagtttctatataaatatatctatatttatatatatgggtgtgtgtctctatttaagtaaaaatggtcccaaaatggatactgaataagatgtaaatggtggggatgtgggggcagttgtgggaggggtgtgtaaggctaataataactaaataataagtgatgcctctacatttgtcttattgatgaactgataagtcaaattaataatatagggcccaagcttaattttattagggaaatttcaatttttgaccctaataatacaacctatatcaaaatttatacccctttataatttgtacaaatttagtccattaattaca

SEQ ID NO: 118597 - DNA, 881 bp, Cannabis sativa
  modified_base (829)..(847): a, c, t, g, unknown or other
tctaacttatttttttggaaatatttaagtaaaatatatattacattgtaatgcttacgaacacagagctcgaattcgacattgaatccatatcgtgaaccttgctggactcaaccgtgcaaaccactttattggccttcgagtatcatgcccatcccctgtgtttgacgtatgaaagacctgaaccttcggtcctgcccatccggtcctcctcttcgttggacccagcatcattggctcttttgcatgaatactacgcagtgaacctgaagagtttgcctgacccagtccatgcaagaagcctcgacatcaaaggccatggagattctgcagttgaaggggctcggttagaaactgtaacaaccatctgatgccttgcaccacctcaaagtacttctccggggacattcgtcccttttttgtgctactgtaacttgtgtatatgtagtgcgatagataatggacccaatagggtttagggtctttgacccgtatgagtttcttgaggcctagctcaccgtaagccgttgtggcccatggggctccacctagatctgctggccacagtggtggtttaaagtgacacttgttggaatttattttaccaaaatcttatttactaatcaagtatgttgattataacattatgttacatcctaaatatgttgttatttgtgattctggcaatagacacgtgaaattcaggttgacatcaaaggcccattagtaggcccatcaatgaagataaagtgggccaagcccatttagacaaatcctttcaagaacgtatcccaggttcacgaccatagtgttggattttatgccctannnnnnnnnnnnnnnnnnntaatcagatttgcttattaatatagatcagaaat

SEQ ID NO: 118598 - DNA, 727 bp, Cannabis sativa
ttcttctcgtggagcgtatcagaccacattctacgaaacgtgacttggaattgacaaattgcaccctaaaaactacttgggatgaaaaggcatgatgtccagggtttggattactacttgaagcttctacctagacggtataccctataccgttcaggtagttcgtcccaaactagtcagatttcacttttggtcttcctgaggtgtacctcgtagacttttcatgatgatgtatcgtctctttaattacatggaacataacttagacaaaatattgggcaacattggcctcccaagtcttctgctaaccccaaaaattagcgtttttaatcttcgggattatttgcctaaagataaagagacgagcgagagcgcactcagtcaccctactcacccgatgcatatttctcaaagatggtattcttggatttcaggatatgtccgcacaattccaagactaaccttatgaaccttacaaggatgcatgtgtacatgccttagtgggagatccacgtgcaagcccacatggaggcttcaatgcaaaccaagctttgagtatacttgtgtatgtgtgagtatatgggggagtggtgagacgtgtgtacgagtatatgtgggagtggtgagacgtgtgtgagagtatatggaggagtgtgagacgtgtgtgcgactatatgggagagtggtgagacatgtgtgcgagtatatgggggagtggtgagacgtg

SEQ ID NO: 118599 - DNA, 656 bp, Cannabis sativa
atttaattaattaaacactcacataaccatccaataactattgataagtacttaatttatgttactatttattacaattatttttctctctatgctacacgataaagaagtatgctcctataatatattattacattataaattcagatgaaaaaattattaaaataaagagacacaaacacaagtcactttcgcatataaatctaatatgttgtatgccatttttttctttttttttttttgttattaagttgtttttttcaatgtaactattttagtaatatttttttttaggcctctatgatcatttcacatatgtccaagttaaattaaattagcatatgtttactatattagatcagattctctggtataatattaagatataatacatggcttatatttttttcaaataaaaaaatagtgaatatttaaatttaagttattgaatgaatttgatttaatctaagaatttgtacccagccattaaactttttatctcgtaatgtaagtattgaaaaaacatatgtgaactaaattcggatataaaactgcaatgtttcgataaatattctaaaaattaaactaaaagtcatgacacttttctcaaaaaaaaaataaaaaaaagttatgaaaatgcattatttttattaaaa

SEQ ID NO: 118600 - DNA, 1793 bp, Cannabis sativa
ctatgtggtgcaggtaaaggcaaagaaaagctagatcaatcatgaggtgacactcttctctaacaatgtacatattgaccacactggcctgtgtgccgagttttcaagagttatattgggttgtatctactgtgtatttttattttgtgttttgaattgttgtcgcatatagtcttttgtatatcttttgtaatagagattcctaaacacgtttttttatgtcgttatgatgtatgtttttaatgttttattttagtcgagtttttattattatcacagtttttaataattaattaatctattattatgaaatagtttataaaactacacacatggtgtccctgtgggatagggcattacatcgagtatctagtttgagaagaaaacaacgagaatccagggcatgagtaagataacgaggcaaaagcttctggagatgaggacgcggcaatcgacgagtcgttctcttgagagaaatcaatagtacttttattcagtaattattataggggtacatatacatcctccctagacttcaggaattgaaaaggtcaacaaacaagtactactgataataatattgtatttttttttattttgacatttcaaagctatattttttttatatttttacaaaaatttacataacaactaacggagcaacttaaattgtaactcaaatctacataacaactagcggagcaatccaaactgtgaaaaaaatgttaaaaaatagtatatagggtgattcttttaatatatttgaatgcctaacatttcaagctttatcgtaaactcaatcattaaggtcagataggcaatatgtagttgcgcctatcacctcagcaatttgacagggacattcttaattgctgttacataaactatgggattgacatcataaaattagcctaaattatatgtatacatcttttctctttgtgtacttatcttaattaatgggaaatttacaccccatactgttttttctcattttttttctcttttaatgttacacgacaatgtttacttttatactgtttttctattgttattgtaactgttgtcgtgtatgtgttaacttagcatctataaaacaaattttattattttttaaatttaataaatacatgacgtgactttgttgtgacagctttttttttcttttaaataaaattgtattatattttagagatcacataaatttgtgatttgactttgatagatttttttttatttttctttaataaaaattgatgataaaaaatttgatactctagatattaataccctttcatttcactttaatctcacttcaccattttctctcttcccaccatcatcttcttcttctttttttcactccttgcttcctcaagttctctctatctttctccattcatatataagtttttatttattttttcttgttcatatcttcttcttcatcttcttttcatttttttatttagttttttaaatttttagtcacggtttttgaaaaaataagagttagtgtattttttttttattctgattttccagaattaagcttgcaaatatagcttctattgtatctagtgttgagactgtgcagaaaatagttagtttttttcaatcatttttttattcttttagttttttttatttgttttagtgttgttttacggttgttttccataatttatttttttgccgttgatttcactgttctagctccatctcgctagaattaatgattgttttctgggtgttctcgtggtgttgttgtggttctatccatgggtgtggaa

SEQ ID NO: 118601 - DNA, 836 bp, Cannabis sativa
  modified_base (809)..(809): a, c, t, g, unknown or other
gtcatgaaatggctgtggcggttccctcttgagccaaaagcattgtggcacaaagtagtggcctaacgatatggaattgctgataacttttgggacacgaaaaataactcccgtttgtctcctaaaggtccgtggagagacatttcaaatttgtatgaggaatacctgggtttggtacgattcaaggtcggcaagggagacatgattcggttttgggaagatgtatggttaggtgcctcttctttgagcagtgatctccccgacttagcattgatttctaagttaaggaatgggagcataagggatcatatagtcgatgaaatgtggccaggggatttggtagaaagttggcacctgaaatttagaagaaatgtcctaagattgagaagttccaagtattactttgctgatgcaaaaactggaacatgtaagagtactcgacatagccgaatttggaagcctgatacttcagggatattctcttgcaaattagcttgttgctattttatttcagacacatgttcggatggtctaggttggacaaagattctttggaaaagttgcgtttcaaccaaagtcaaagtgtttgggtggcttaggccttttggaaaggtgcccaaaaacaaatctgtgagggcttaggcacaaagcggacaatattagaccgatagggaaatagatagtgttcgacggtcctaaaaagtaatatcagagctagatcttaaaattagccatgtgaatgcataagagcatgtttggtattgttttttaattttttgttttcaaaaaattgtttttagaaatgagancaaaaaatagtttttgaagtttttgaa

SEQ ID NO: 118602 - DNA, 1399 bp, Cannabis sativa
cgagcacgtattattttactagttattaaataatggttgattattactattataaatattcataactaattaatctatgctactatacctacatattacttggtagaaccacatagttgccgacatcaaaaataaaagttcttatattattgtgtgagaaagaaattatatatatatgtaatgacaataaaataatacaatgctaattactacatatatatattcaaaaataaaatcaatgtatatttaatactaagacttatattgtatcttaagtctctagctgaactataaaaatagagaaatgtgtaaatatggtagtggtgtttaatgctcttttacgtattaatatcgctattggtgcaattaatagtatcggttcccatatagtttaatataataatttttaaaaagtatcgctagccaatcgtaaaacgacattaaaaagtactaagaactattggtgccaacgatactcataaaaatatcaacacattggtctttgaatttaattttttcagaaatcacaccaaactttaaagtttcttgaacacagtagtttggttggcttttatttatttattttattttaaatattatcttttattacattttattaatttttgaaaaaaaataatacgtaaactaatttgggaatcatccctatatacgaccatttagtgtttattttttcacttttacatttttttttcttctctaacattctattcactacaagaaatattattcttgtcagcacatttttatgctgtcaaaaatttggtatagtgctggcaaaataaaatttacttttgatgtattggaaaatgaacgttggtattagaacttttgctagcacaaaatgaaaagtgctagcaaaaatgatttttcctagcacgtaaatacattgataaaagtacttaaacttgcagtttgcgagatgctctagtaaaagttatttttaccagcgcagtagcaaactgtgttgaaaaaggcaaaagtgacatttcttgtagtgacttgagagataatcggagaccacgtacaccaccatcaaagaagtaccattggaaaccaccatcggagagcacaattggagacctaccaccggagacttccaactaaaactaccattggagaccaccatatatctgcgattaataataaaatccattacagtgcttctccatctttgcatccccagctaaacccatatcgcaaccctaaatcccaagtttgcccaaaaattaaaacctaacttgcagtactaaattcccatctaaaccatgtcacaatattctgaaaattgaaacccaattcgcaaccctaaatcaccaataagccatgtaataatattttcatgccatagtcacacctaaatgttgggttttatgcccta

SEQ ID NO: 118603 - DNA, 1145 bp, Cannabis sativa
  modified_base (444)..(447): a, c, t, g, unknown or other
tgtgaaaagagtgtgtgaatacagtgagaaactttactcttttttctctctctctaaaagcaactaaatttgttgatgttctttttctaacgacgcgaaaggaagagcgtgaggaacacggacaatgctttccaataagtgtgatattcacgcgaagctgtgtcgtgggttgtagattttagagctggaggctgggtaagtgtttattaatgttaagtcacatgattatcatgatcttgatcccctaataataattacagaaatctcattataattaggtaaacttacaaaaatactcaaatttgagttaatttttacaaaaatactgtcacacaaaaatattttcaaaaaatattgtatttttataaaacaccagtaaaacacaaagcaggacaactcaaaacaacagtagaacaccagtaaaacaccagtagaacactagtnnnnacttaacacagtatactgcagtataaaacttataaaaaacacagtaaaaaaataaaaaaatatcgcctgacattatttttgtaaaaaaataacaaaagttaatacatcatgtaaattttccttataattataacatgtcatctcataaataataatatttagtgttgtaaatatgaatggaatttttttgatacgatacgaaatcaacacaagccgaaaaagttttagcacgacataatatgaaaaaatatggacttagatatgacaaattgacatgacatgatgctacaaattgacatgacacggcacgaaaaatatatctttaagcatggcacagcaccaacaacacaaaaagtatgacacttaagcacggatggactagcctgaaaagaacgacacgcgacaagtacaaaaagtacgacatgacatattaaaaagaaattatttcacaaatacacacaaaaaaaaaactacataattaagattgtacaaaattttaaatatttttaacaatttttaaaattttatttacaaaaaatatgttcttttaatgtatttttatgttatactcttgataatttgttacttgtatgttatttttgttgttgttttgatgttattttgtattattttcttgttgttttagtgttatttttataaaaaatagtaataatgtaaaaaaaaaaaaaatctttaaa

SEQ ID NO: 118604 - DNA, 1619 bp, Cannabis sativa
ttaaactatatcagactcatacgaatattaaaagagtaagttgaaaaataccatttttattaatcaattaattaaatttacctctaattttatatttaattaaaacatacctgtttgtatatgtattatactcaaaataccctaacacaacacgcagctacacttacttcgaaacggcccctagaatttccaaaaagttttaacatctgtagggaaaaaaaaaaaaaaaaaaccgggagccgctattatattatattattattatttaataagacgcgcagagaggagagaaggcctcgctcgctcgtgtctcatatcatttctctcttttctctctctctctctctctcgttctctcttcgccgcctccaccttccatttcttcttctcttctctccttccttaccgccggtcttaaaaccctaatcatgacctcgccacccacctaaacaccgccacaatagtctctaaattttcaggtatttttattgaattttccttcttaattatatatgtgtatgtatgtttttattatgtatcgaatccctgttttatttggttttggctcaattttgaactctggtgttatcgccgttttggttgattgattgatttatgagttttattaatccagatctgttttgttgctctgaaacggagtaaaggaagtttgattgtcgatttttttttttataattttgtatatatatttttttttaaagtttgaggctcagttgagctgaaattgttgagttttgatgagtgaagtatgaagctaagcgctctttattgagtttttcttctgttttttggtttttgcttattaacaagcattgcagagcttcttttatgctaaattatgcttttttttttttttgtatatatttttcacttttttagctctggtttcgcatctgaatcctttgaattcacttttcttaaacgattttatttattttttattttgaatttcattgtttgcaatttttttcttcccaaaacaaatgtatagattttacagtttgtcatatcttcgaacaaaatgcagtgtattgaacttttttttattggaaattccgtcaaatttcaagtcttttactttctttgatttccgtgaaaattgaggattaagaagaaagaagaaacctttgtacttattttaccatattgattcttagaaattgtttttaattgtgtttctagagcttttgataatttttgtcaaactttagtcacatatttttacatccacatcatttgacggaagtatctatacaattttgcttctgtaaccagagatttgttatcttgtgcgtcaatagttactttcaaacatagtatgctttgtcttattttggtttctaagacatgtagtcagttcaaacgatgtaattgtcctgaactagtatggacccagtttggacggtatgatttgatgatttaaagtacgaatctatattttgttgggtcggagttcattgtttgattttttgtgtcaatagtggttaaaaaaaaaagtggttctagactgaattaattccagcaaccaacacattttcgtatgttttataatttataattttaattttagacggataccttctctctctctctctctc

SEQ ID NO: 118605 - DNA, 4500 bp, Cannabis sativa
ggggaggagatataggacatgttctatcctccctaactgtctcttgggccattatgacacccgagacaatctgctgaatgggcttggtgcaccttcggtactaggactagatcatgtcctagaacagtctcccgtgccaaagatattggattcgaagccaccttagacaaagtgggtttcaccaacttctgctctttctagtaagacctttgacaaggtcattaccagttgccttgttgggggtgtttgttgcgagatccctcgcaagaactgtagggtgcacaggtaccattcgggctggttggcatagtcaaggcaccacataaaacatggggcgatgttgccgcttcatcattacttcttagacgtcgtagcctattttgggatgtgcccaacacagctcatgccgaagagcactaaatatctgtcggcaatgtttgttttgtacagggagcttggttggcctccacctaccccttatgagattgggtacttttttgagttgaagtctgggctgaagtagagcagaaccggctatttttattttagccaacttggtcatcaatggctagtgacaacaactgcaaggccatgtcaaaagtaggcaagtatgccaaaagatactttgtggcacaaggcctttgcagaattgtgcaccacgagttttagttggtgccgctctttggacattccatctctactttggagataagggatagagcgaatcacatccttttggacaacttttggatgcatggcttgtaccccctactcctggggttgcaagagtgccgattgctggtgtggcctaccatagagatgggcaaggccctgacttggatgatgaagaagcacctttgtcttgtattatacagaatctggagaggagagagagagctctccataggcgcctgtcctgtgggggtcaaggtagcgaagcctctcttcgtatcaagcctagaggctcagtttctgatcgacctacatgccctgtacccacaactagggtcaaaagcaaagctatagttgtgagctctgatagctcttcttctaatgatgatggtatttgatagtttataacaccatacttttattcttttgttgaatatttttgaatgcattctgactttgctactttctttttgtaggcatgtcttccaggatgagaggtctcacaggtgggccttcagaggagcctaccggtcgagtgagggccaaggtggcctggacctctagcagtgtagatgctagtggaccatcactgcctccacctccactagggcctgcacctgccgggcagcctaccgaccaaggtaccaggaggccccgtagaggagtgggatcagctactggtaaaaaggttgctgagtcagccactcaacgtatagagagagctatccctatcttggatgaggcattgcaggagttgggtgagattgtgcttgacaggttgtacggagacttagggaccctttctctggtgagttatacttccagctttgttcatctctttggcgctgtataagctggacggtaatggtgttgtttacatgtggctatcggctttgggcatccatacagggttctggctatccatggtagtccaaataagggactgggcagccagaattgactgtttgataatgacattattttgctttgatgaagcagagttcggcccgcgaccactatcgagggtcttcagacgctttccaagagcgtgtgaaggtcttggaggaatctgttgccgcaaagaataaagccaatgctgagctggaggtccttctagcagagaagtaaagaatggtctctagattggagactatgctgagtgccagaaacactgagaacaccaactaaaccgctctcatctctgggttacagactaatcttgaaaaacacaagaaaatgttacaggaggctcttgatggccagcaagccattaaggaatattaccttaattttcctccgaacttacttacgagttttttatacacaaccctaaagttgagttgtcatacatgggcagtctcgcctttgtggagagaacactgacccatgggagggcattgttcgagagctagatggagatggacaagaccactacttatcaacaggggtcatcatcaggtacccgtgatgaggtgttggccgacttaccagtggaggaggtggccggctaggatgttgcccaccaggccagccaacatggtgatgatggggctggcctggactctgcagatctcgacttggcggctccaagttcaactcctgctgtccctacacaaatgtagatagaatttttattagcattcagcattacatttgtattatatagactctattttcatgttctgcatagcctgtggcttttttagggcctgtggcatcttagcttcggaacactactcattttgcgttccatgtggcctatgtcctatgcggcctggagcctttttagaacaatattttcatgtcctatgtggcctggagtctttttagaacattattttcaagtcctatgtggcctgagtcttgtcgaagaaggcttatcgaggtgcataatcctagatcgacgaagatgagtcttgttaataagtgttttgacctctcttgaatatccagtgttaaagacggtgttgaagaatcaacaattaagactaggggtagtgtttcttggttctctcgctcgtgaatgcgaagaagaagatgaatgcactaatcaatatggtggctcattcaccaaaagtcgattgtcatccttttctctttgaaaatttgaactcaattcaaaatttgggcaaaagtcataaatgggccattttcacaatatttatatataaagctggctatccgtatgactccagatcaatggtcaagattatatccaagaaaacacacgatatattcaacggtctgggaaagctgtcagtcatgcatttaatgagatgcttggaactaagatatctaaattatgatattctcctccagatgcgcgctcatgtaatcaaccaccattttgccaagccatactacattcattccattaaggaaattaatctcgatgagctgaaaaataattccatgtgtcattttatttgaaaaaacaagaagctgtcaacaacaaaaagtttggtttttcattcagaaggttcctccttttagcctctacttctcctcacatcatttgggaggaagaatgcaagcttccataacccaagagttctgaaagcttgggggttaaatgttattcatgtttcctaatggggacacgtgtaattctaaaaaggttatatcaagttacttcaagcctaacaacatgcccaatcgagataatgcaatagattcattaagttagctctttcggatgatggacagatgacttgtccgagcgatattaccctctagcatagcgtgtattcaaaaggagtcattcaggttttctagagaagtaaatagcgagcattcagatatccatctccatatcatactcattaattactaaatcccacgatatcatgactcattttccaagatctcatctaatgattatatcttcccaatatgaaaagatagtaattaacgatcaaacatttaatgtgtctttatttttcatgaaagtaggacacgattttgacaactaccaaatgatgtggcatccatatcagtatacaattagcgcctcatgggccgggctccaccatatgggcccaagtcaatatattattggtatttaccccatccgtgggaacattgtaatgagaaaaaattctagcactataaatataagaaaacctactcatgcaaaggcttaaaatctcattcctcaattgctccggaaaattctagggttcaaacacttgtgtaaatcataaggcttttccagtcttatagtagtaatactgatttgtaaaataaggcttgttaataccccaatcacgtaaaacctttgattttattttatttactatttatctatttctttacctttcacatagtttaaatttgtatctgaaaatcttggtaaacactacgtaaccaagcccctaataagaagatccaaaatttactaagttaatttcctagcttattaatttctcctgactatccactatagattcagaaccacactcttgattataagaacactctatatactaaatatcgatactctatcaattattcattgtttcaatctaaagagtcattcatactctatggtagtttacatcaagtagggacaaatttaccgttttacccttcaatatattttatccttaaaacacttagctccttgaaatgatattttagtaaactaatataattaccgaaattagcgctctctcatttatcacatttagtgaagctcaaaggaagccatcgtttcacttctaaatagttatagacgctatagattctattgttaagaacactgtaaaacttaatgtagccctaattaattcatgagaattaaacaatagaattatagattagcggaag

SEQ ID NO: 118606 - DNA, 16162 bp, Cannabis sativa
atcggcttcaaatatttcttagtttttattgattccttttgacaggaatctatttgagtagaagtttcattttaatgagtctgtttttatgttatttcgtattgtaaaatgcccttgtttgtgggattttttattttctcacgaaaggtaattaaaagaaagtatagaatgaatttctgcctatgtctagatctcgaataaatggaaattttattgataagaccttttcaattgtagccaatatcttattacgaataattccgacaacttcgggcgagaaagaggcattcgcctattatcgagatggtgcgatttgattattattttttttttattgaatttagttatttatatcttttattttcttagtcttaggagaaagacgcattattattatttgggatagaaagaaaaaaattatttttaaaaatctacgcttgttaaaggtgaagtttgtaaataaaacaagcccttctgtcgtgtatccccgattaatgcagcctcaaatgcttcaatcgtcgattctagagtattgagcgaaaggttaagacctatgggttaggtcaaacctactcgcctagtaccaataggaggcacagaggaagaggcactactgctaggaatcaacaacacgaaaactttgttataaattatcccttttccttattaagatcggggctaacaagaatggttgggacaacaaacatccatctcgttcgtgttttggatacccgtataatcatcgaagactgttgaagtgactaattcctgaaaattaagaggcgtttaagacaaagaaattgctggagtcaccctttttttatctagtactaacatacttgatgttaaagaaagatcttttccaagaaggttggctagagatttcttgtaaaaacactagcccctctcagtttataatgagaatatttccattttttggattccatgtattatttttattatgtacataaaggaggagccgtatgagatgaaaatctcatgtacggttctgaaacggagattcattgaatcgaatgacgaccgtaacggatgtcggctcaatccgaaggaaattatgcagaagctttacagaattattatgaagctatgcgactagaaattgatccctatgatcgaagttatatactctataacataggccttatccacacaagaaacggagaacatacgaaagctttggaatattattttcgtgccctagagcgaaatccattcttaccacaagcttttaataatatggccgtgatctgtcattacgtgcgactatctccactatagaaataaaaagtgaaaagaaaaaaaagagtgaatccattaataaatactcgaaaaaaaaaaaataggttttctacatatgtatcgtctaaaacaacgatttttatcagctgtagcaaagaaataaacttcatagaatttgaaaaatgaatctgaagaaataggtatgcctagatactttattctatggataaaagatctaattgatagaggaagcaccgtaaagatcaattcgcgaggttttgggccgatacaataagaactgcttatttatgtcatgatatgacataaaagttaggaatcaacttatgtaatagagtggatcccctaaggtattgagcagcggtgtagcatcagatcccaaagatagtaagccttttccttcttataattttaagaattataaaggaaagtctttttcaaggattctatataaatttatatatgaaaccgagatagttacctttttataaaactctaatgatagtggaaatgcctatactttatgaaggtgggagaaaagagaaaactgattaaattattgactaaattagtaagcaaaattcaagtttgaaactcataacctctttcttttggttaactctagaaaaaaaaaatgggataaatccatgaaaaatcccattcaatttgataaagggacaccaaaagaacttgactgctgagccgtatgaggtcggaaactctcaagtacggttctaagggaaggaatttatccgcctattccgaccggggagaacaagccattcggcaaggagattcagaaattgcggaggcttggttcgatcaagctgccgaatattggaaacaagctctagcgcttactcctggtaattatattgaagcgcagaattggttgaagattacaaggcgtttcgaataagaacacttttttattattttttttattattataactaaatagaatattatttagtttcggatttttttctatttgttataatcatatatttgttataattaattgattgttgtctctatcaatcaaataaaaggatcgtttctatggaaagaaccaattacaaaatttcattatatcccttctaaaatcgttctatttcgtctggtatttcgtagggataaacgatatacagataaaatagagaatatatttcttttctgctattaaaactaataaaaaataaaagagaccttcgaatgactaaatagcaatcaacactgggatgtctcttagtaaaacataaagtagctacctgtaggaacttcgaattgagatatgaatacactaggttacccaaaaagaaatcggcatcaattcaaaacccagaacagaataaagttttataagattaaaaaggtccgttaagcgcctcacgactatgtcataatagatccgaacacttgccccggatcgacttccagatcataattgctctagtgaataactaaagaaaatagatagatgggagatagaagataaaaaacaacgtctaaatatctctcagaggttcactaattacttaactattggcgggtctctttgtatgtgttgtccggaaagaggaggactcaatgattattcgttcgccggaaccagaagtgaaaattttggtagatagggatcccgtaaaaacttcttttgaggaatgggccagaccgggtcatttctcaagaacaatagctaaggggcctgatactaccacttggatctggaacctacacgccgatgctcacgatttcgatagccataccagtgatttggaggagatctctcgaaaagtatttagtgcccatttcggtcaactctccatcatttttctttggctgagtggtatgtatttccacggtgctcgtttttccaattatgaagcatggctaagcgatcctactcacattggacctagcgctcaggtggtttggccaatagtgggtcaagaaatattgaatggcgatgtaggcgggggtttccgaggaatacaaataacctctggtttttttcagctttggcgagcgtctggaataactagtgaattacaactctattgtactgcaattggtgcattggtttttgcagccttaatgctttttgccggttggtttcattatcacaaagctgctccaaaattggcttggttccaagatgtagaatctatgttgaatcaccatttagcaggactacttggacttgggtctctttcttgggcgggacatcaagtacatgtatctttaccgattaatcaatttctaaatgctggagtagatcctaaagagattccacttcctcatgaatttatcttgaatcgtgatcttttggctcaactttatcccagttttgctgagggagcaaccccatttttcaccttgaattggtcaaaatatgcggaatttcttacttttcgtggaggattagatccagtaactgggggtctctggctgaccgatattgcacaccatcatttagctattgcaattctttttctggtagcgggtcacatgtataggaccaactggggcattggtcatggcataaaagatattttagaggctcataaaggtccatttaccggtcagggccataaaggcctatatgagatcctaacaacgtcatggcatgctcaattatctcttaacttagctatgctgggctctttaaccattgttgtagctcatcatatgtattcgatgcccccttatccatatctagccactgactatggcacacaactttcattgttcacacatcacatgtggattggtggatttcttatagttggtgctgctgcgcatgcagccatttttatggtaagagactatgatccaaccactcgatacaatgatctattagatcgtgtccttaggcatcgcgatgcaatcatatcacatctcaactgggtatgtatatttttaggctttcacagttttggtttgtatattcataatgatactatgagcgctttagggcgtccccaagatatgttttcagataccgctatacaattacaacccgtctttgctcaatggatacaaaacacccatactttagcacctggcgcaacagcccctggtgcaacaacaagtaccagtttgacttggggaggtggtgatttagtggctgtgggcggcaaagttgctttgttacctattccattaggaaccgcagattttttggtccatcacattcatgcatttacgattcatgtgacggtattgatacttctgaaaggtgttctatttgctcgtagctcgcgtttgataccagataaagcaaatcttggttttcgtttcccttgtgatggacctggaagaggggggacatgtcaagtatccgcttgggatcatgtcttcttagggctattctggatgtataattcaatttcagtcgtaatattccatttcagttggaaaatgcagtcagacgtttggggtagtataagtgatcaaggggtggtaactcatatcacgggaggaaactttgcgcagagttccactactattaatgggtggcttcgcgatttcttatgggcacaggcatcccaggtaattcagtcctatggttcttcattatctgcatatggcctttttttcctaggtgcccattttgtatgggcttttagtctaatgtttctcttcagcgggcgtggttattggcaagaacttattgaatccatcgtttgggctcataataaattaaaggttgctcctgctactcagcctagagccttgagcattgtccaaggacgtgctgtaggagtaacccattaccttctgggtggaattgccacaacatgggcattcttcttagcaagaattattgcagtaggataatggctaggaggatttgaaaggcattatggcattacgatttccaaggtttagccaaggcttagctcaggaccccactactcgtcgtatttggtttggtattgctaccgcacatgacttcgagagtcatgatgatattactgaagaacgtctttatcagaatatttttgcctctcattttgggcaattagcaataatttttttgtggacttcaggaaatctgtttcatgtagcttggcaaggaaactttgaggcatgggtacaagatcctttacatgtaagacctattgctcatgcaatttgggatcctcattttggccaaccagctgtggaagcttttactcgagggggtgctcttggcccagtgaatatcgcctattcgggtgtttatcagtggtggtatacaatcggtttacgtactaatggagatctgtataatggagctctttttttattatttctttcggtcatatctttagtagcgggttggttacacctacaaccgaaatggaaaccgagcgtttcgtggtttaaaaatgccgaatctcgtcttaatcatcatttgtcaggactattcggagtaagctccttggcttggacaggacatttagttcatgtcgctattcctggatccaggggggaatccgttcgatggaataatttcttagacgtattgccgcatccccaaggattaggcccactttttacaggtcagtggaatctttatgctcaaaaccctgattcaagtagtcatttatttggcacctcccaaggagcaggaacttctattctaactcttctcgggggattccatccacaaacgcaaagtttatggctgactgatattgctcatcatcatttagctattgcatttatttttcttattgctggtcatatgtatagaacgaatttcgggattgggcacagtataaaaaatcttttagaagcacatattcctccgggggggcgattgggacgtggacataaaggtctttatgacacaatcaataattcaattcattttcaattaggtcttgctctagcctctttgggggttattacttccttggttgctcaacacatgtactctttacctgcttatgcattcatagcacaagactttactactcaagctgctttatatactcatcaccaatacattgcaggattcattatgacaggagcttttgctcatggagctatattttttattagagattacaatccggaacaaaatgaggataatgtattggcaagaatgttagaccataaagaagctatcatatcccatttaagttgggcaagcctctttctagggttccatactttgggactttatgttcataatgatgtcatgcttgcttttggtactccggaaaaacaaatcttgatcgaacctatatttgcccaatggatacaatctgctcatggtaaaacttcatatgggttcgatgtacttttatcttcaacgaatggtccagcgttcaatgcgggtcgaagcatatggttgccaggttggttaaatgctattaatgaaaatagtaactcactattcttaacaataggacctggagacttcttggttcatcatgctattgctctaggtttacatacaactacattgatcttagtaaaaggggctttagatgcacgtggttccaagttaatgccagataaaaaggattttggttacagttttccttgtgatggtccgggacgaggcggtacttgtgatatttcggcttgggatgctttttatttggcggttttctggatgttaaataccattggatgggttactttttattggcattggaagcacatcacattatggcagggtaacgtttcacagtttaatgagtcttccacttatttgatgggatggttaagagattatctatggttaaactcttcacaacttatcaacggatataaccccttcgggatgaatagtttatcggtctgggcgtggatgttcttatttggacatcttgtttgggctactggatttatgttcttaatctcctggcgtggatattggcaggaattgattgaaactttagcatgggctcatgaacgaacacctttggctaatttgattcgatggagagataaaccagtggctctttccattgttcaagcaagattggtcgggttagcccacttttctgtaggttatatattcacttatgcggctttcttgattgcctctacatcgggaaaatttggttaattctttcttggattctatcattgaaactaataggaattgaatcattatggcaagaaaaagtttgattcagagggagaagaagaggcaaaaattggaacaaaaatatcattcgattcggggatcctcaaaaaaagaaataagaaaagttccgtcgttgagtgagaaatggcaaattcatggaaagttacaatccctaccacgtaatagtgcacctacacgacttcatcgacgttgttttttgactggaagaccaagagctaactatcgagactttgggctatccggacacatacttcgtgaaatggttcatgcatgtttgttgcccggagcaacaagatccagttggtaaggatttaaatatcccttaattttcatttttctatttatttctatgatcatctatcatagagggcccctttaccattctgtacaaatgggctattctatttgtacataagggtaaagtggcccattcaatccttgtttgccccctagttcccatttcttctcttcagcgcggggtagagcagcttggtagctcgcaaggctcataaccttgaggtcacgggttcaaatcccgtctccgcaaaatttttttgacaaaaaaatggagtttgattctgttaattaattaattaatgttttcccttttgggtgggaggaaagaaccaatatactatcctaatcaactatatttaatcctttatcctattaaattaaatacattaaccccattatccagggcggatagcgggaatcgaacccgcgtcttctccttggcaaagagaaattttaccattcaactatatccgcacttgtttttgttcgtgatacccaagtatggatcatattttggcagagcgaagccaaatactctctatttattatttctatttataatttctatatatttgtatgtacaactttagtttagtacatttttttattccatttcaacgatttctataattaatataatgtattataatacataatgcatagtattataatacataatgcatagtattataatacataatacttatttattacatatataaattacatgtataaattttgaatttgcaaaatttgacaaaataaagacacaaatcaaataagtttgacccctcccgttaatttttagaatttttttttgttatttgcattttgggaacttctaacttatcttatattgtattgaatttgaacgtgtctcataacctgaaagaattcggggaggggtcgtttttggacctagaacgaccaggttcaagagataagagaattaaggatacctaccagaaagactaatccaatccataatgatgtaccggaaaatacaacatttttattacccgaccaaccatcaggagaagcaaatacaacgggtacactaatcagtaagattgatgaagtagcaattaatgcaaaaacagccaattggaaagcaatagtcatgtttctaatcctccaatttaccaataaaagaattatataccatttgatctctttatcagccaaaaaattgtcaaaaaaaaaatgcatcgaggacactttttttactttacaaaagggaacgctagatcatgcatctatatatatagatagctagatctatagattcatactcgatatatttctataatatactaaaggtatcaacttatatcgctatgtcttattcaatgaaaaaaaataaaatagaaattatctttcggagagatggccgagtggttgatagctccggtcttgaaaaccggtatagtccaaaacaaaggactatcgagggttcgaatccctctctctcctttttcttggtgaatagattagtttcgttagtttattgatttcagtattataagtggaatggctcggctattccacttagccgagccagaaaaaaaaatagattagatataaaaagaaagaaaaaaggaagactttaaaaatattaccgactcgcccaacttactaacttacttaataagtagggtggaatcaaattgattcctacttcaagcattgggtctcctgtcttaattaagaggagtcatgaaaagaacaggttctaaatcacgatcaattcctttttcaaatcccgctgcagctgcacgagcccttcccgcgtgccataaatgacctacgaataggaagaaccctagaacaaaatgagaagtagctaaccaacttctaggagagacataatttactgcattgatctcggtagctacaccacccacggaatttaaagaacctaaaggagcatgagtcatatattccgcagaacgccgttcttgccaaggctgtatgtcttttttcagcctactcaagtccaaaccgttgggaccccttagaggttctaaccagggagctcgtagatcccaaaaacgcatagtttcccctccaaaaataacttcccctgtcggtgaacgcattagatatttacctaaaccggtaggtccttgagcggatcccacgttagccccaagacgttggtctctaactagaaaagtaaatgcttgagcttgagaagcttctggaccagtgggcccgtaaaactcactaggataagcggtattattgaaccagacaaagcaacaagcaataaaaccaaaaactgataaagcacctaaactataagacaagtaagcctctccagaccatacaagtgcacgacgagcccatgcaaagggtttggttaagatatgccagattccaccaagtatacaaatggaacctaaccatacatgtcctccaattatatcttccaaatcgtccacactaacaatccacccctctccaccaaagggagatttgagtaaataaccaaatacaatacttggactaagggtcaaattggtaatttttcttacatctcctccccccggagcccaggtatcatatacacccccaaaataaagagccttaaagactagaagaaaagcacctatacctaacaaaattaagtgaatacccaaaattgtagtcattttatttctatctttccatacataaccgaagaatggaaaagattcttcaagagtttcaggtcccagaagtgcatgataaataccgccaaagcccaatactgcagaggaaattaagtgaagtactccagacacaaagtatggaaaggtatctagaacttccccgccgggccctaccccccaacctagagtagctaggtggggaagtaaaattaagccctgttcatacataggcttctctgggacgaaatgagccacttcaaataggttcattgctccggcccagaatacgattaatccggcatgagctacatgagcccccagcagtttaccggataaattgataagtcgggcattcccggcccaccaagcgaaaccggtggtttcttggtcacgaccagctaaagctaaagttccattaaagagcgtttccacggggtagaacctcctcagggaatataaggttttcatgaggctgatcttgagccgccatccaagcacgaataccctcgtttaagagaatatttttggtgtagaaagtctcaaattcaggatcttccgctgcacggatttcctgagaaacaaagtcatacgcacgtagattcaaagccagaccgactactccaagagcactcatccataaaccggttactggtacaaataacataaagaaatgtaaccaacgtttattggaaaaagcaaccccaaatatttgggaccaaaagcggttagcggtgaccattgaataagtttcttcagcttgagttgggttaaaagcacggaatgtatttgcaccatcaccatcttcaaataaagtgttttctacggtagcaccatgaatagcacatagcaaagcagcgcccaagacccctgcaactcccatcatatgaaatgggttcaatgtccaattatgaaacccttggaaaaagaggatgaatcgaaatatagctgctacaccaaaactaggcgcaaagaaccaaccagactgacctagcggataaatcaggaatacagaaacaaaaacagcaattggaccggagaatgcgattgcattataaggtcgcaattgaacagatcgagcaagttcaaattgacgtaacatgaaacctattagtgcgaaagcgccgtggagagcaacaaaagtccacagaccgcctaattgacaccaacgagtaaaatctccctgtgcttcaggaccccaaagtaacaacaaagagtgtgctaaactattagcaggagtagaaactgcggcagttaagaagttgcatccttccaaataggaacttgctaatccatgggtataccatgaagttacaaaggttgtacccgtgaaccaaccccctaaagagaaataggcacaaggaaagagcaatagaccggaccaacctacaaaaacgaaacggtccctccgtaaccagtcatccataatatcaaataaatcattttcgtctttggtaaatttaccaagagctatagtcatagtgatcctcctatttaactacttcaaccatttcagtttcgaacactcgatttcgttttcagagtggttgaggcttctattatttttgtatgatattttttttcgaatgggtttctaatataaaaaaaattattggtctgtaacccgaccaagttaactcaattcggttatcctttcctattcttaataagcatttgaaccatgaattgtcttattattcatcaattctctatctgattttttttgaaagaactgctcaaaaaagaagtgtgatcccccttctcgctaccgatagatccctgatccctagacatattcctcttgttccatcacctaatcttatttcttattcccgactcccgttgggaaatttttgaatttttatgtatttttcgaatttagatgtgtattaaagtattatatattttattactttatagtttactctttcattttcttttaaatttcaaaatttcctattattaaattcactacaatattcaatttcaatctaataaataatattaaataaaataatagtaaactataactgaaagcctctttctcacacccattttacatcacattgtctggaataaaaatagttaaaacgtctcttattagaataaacccttttttgtaaaggaggggaatagtaatttattcctcgaaaacatctaggaaaaagaagatttaatcggcaatatcgacagattcccgcgtagtcaaaagaaatatgaaaaaaaaagccccactgttccaacgttgaatttgaatatttatttgaatatcagaatagtggatatatttctgattcaatgggttaggtccacttacttttttctttttttaatttctaattgatttgattgcaataatagaaaataggaatatttggagattcaagtagacaacttgttttttttatcaactgaatattattcattatacattataatataataaacataataccaaatgttcaaccttataactagaattactatactaattagtatagtagatatagtataattcaataaaaattttatttttctattaatttaattaataaaatagaaatattgtttgctacttttttattttatttcaaatatcaacaatatctctattcttccttcaactatgaatactcccacgggagttttatgaaaaaaccaaagccccttatcggatttgaaccgatgacttacgccttaccatggcgttactctaccactgagttaaaagggcctgtttgattcaattcctgaataagccactagtcactatgtccttgtttaagtgtatatccatattatatattatatgtatataaatacatcgtatacgttataatatattttcaatatatagcggttcactcaggaatgcgcaatttgatttacataatcagttacgtaatcagtatagggtatactttaaagtataaatgagaagtaaaaaaaagtttattgatattggatttgataaatatcaatgcaatgaattgtttgaagccagatcctatcctaattgacatcataacgaaattcatttgattgatacatgtacctacttcaacctagatcaaaaatatttcctcgaatcattaataaagcgatttggcttgtcccccaatacaaaattattaatttttagagaaaaaattttttaaatttaagaaaaataaagaaaatatatttagttatggaattatagaatgtcgatgaaaatgaacgagtcatgaatagaaataatcaaaaattctatataatcgtgaagaaagatcctttgcattgagccatacgcttccattatattgacaatttcaaaaaactattcatactatgatcatagtatcatggcggtcgggcaagtatgcccccatcgtctagcggtttaggacatctctctttcaaggaggcagcggggattcgacttcccctgggggtagggtactacgaaaggaagttgatcgtggattatcactaagcctggattgattcttcccgggtcgatgcccgagcggttaatggggacggactgtaaattcgttggcaatatgtctacgctggttcaaatccagctcggcccaataattcgccgatctgccatgaaatgataaatcatttgttcttctccataaatgctcgataccaatcgaaaaaatcaaatagaaaatttttctattctgatatatcttatccttaccgttatcgctatttatttactctattttatttactctatttctttatttctttttttttcaacaagttttgatcttatcttgctaatcttgctaatgatctagattcctatcaagatctggaaatgtaaagtctaaggaaaaaaggaaagaaaaaatttttcattgaaagaatgaaatcataaaaatatatattgtagactgtacattttattatgttatttcctggggattgtagttcaattggtcagagcaccgccctgtcaaggcggaagctgcgggttcgagccccgtcagtcccgatagatccaaatccaataaaaaaatagagcaataaatccttccattttttgtgaaagggagtacaaacaggaggatttaattcccatttaattcccaacaggaataccttttctttttatttttttaatttcttctattgtttgtttgggtttgtttacaaccaatgtaagtgtaaaggtgattagatgatacttcatcttttgattgtacaaagagggcgataggttatagaaaagaacgggtggaaaagaatgaaaaatagaaataacaagagagcaaagtaatttttgatcgtaattgtatcaggaatttacttttgaattcggtatggataaaagatcctcctatgttatactattcaattcttgacgatgaatcgatttgtcagatattgttattcatgatattgatccgatttgattacatcgaaatgtaattcatcccgttgaatttacacacaaaatatttatcatctctatgggattaaatcccgagttatttcgaattaaagaaaaaagaaacgatgaaattatggaagtaaatattctcgcatttattgctactgcactgttcattctagttcctactgcttttttacttataatatacgtaaaaacagtaagtcaaagtgattaatttgaattaaacttgtgaatttttagttcttatcaatgattgaagagaagaaatacaataaaaaggatttcaatttcgtgttttaaatgaaatgagggaactagaattagcagtattctatgagatactatctagtatggtagaaaaaatatttttctaccatactatactagtattgttattgtactctataaagtttgctctatgaagatagagattaatttaatatatatattaatttaatatatatcaatcgacattattatctttatatctctagaatagatatcaattccatatataatgtagatagtagtatgtttcaattctatttctttgtctttgcttcagctatttgatttgtcttgattccaatcaatctgaaatggccgcaagactgctcttactcctacgattctaattcctagaatttcttattctttttcattttaaatttgcattatatgtccgatattcatcgaaagaaagaatcaaataaatgaaggaaaaaagaagggtttggggataatataataaaagaaaatcaagtaattttcttgttcttattccacgaagaagtaattgattgagcagttgacagaagatccagaaaaaagtaaaaagggttttgttcttccttattgtccatatagaaaatttatgaataattcgattagaataattttctgaccgtttgtagtccttttacttcctgaaatacgaacataggaataattgcaatatttgtttgattgaaagagttcctatattatttatagaatacattaatttactagaatcctatacaatagaatttcgaaatgaaaatattttcaaatttcattttaaaatagaaatcgtgacataataaaaaataataaaggctttgcccaacaaaacgatctataaaaaaattgaaagagttttattcctaaactcaattagtaatacttctagagcccacttcttccccatactacgagtgaaagggaaaatgtaaagactaccattaaagcagcccaagcgagacttactatatccatggaaattatgtcctcgatttctaggaaggaattattcaattattgttcactaataatagtagaatcaccggtgcagagtcaaaaggggattttgatccaagaccattgataaaacaataaatccaattaagttcttaataattagaa

SEQ ID NO: 118607 - DNA, 1876 bp, Cannabis sativa
tttataaaaacacagtatttttaaaaaaaaaatcgtgtgacagtatttttgtaaaagttaatctaaattacagtatttttgtaagttccccttaaattatagttcaccattagttatactttattagtccaataacctagataaccccttaggtgatgtttaattttttttaattatatataaataaatcatatatattctttaatgataactaagtaataaaattatattaaattttaattatactaattttcaatataatttttctttgaataattatttgagaagctagtgtattaaatttttacttctaacactttttaattagattgaaaaaataaagtacaaaataaataaattaataatttacatctttttcatggttaatttttattttcttaaaattacaatattgattatttgttggtttagtgtgaatattttaattttatttgtaaaaaatattaaattttaaaaataactttgtatacagttatacagatacttatgctttttttttaattttaattcaataaggtttaattatgatatattttttaaaaattaaaaaaattattattgactgagtttttcgataaccactaattagagttgtgcgaagcaattaatgaatgttaaaaaataaaatttttacgtggttggggcattaataagccttagtccacgagtcactgtatttatgagtatatattatagagaatttttttcgacccccttttctgtacattattgggatattcataagttcattgtggtggtaaaaatatcactattatcgtgtttgtttgaaccatactttgcacaattttctaaatcttatcttagggcatgatcacctacttttatgatgtatttggactatctataggtgttttgtgagattttgacttatctcttatttatgacttgacagatcatttatgcagtcgtcaattgatgtgtggaatctatgagtttgaacccttaagcacgtatgttcagcgtaaggtgatggatggtcttccccatgttgtattaaatgtgtatacagtgttttcagcctcaagtagtgtgtataatttgcatgctctcgcgtaccgttcttcgggtcaaatttacttacgaaaaaatatgggaggtaaggaatactcgttgtctaatcaacacttcccaaagaagactaatatgtaattatcctcttgtgatatcaagctccgggagtgagtaagatggcgtgtcctatagcacggatctcattgccacctagctttctcttaaactgctaaatattttgggagaaattctaagtaacacttttctaaagtgatctaaattttatatttttataatgtgaaaataagtggtttagagcaatttaattaaatagttatcataattaaatttaaactataaatatttgttgaaatatatttaaactagtaaataagcccgccacgttgcgcggtttttataattatatatttttttaattaccaaaaatgcataataatagttaaataattaatatattattagatttttagtttaatatttttggttaaaatgacaaattgtatgtaatatcaatactttaaaaattggctatagaatgtatatctaactacttgactaaaattttgagaaaagaatgttagacttaatttgttgtacatttttttttaatatatgatacaaaatttatagatagaaattttatttgtgtagattaatttttaagaaaattacattctccttttctatttttaaattatgaataagtgaatttcaaactgttgaccgaggttttcggcaaccaataaaataataaaagattaaagagctgtaagaaattaagagaaagatttttacgtggttg

SEQ ID NO: 118608 - DNA, 724 bp, Cannabis sativa
ctacaatttcaaggataaaatatttgtatatatagctagggtttgaaaattcatagattgaaacatgaattgtatacaaagcaccttttgactttggttttttctactttcggtgaataaataaagaattaataataggagaatatttattttatgagttagttattaaaagatcgtatagcatgcctttggtccatgcatgcatatttaattacttcaaacaaactcacgtgcttttctattgtcgactaacattttaattatttaacaatttgtaatttattaattatttaattttttgaaagaattgtaatttttatttatttgatgagatcgataaaagaggaagaattttctatttgcaataagtatatattgtcatgtaaaaatattattaggattataaaccctaaatgtaaataaccctaattaaaaagaaaatataaaataattattataaataacaagacaagacaagacaagacatgaaattttataaaagtactcacattagaagacgtattaaatacaacatttttacaattcttttttcttcgaaaaaacagaaatatcggtaaatttgataaacattaaaaaaaaaaaaaccttattattagtgggacaacttttttagtcacaacataatttttcttgtaactaaatgtgattttagtcacaacaaaaagttacttgtgaataaaatagtaattagatacaagttgtc

SEQ ID NO: 118609 - DNA, 794 bp, Cannabis sativa
tatgatgccaaacatgcactaaggctctgaaaataacacgaattggcaaaacaaatttttctgggatcttgctgtgatccggttaatcggttctacaagacctatagaaccggttaaccagtttatacctaaaaatttcataaattgcccaattcgtacccaaacttcaccaaatcttctagatcacctataacaacatccaatcacagaattcaagcacttaaagcaacatacaatcacagaatccaaatccaccattaatgagtcaagtttgagttcttaaacttaaacttgctcattcttctcacaaaccaacataaccagcaataaacaatcaattccaacttaaaacaaccttagaaatcacactagaggaaaacctaatctaaacagccactacttcttagaattgcatgataaacccaatttaaagcttaaactacataaaagttagaattctagggtttacctttggcttgatctacttcaaaccttgctaaatttccaaaaaaacaaaaatagacttaagagttggtttcttcttgttctagtgggagtcgagcaaagagaacgagagaaagataaacctctttcttaatttttgatttttttttatactagtgctaagggataaatcaaataaatctaattttatttagggaaattttatttacaccccaaaattttctaaaggcaccccattttaataatttttattttataaaaaatttatatctttaattgacctaaatttttttaactttttttttccaatttatattcttaaaaaatat

SEQ ID NO: 118610 - DNA, 2225 bp, Cannabis sativa
ttacctgatgattttgctcaacattccatgcctgaaaaccaggggaaaacttgtcttgtgtaaatgataatataaagtattgacaagaataaaacaccaaaaaaagtaccaacaaaaagcaacatcaaagtgataatttaatcaactatggttttttgagttgagtctgatatcatttataaaaagacaaaaatggagaacaatatatgtcaaaaccaatcttaaacaagttcattatagtttcactcatttccttatccttggcaaggagaaagacatgtttagaacctgctagttagttcaggcttatcaatgatcacaaacaatattccaagattgacaaagccttcatcaaattcaatcacagtctttgatgaaaaggattctatttgaaatattttgagtaaataaaatcaaacctcaaataattccactcaagcatttcatcaaacaacatgcatgcaagaaactaaaaaactcaaaatttcccttacaattcatacaatatatatatatatatatatgaatatatattaataatgtcagtaaagaaaaaagcacaaacctttatccacgccgtcgccggagctatgaacagtaagcgaagcagtgaaaggagcaaagttagaattttgtttttgaaaatggttttatcgttttcggaatggaaaccaaacttttggtcgttttcaatttttttttttttaattcacgaattatttattaataaatgtattgaaataaaaagttttagaaaaaatgaggaatatgttataaaattattagaataatataaaataaagtctcgttaggatatttgtcttttaaactttgttatgtaacaaattatatctcttgaactttgaaaactattaaaaattcttccttaattatttatattgttggatttaaaattttttgtctaattttagtaagaaaagtataacatggatgaaagttcagggggcataatttgacacatgttaaaatttgaaagacataattttgtagatatcaaagtctgtggagcatgatttagtacatggacaatcatcgaattagtaaaattgaataaaattggataaaaatctttaaatcaaacaatctcaatagttcagggataatttttaacgactataaaaatttaggatgtttgatttggtacatgtaaagtttaagaggtaaaaatcttaattagcctaaaataaataaaagagaaattgaatgagaatttcggaatgttttgtttaaatgagttaattttttatttatacaaatattgagtcatagattgagcattgctatgagacaccaatgtacatagtactattgtgaggtgtaatattttattggtgtaacttaatatcgagtctcacttgttttactttaataaatattatagctttattataaagctatacttcatcgtggtgctaggcactataagtgcctcatagtaatgctctaaattaaaataagtaagacctgatattgaattgcaccaataacaatattacacaaaagaaataattaaaattaatggtaattaatagaaataatttaattaatttgaacattatataaataatattttataacagaataggaatataatttaacaaacaaaattatatgatttcaaaaaaacaaaagcatacaaacaaaattacattaatgataaatttaagtgtgaaaaaatgtgacaaaaaaaagccaacaattactttataaaaaatattacaaaaaaaaaaaaaggaaattgagtaaaaaaaaactaataaattaataatttagtaaatatagatttttttttcttttcaatatatattggagtgggagaatttgaaattttacttttgatataatgttcagtaataaaaaaaatataattagataaataataatatactattaatttttgggattttttgagttttaataaaaaaaaaagtaacaatattacaaaaatactttcagttggccaaataaacaaatatacaacccatataaaaaaattacacaaataccacttacacacaccttcaacctaggattcatgatcccagtgcaactatcgcgcaaccatgcgtcaaccgaaatgaaaattcaaccaaaaagagaaccaccattaattccggcgacttcacctgagaagacaattagcatcaattgaaacaatgactatttcgaattcatgaaaaaaagtgtagaaaaactactacaaa

SEQ ID NO: 118611 - DNA, 1313 bp, Cannabis sativa
aatagcaatgctcttattaaaatacatatatagtgatcattgataatattcagttggcacagccataagaggaaactttctatgcgtagtcaaacctgtggtttcagtcatatgataataatccaaatcctcttctccactactcaacaacgcccaatcaaacttatagaccacactagccaaagcaagctcgttaacagccatggcaaatacaatcccagggcagcctcgcctcccggccccgaaagggatcaactcgaagtcatgtcctttgtaatcaattgcagcgttcttcagcaaaaacctctcaggttcaaacttgtctggttcctcttcccacaaggtcggatctctcccgattgcccatgcattgatgaatacttgggtgcctgaagcgacgtcgtatccacttattttcatgtcttgtattgtgagtcgaggaacgattaaagggattggtggatgcagacggagagtttctttgaaaactgccttcaagtatggcattttttctaggtcgtcctctgtaacattattaatatattcttctggcatggcagtgttagttatcttcttattaaggattgttgttctgatctcgttttgaagctttttcatggcgtttggatgtcttatgagctcagtcattgcccattctaggactgtataggttgtgtctgttcccgctgcaaatgtgtcctacaaacatacatagagacatttttaatcaaaaatttatgccactttgctcggttatgatttatgaagttgttagctataggcacaacacccaattagaaattaagtttcaaataagacttaattatgaaggcaaattacattttctttgagtaactctaaccatgttctctcaacactctccttaactaaaatagcagtaaaacttaaaagaagaaaaatgactctttataataaaaattgataaggagctacttaatttttttttgctaaacttatttaatagtattttaatcaaaagtactactacttttctattattttataaaattaatttatatttgataaatttaaattacataaaagtacgtaataagaaactaacattcaaacaatatcaaatatcaaaatatcaaaataaaaataacaataacaataaaaaaataacatacaaataacaaaaaagtaaaaagaatattacaacataaaaatactatattttctaggggtgaacatcatcaaatccaattgaaccgaaccgaatccaatcaatccaattataaaaagttggatatccaattaaaattggattggatgctaaaagttggattcta

SEQ ID NO: 118612 - DNA, 1010 bp, Cannabis sativa
atgctagttagggtgttacaggagaaatctaatgtactcttttttatctttacctcatagtataggaaagttaaatggatcattaacaataaaaaaatatataatttatatttgatattggtgcaccgtgcacttgtacagctgattttttcttaaaaagaaaaaatctactttatcaaatacaggcgacataatgtttgggtttgagcttttaaagaaatttcataagttaattgtaagctatttgtcacactacaaattattcataagttttcaaaaattatataaatatataagattacaataacaataatatatatcataaaaaactcaaattataattattaaaaatctaaaaacacattaatataccaatattaagtgtcaaattacatattttaaattaaaaatatatatattttttaaaaaataataacatttttacctataaatttatgacactactaaataatatctcctatgatatacgacatgttaaaaatattcctcaatattatacagttgtagaaatgaaacgtgccccttctgttactttttattaggagattttacaaaaatactagattttagggacagttttacaattttactactacacgaaaaattttacaaaaaaaatgtccacaccttattttttttccttttatgctatacacaccccaaaacacatacgaaacttccatcttcaacacctacgtacggaccgaactacgtaccagaccaacaccagaatagtcggaaaacaactattttttcagtaagaacgtaagtatttaaaatttcaatcctggaagaataaccaaaaattactaaaacaacagtaaaactaccagtcgaaatgccaaacagtgggaaggtaaagagagcaattgtagggttgttttccaacaggtgcaaaatgtaactaaaacactacaagaaaagcaacttttgccggcgcagttgaccaattgcgccggcaaaagttgtcagcataaatgagatgctga

SEQ ID NO: 118613 - DNA, 843 bp, Cannabis sativa
ttaatgagttaagcttttcttgctattgctatgttttctgttcttaattgagttttactcttctggtttatacctcctctggtttttacctcttctcagcttgaatagcttctacagagtcaaacataagaaatgcatgctcattcatggttgatcaagctttccaacattaccaacacaacacaacctatctatatattgagcaattatatatgcaacaaaatattgcacaattaataatgtagcactattttctaaaatagtgagtctcatttaaattaaatgtaatttgttaaaaaaaattaactttgtcatcatgtgttatgttttattacatattgttgggtgtgtcataaaagtactacattcactaaaaatagaaatgattatgggcagggtcggccctaagtataggcgagttaggcctgtgcttaaggcccactcattttaggggctcaaaattttttttttgattataacttatttcaactcagagctgaccctgattataggtatataaagatgaacaacttataattaattaacctttgttttcagaaaatatatttaataataaaagaaagaagaagaaaaaaaaaattaacgtaccttcgtaacatgcttcatacaaacgagacaattctttaaaaaaaaaagagcaatctccgccactcttccagatttttattttccatattgagtcacaaatggtgatattagaaaattggaatatatttatatatatatatatatatatatttactagatgaaagttacgtggcgagccacgtaaatattagttttatttaagatctagtggtttttgtttaagaattcggtaac

SEQ ID NO: 118614 - DNA, 3745 bp, Cannabis sativa
  modified_base (2483)..(2488): a, c, t, g, unknown or other
  modified_base (2661)..(2672): a, c, t, g, unknown or other
ggctggtgggttttggataagaaagtgtttgtagtatagtgttgagagagtttttggtgaaaggttaggtttttctttattcgttctagtcacagagagtaagtattacagtgataaataaataaataaataaaataaaatagaataaatgttttgaagcattgatcttgaaccttctagaatcagaattaatctgaaccgtccaattgtttctaaggccttctcttattgtcgtttatctattggtttttagaactctctagaattgtttgttttaggatttgaatattgaaatcaaagtcttttatgttggtgggtgtgggttcttgggcctagggtatgggccttatgttgagcccaataaagatatacttactagccttcctttatggtttggtatcaaactctcttggttctcctttacaagaaaaagaagcccaacaaaaatggtccaaatcaataaaaataggccttaataagaaaggtctaatgtgcaatattgaaaccaaagccttttatgttggtgggtgtgggttattgggcctatagtatgggcattatattgagcccaataaagacatgtactttactagccttcctttatgatttgaggaaattatactcactttatatatttgttttaattttttatcattatttccatattctttaaaatacacctatttttatagatgatatatttattatagatcttaactttaatgtaaattatgttctagacttaagtggaaggtgaggatatgttgggcaacacactcacaaaagtaggtatattttaatgaaatataatatgaaggtatctttaattaatagtacagaaaaaggtattcctcaacttatcccttataatttggtatcaaactctcttggttctctattacaagaaaagaagcccaaaaaaattgtccaaaaaaatcaaacataggccttaataagaaaagtgcatgtgcaccaaaatgctatgatgaacctaggtatgcacaaaaatagacctagagtatggaccttatgttgagcccaataaagaaatgtacttactaaccatcctttatggtttggtatcaatctctctttgattcatcattattacaaaacataggccatactcataaaggtgtaatgtgcaccaaaatgttatgttaatggatgtagggtgcccatgtgagttcatgctaaataggtgttgtgttgagatttaggtatgacaacttgcaacttgcaagtaaatgttatatgattgacctaactcaatttgtttaactcatttatatgaagatgaataaaatatacttaattataagtaatttattaattcattaacatatttataaaaaatttaacatgtttacaactttttttaagaaacatttatgagtaatttcacatatttatgtccttctttaactaacttaatataatttacatataataaagttgcatcattttccaaattaggtgtgtcaaccttaaaataatatgtttaaatgcttcttcagtgccaaaaaattaattaaatttatattgtgtcaaatttagtataacaatgaatatattttttattacaatattgcattaatattaattaattaatgagtgattctaataaatatgtctactttaaaaaatacaatagtgtcattaatttttcttttttgagaatatctaattgataactacttttttttttatctatttgtattttttatatatatataatagggagggattcgatctcttttatgtctactttaaaaaataccatgttatgcttatgcaatggagaataaatattatatttgttcattttcttgaatttttttttggtcaaatttaacacattttttaaatcatgcattttagattatcttagataataaccaaatgaataaggttaactatgtttttttcctttcaaggtgtaacatgttcttgttggtaagtaacactagttaattggctatgtaagcaattttcaaagttgtttaatttgggtttggtatataatatagtttgatgaaaagattcaaatgccaaagcaaattgtctatcaccaacattttgattcttacaagttttgttattatttatattttttctaattaaaattgtaaaaatgatggatggtttagagggagaatattataattatcaataataataagttttttaattcactaggatggaactttcatttatgacagacatttgtttgtaaaattaaactaaaattgaataaaattattgaatctaataattttgatagttctaaaattttttatcaacctaaaaagttcaagtgacataatttttttttattttttttttatgaaataaagagcgtttatagattcaacaaaattacgtcttcccgtcattacaaataatattttgaagaatgaagaatactggacactcactataaaaaaatcttacttttactcacaacaaaatttgtgactaannnnnnaaaagttgtgactaattataaatgattattcatatgttgtgattaaaatgtacgtagttaaagatattagtcacacaaattacaatttgtcgtgactaaatgtatttttagtgacaatacttgtgtctaaatgtcatgttttaatcgcaagtaattttttgttgtgactaaannnnnnnnnnnntcacaaaaaatttatgttgtcactaaaaatagcaattttttgtagtgactttcaacatatgagcataaacttattttatgagctacaaaattaaaaaaatctattaatactaaagaaatttaaacctaaaaatgcattagaactccttttacaatgtgtaatataagtatttatttcccatgaagaaatctaatcgttgagggtttatggtaatattggaattgcttttcacaatcacaaatttacacattttttagtcgccatttatagagcaaaagacaaataataacctcttttaaaagaaaatcagccacgatttagtatatgtcaaaaattataattaataagacatctatatatatttattttatttattaatgataatataaacatgtatgcactaatataaccttgaccaaattatatataatacacttataaaatagtaagatatagaatgattgtttgttccatttggtcaaaattattattggtagatagattttctcttttatgatttcttcttgctgtgatcaatatttttttgactacatatgctaatctgttgacttattttgtctttctatgatttatttatatttggttctaggagtggttaacatcaaatctaatctaatcgagtttaattgattaatctaatctaattataaaaaaaaaatagatctttaattacaattaaattagattggatcttaaaagttaaattttaattgaattgattggttattgaatattaatctcaaaatttaactaaaaatcaatctaatccaattatatttatatatattaaaaaaattatttatatttatttatataataaaaatatatacatattaattatatttttagtgacttttttgttgaatttgtaacacttgattgttttgtgtatttatttttataatattttgttctattttattacccgttaatattgttgctttagttattttaattttttagttaccttactcatataatgatgatatttttatagagtatttttttttttttgaaacaaagattgcaactttcattaaagcaaatcagct

SEQ ID NO: 118615 - DNA, 827 bp, Cannabis sativa
  modified_base (95)..(114): a, c, t, g, unknown or other
gagtcatattattctgctacacccaatgtaaggtttctcatactttatacgtgtttatttcataatcgttttaaaagttcatatttagggtgttnnnnnnnnnnnnnnnnnnnngatctaagatcctggtaaaatatcaatatttaagtgtaatttactccattaatgggcttttttagtctaaaaatctcaatgggtctgggtcagcccgatccattaggtaaagtgcctataaatatgacattttccgttcatgaaagggcttacaaattttggctagcaataattttacaagaaaaagtagtaaaatacttcatagccaagagtttaataatattgactcgtggactaaggttcattaacaccccaactacgtacaaaatctcatcttgttcatttctaaagtaaaatttccttagctcaatattatttaaatttggttttaaaaatattaataaacaagtagaaaagacatttttttggaataacattcaagtactttaaaatacaataaaaaacaagaatagaaaagaataaagtttctattccatctcattatcttcaataaaatatagcctaaaacgtactaaacaaaagaataaaatgaaatttaattattttttattccattccattaccccgaatcaaatgcaccattaaggtatagttagagggaaaaactatgttcatttaccattttgttataaaataatttagaatattataaaacagatatgaagaaaagaagaagaaaataaagatagaaagagaaagtgaatgagaatttctcagttatttattccaatggagtgaatccctatttatac

SEQ ID NO: 118616 - DNA, 771 bp, Cannabis sativa
tagaaaacacttcgttatgagtttctttgctgactaatatttgatttggaatttgttgcagaagcagcagcttgaggacaatactttgctgaaaaggcttggaaccactgaagacatggctgctgctactgcttttttggcatctgatgatgcttcttacataactggagaaacactggtcgtggctggagggacgcaatctaggctctaattcacattcttattttgtatattagctctcgtacaagaattcatggatgattatcattaaaacttcatatatctatagcagttatgctgggaagaacttggaaaaagttaataattggttgactcaagataagttctctgttttttttaggaaatagtctcagaaactatcactaaaaagcaaaaaactcaatgggaccaaagattaaccgatatcacgaaattacactacatacctcttttaacatgttgcctttaatttttactttttctttcaaaatttattatgtttacttcttttttttttaattattctaccaattttgctcctattatttcattatattttttatttttctttaattaaaattgtctaaattttttcacaaacctatacatctatctataaaaatataaatttattgtgtttgaaattgggtataatactcattgaaaaaggtatatttaaattaaattttatttgaaagtaaatttttgttaatgtataaaaaaaaatgtattcttcaacttctctcctaataaattgcatcaactattata

SEQ ID NO: 118617 - DNA, 785 bp, Cannabis sativa
cgtgcggcagatttaaataataaacatactttaataaaaagaaaaaaaattatttatataaattaacttaaaagtaataattattttgacgtattaaaaataataatttaaatttataaaaaattttaaattaaattatctaattatatcttattattaatttagcataagaaactgaataactaataaaattaattagttaataaacaaatattttaaaatatatatttaatagattaatttattgtgtatatgattaaacaacatttaacatttaaattataattttagaatatatataataattattgatatagatattttagatatttttttatgtaaatttaatttcaaaccctgagtaaatccttaaactacaaatttttaagaaagaaccactattcttggatgtattttattaaaaatgtgttaaagtagtccatttgtttcaacaaaaaaaatgtgttaatgtagttcttttctttcatcattgtatttgacttgtagtcgtcacgccactacatttaaagtcttgttaattatcaccgtatctcacttgtagtcatctgaacattcaaaattattgtcagtcactgtatcttacttgtaatcgtcagtatagtcgaaattattattatcacagtatcaaactttaaccaaacattatcaaaatttatagaataatttttttttaataaaaccttcatttattgttgctaccacactacattatcacatatacaatttttttttttttttacaaaatcacaccaaacataatattt

SEQ ID NO: 118618 - DNA, 2770 bp, Cannabis sativa
tttttaatttaaccaacttgaagataatttttaacacgaacagatatagaaaatataaacaattttatcataacacatttagatcagattattttaaaattttagtttgataaaaaatcagttcagggtcctatttgtaccaatttagaaaatgtaggatccattttatcatttaacaaaacagaaggtccaattagtaacttttgcaaaatgcagagtttaaaatgatatatatccatataacaaaatggtagtattatatattaaattgtactacaagattgatgtaataaattacaatgagaaatttgaaaaaatatgcataaaatactctaaaaaattttccctaaatccataataccccatatttcccatatattaccacattaccatattccccataatacccctttcatttgaaatcccaaacccaaaccgcctcctctctcttcctctcgcccaaacccacggtgaacccatcccaaacccatcgatttaaacccacggtgacggcgccccctgctatcgacggtagacccaatctcaaaccgaccgtgacggcgccccttgctctcgacacaatgtctaaggtgtgtcccttttattttcttttcttttttcttttttttgtgagaaagtgttaaagattgatttagcttgtgaaatttaaattttgttagatttagggaaattttgttaaatatttttgtctgatctgtgggggaaatcatgatttggacctgtaattttcgtcgggcccgatgcaggtccgatgctcacgcgaatgggttggagaagatgaagacccgatggggtctgatgcttgtgttggaaattaaatttctcattaggtccgatggcacttgatgctgggtccaatggggcccgatggggccgatggtgttgagggattttacaaaaaaaaattgtgttggatccgatggagcccgatgcctatgtgttgttctcttttttttttgtgtgttgggttcgatattgggcccaatggtgggggcgatcggttgcgtggatgacgggggcggttgagtgtgggcggcttgcatggacgggtgtgggcagtctccgtctgtgtccagtgtgcatgcggttgagggtatgcgagacagagagagaaagagagaaagagaggggagtcaaatttgaatgaggggagtaatgtgggaattgaataaatgttgtcctatcttaccaatatagggtattttaagtttaagggaaaaatttccccctaatgtaaggataaaaaattaaatttcccattacaattaacgtccatgtatataaattttctatttttttttattaatatcgtattttatttagtaatttttttgtttgtcatggtaattgtatactctcatactgtttttgtttgtgttattgatggattattaaattttagtaatttattatttatttcttaaaagaaaaatatattctggaaataaaatataataatatataaatttattatattttttgtccaagtcatacaagtattttagtggatacaattatcacgcccaacaatattggacaacaataaaaatacctctttaatgaccattataatattatatcctgacatgaaatgaatgtgttagggaatttcatgactagattcgatggtcatggattactacgtagtagtggtattttggctttaatgttaataaaaaaattctaaaatttaactcactcctcaaaggtcccggtctgggtctggatcccgggtcccgggtcccggtcccggtataagtctgggtccgtgtctgggtcccggtctgggtccagagtcggagtcctgaactaggttcgggttccggtctcggtctgggttcgggtccaagtctaggtccctagtcccagtccgggttcgggtctgggtcatggtctcagtcccgcgtcccaagtcttgggtcttggtctcggtctcgggtcccggtctgggtcctgagtccgggtctaggtgtgggtctaagtccgagtccaggtcccaaggcatccgagtctgggtctgagtcttgaattaagtttttttttaataaattgaaatcgggtcggatcagatccaatccagaaaaaaaattaggcggggcgaaacggatctgatccaagatccaataagtatccaaaggtttctaatcagtggtgatccgtcggttcgaaattctaacccgctccaactaaatggatttttttgacatgtctaactcccctcttatatatggtgtattaatttggtgtaaaagtttcatttagtgggttttagttgagagtggttgagattaagggaatctcaaatttaaatatttaaagagtttgagattaccccaacataaacttaaaagtgagatccactttctcataatttttccacaaatattatacctaacatagatattttacattctcatttccaagaatcaaacaaccttacagaaatgccccattagtgtgatttttcggactaacaaattaaagacaaagaagacaatatatttaccagaattcacattttattcctctatagtatatgcttctgtttctctttctatatatatataaatatatatatatatatatatgggtgactattcaatggttacatctttattgtggccatcatgattacattttcttttgacctgtaataacaggttagtaataggtaaacattcttttttttttaaaaattaattaattataattaactattttattcaaataattaattaaatatttaaca

SEQ ID NO: 118619 - DNA, 1414 bp, Cannabis sativa
tcacctgaacttaggagggttttctggccatagttttgggtttcttatagactttggctcaagcccaagtgcaaacatgttacaccaatctagcttttggtcctctgagaacacaaaagcttgtccatagccatgaactatcccaggaaccatagcatacttctgcttctcagccaaaggcagcatgaaaaagcccttggttaactcctctgtttgctctaccaaactcagatcaatcccatgatttatcacctaaaaaaagaaaagattagttcagatgaaaatattattataaaatgaagtatttatggttgtaatacctgaaaaaaaccccactcatcacaagcagttgtgagctgcaaaagctcactaagaacttcatcttcagaaccatttgaaagcttgtggagatctataatgggaatgtcattagatggtattgatgaagtgtctagtgttggcctctcagttttgtctcttacaaatctatctgggatttcagacttagcctttctcagctcttggacatcatcaattttcccaaccttgatgggagaaattgatactgcggccatggaaactaattattattttattttttttggtaataatagtgcaaaaacaaaagacaaaaagggtttacaatatttttgttaattttagacttgggtatcttttggggtcttgggaaggtctttatttataggcatgcagcaaagaagaacatagaacagaacaacataacatgtttattctataattttcttttccatttgttatattgtattagatttaaggacccacatgtcattgatttcttcacgaacttttaaatattgaatacttgatcaaacaaatgaggcaattttatttgggtttcattagcatgacatattggagtgcatgatatcaccatccaagtagttgtaaaatattacacggtgaaggtgaccttataattttgtaaacaatcacatttatctaaagagcatttctattaggcacactttctgacatgtcgcgttgtaataagctaacgatacaccctaaaaattattatattaaattatatgattattgcagtgatatatcgtcctgtttgatatttggtacatgttttgagtgtacacgtcgttactcatatgctaaaaccaacatcacaaagaatataagcaaatacttctctacttattatttcaaaataccatattatacatatgggtttgtaatatttaaaatctcctactagttttgcagaaattttgaaataatttaaatgtttaaaatacgcttcaaaataactttgatgtgcttgtagaacaagcttcaaaacaatctcattaatgtacattttataatatgctagagattttattacaatggaagaaaatcaagacattacaattctattgta

SEQ ID NO: 118620 - DNA, 6157 bp, Cannabis sativa
attttcctctttgtaattaaccaataattttttatttccagtcatgtctcgcaagcatccactgtcaaagtaccactatccctccacaaaagaagacagagacaccttagccaccaatcaaacatttggtttaaggtcagattttattttccattccagacgagttttgcgcccttgagatttatttggttgtggaaagctatttggtagataaatcatgggtcaataccattttagaccctgtgttttgtataagttactaatttgaccctctgttttattaaatgataaaatggaccctatattttctaaaatagtacaaataagatcctgaattgattttttatcaaaataaaatttaattataatttgatctaaaagtgctatgataaaattgtttacattttctgtatctgttcgtattaggaattgttttcaagttgattattatataaaaaattgtcaaaaattaagttcaggatcctatttttaccattttggaaaatacagggtccattttgacatttaacaaaacacagggtccaatcgataacttttgcaaaacatttggtccaaaatggtatttacccattaatcatcgctgtcaagtagttctacaatttatagcacttggggcgaatgtgacccttcctgttgcagaaatgacatattgggatgaatttttcattttgtgacagaagtcgagggactattcttctcccttcgaacttcaacttagtgggtccaaatggaacttgaccactcatataggaatctaatacgttaactatagtagggatgtgtggtttctcatcatcctttttggtcagatcaacagttgaagtgtgtgaatcctcaacaaacaaattatttccctatttggacaacattttgtaccctatgtaggtacgatcaccataaggtttctagagttgtagggcgttattaatggcagctgtgcccgggggaataaattgcagtgcttgtttagtctaattagatctgcagtaagtttatatatctcattgtgcttctcatcaggaagtctgttgaggttcttaactgtgtcctctaacttacctttttcagtctccacttgctccaaggtgctttttagacctctaatctgcttagtcatgtactcccattgggcaaacatctcatcataagcattttttgtatactctcgctgtctccttctgatgtagtggatattgcatcatcttcagactcaactgagtgacagctttgggccatgaacgctaatacctgtttgtcctcatctgtgctttcactagcagtagagtttttttattcctcactgtcactccatgttacagcaggggctttcttcttttttagagtgtttgcacactctccctgaatgtggccatatctgtgacattctttgcacttgattccccgattcttttcatcagtagatggttgaccttgtttgaaatttccacctttgttcttcttgggagcatttttgttatcaccatgaacattcttcttatagttccttttcaagaacttggcatagtttcttgttaaaagggctatagtctcatcagagataccatttatttcctctagagcaggtttcttattttcttgatgaatgagttcgatactcacatcagatttatccttgaccgcatccttctgtttctttgatttcttccatctggagagtgacaactcatagttctacaaggatctaatgagctaatcgagatcaagttcctcaatgttccttatttcttcaattgaggtcactttagacatgaatcttcttgggagtactccaagcacttttcgaaccagctttgaattagagtaggttttttccagagcatacgactccttagagatatcacacaacttagcatggaattctgcaactgaatcatcttcctccatggaaagattttcaaatgccttggtcaacgctcgcagcctagatttctttacaacatctgttccctcattctttattttcaatttctcccacgtttcttttgcgatttcacagttagctaaaacctttaactggttcgtggagataacattaaacagtgcatgttgggccttcgagttaaagttagcctttccatttcatctatggtccaccagctcatgggtttaggtttaacaatttcattctcagtcatcgtggggcttatccaaccttcttctatggccatccaaaatctttcatcaacaactctcaagaaggcacgcatcttggtcttccattaaaggtacttagcaccttccaacattggaggtctttaggttaatccaccttccctaaacatttccatcctacacagagacacgaaaaggaaatatagcacccgtactacaactctccaagatgtaacttagagaggattagttgtaacagaatcaagaaagtaaattttgaacacgaatctactaactttttctgaatcaaataccaggcaagtataggatctaacacaaaatttatcaaaaaaatatcaagctctgataccaaatgaaagaacaacttggactggtttctagattcaaattactgactttcttaagaaattaatttgcaattgtaagtttaacattcaagaatcaggttaatgagcaatcaataatgaagacagtgatttacaagcttcatctgcactgagaacaaatttcaaccaactagtgcttgggttccccgaactagggtaataacacccactatattcaaagattcatattacaaacactagttcacaattagtaattgaatacaatctttacaacttttagtgaaatattaccaacaccaaccaagatccttggttgaatatacaagattccttgtgcataagctaagttcttcttcaacacttttctccaatctgaactcctttcagatatgatgacgaagataacactgaactcccttcagttttaactcagctcgaacaggctctgatctttctgctatggatggccaccaccaagatattcaattagacctgtaaaataaagaacaatacaagataccacacacaatacatcacgattatacttaactaactaagaaagcaaaatagctagttaaccaaatcacataacagaactagctataaatatacaaacaattctaaccagacctaacaatattttcatgacaactattaatacataacagactgtggacacaacagaatattcacatgtagttacgtcaaatgaacaccacagataagactggaatcacttttaaactaatctgtcaaaaatatgaaccttacactatcttttgttctaagtctttgccacataacgagccacattataaatcagtgtttgggaataattaatctatcccaaacaaacttaggtcaattttgtttttgtcctactgatcaaatagaatagtatgccccagctgaatactatattttttagcaacaaaccaatcttgattgatcttttccttgaatatgtttttgacagccaccaacttttttcaatagtagctacaatccgtgggacaagcatattcccaccaattgtgtttccccaggtggattgtatttatccacttaacaaatagattatccttcttcttggtaattgcccaaacatacttccccatatggaaaccaaattctattctgttatattactggatctcaagccacaagctgatttcgacctacaaatcacattccatgcaactaccatcacttgtattttttgcatcccctttccataaaaaagctctgcatttcgcttccacatcttgaagtagactctttgttaagttcataatttgagcccaatatgaatatatagccgtcaacactgaattaatcaatgttactctatccatataagatgaatttctagagctccaaactttgattctattagtcattttctccaaaatacatttacattcagcatgagatatttttttttagttaaaggaataccaaggtgttgtggtattttcaacgcagcaagtatacgtaccgtcgttaataaagttatagactcacaaagagtggggtcgatcccacaaggattgtagttaagtactttaaaattaaatttttaattctatttggttgtttcaaaattaagagaaggttaacactagaaagaaaaacaataaaaacaataaaataaggaagcaagatgcaagtaaattaatattaaaattcatggtgattagaatttagggttattgattccaattgtatctatctattatggtctaacataattcaatttctattactaatttttatgcaatagcaggtttattcaactaatttatagtcttctcatatatataaatctcaattacatgtaaattttctactttcgttataaattaaacatgtaaaaggcattaaatacaaaaactctattagctatctaaaccatataagtactctcctcgtcctataacaacaaaaaatttattcttcatatttcactatagcataattgatactcactgcttagatctcgtatcaaaatcataaacatttgattggtggtcaagcaattaaaagaaataagtacgaatgaaatagaatatatagaaaattaggaaggaatcaaatcacattaaaaatcataaatcgatatcaaacaatatacatcaataccttaataaactacttagctactcttgttcatcgtaacaatcctacacatatcaattaagaacataacaagaaaatagagaagaaaaaatattgaaaactctattggaaaagccttctcagtcattttttatctctctagctcgtattctcttattgcttgttgaaaaatatgaaagtccacttctttttatagtcgaaaaaagataaaaaaaaagatgaaaaagatctatttttttaaaattttagggggcgggctgggacactaggcccttagtgtcgcgactcgtgtctgcgaagggatatttccttgatatttttttaaacacgcgcctcgacactgaaatctaatgttgaggcataaccctccaaaaatcaggcagtgagacactaagagctagtgtcgaggcacacccatgcattgatccgatttgaccttctctaccaatttttagccctttaatgcccccacatgggtttttagtgttaaggcctaaattttgtaatttctttgccttaagagctccaatcgcaccgaaacttctggatttttttctcaaattaatttcctgatgctcttgccccgagaattgatttgtttgaccattttcttatttttttttttaatatttctccatttttcttctattttaaacttgtaaaataataactaccaaaagcgtaaaattacacaaaagaagagtaaaacttatttaaaaacacactaaaatcaacctaaaaatagtactaataaaaacctaacacaaggtacctaaatggaagatggctccgagaaaaacatgatacctccagaatccgagtcacatcagttttagacatgcccttgcagcacactgcagtctttatttcatttggaactaatccaaatgtggatgagaagatcttcagccctctcaacatcagcaagatggatatataatctccattgcaaaacaataacaagtcgtctgcaaagcacatatggtttatttgcaactgagcacacctgtcatggaacttaaagtcgctccattctctaacttttttcatactttgagacaagtactccattctcaacacaaaaagtaggggagatattagatccccttgccttaggcttcttttggcatcaaaaaaaccacacatagagtcgtttaaaagcaaggaaaattttagagttctaatacataccatgatgagatttaagaattgttggaaaaatccatacgcagttagcatctcttcactgaaatcctaatatcatctttacttatctttgttgtatatataaaaatattatactatagtaaacacttctagtattttaaataatttattatatcaaaatcaaaattcaaattttttatgttatgcatgaatgaaaaatgaaactaacataagtgagaatgtttaaatcatatttaatttcaacatttaactattcataatttttttaaaaaaaatgttgaaattttgctataaatactattgtatac

SEQ ID NO: 118621 - DNA, 1926 bp, Cannabis sativa
cgcaccttatgaagatttccagcatggaaacttgcgatttgcgcaagcttgatcaacagggaatagagcccctttacagacaatgcaagtgaaggtaccaatggcctcaaagtttgaaaagcatccctaattctcaaataataagactgatatatagcttgtccatggataggagatatttccatcttggtgtctccttcccttgccagagcatcggtcattgcagctacatctttagacagcactgtttcaaggggaagaagtattgtatttgcctgcgaaataataaaatatatggtcacaaggagattaacaatacatatttgatcagtgctatcaagctcagcacattaccgcagaaccatttaaactgaaaccttcaaatcaataagacatatatatatcaataagacatatatatatcaataagacatatatatatatagagagagagagagagagagagaaacctttgaaagattttccataagagaatggtgtactccagctgcgtcctttcccagattatgaacatcatgaagatcttccgttattgccaagacctataaatatttatcaaaacaaaaaaggttacccaacatagagagcaccaataaaacttataatagtactgaaaatattgctagtaataaacagaacattaagagatgtttaaaaatacaaaaacaaaatacaatagacaatggaaaatgaaagctttaatagagaagcagttcttcaatgaccttgtggggtaccccaaaatagaaaaggaaatcgaaatggtaaacaatagaaaggatattatagaaaattaaagagaaatacaataataactgggtattcgagagtcagcactctcccaagagccaaggctcgcttacaatataattcttatcatatcccaccattcttctaccccaaaaattataccatcttacaatgacctatacaccctttttatttactatattcaataatctcagggtctatctcgttgttttatagataccctcacttacaatataattcttatcatatctcacactcattcttctaccccaatatttatactatcttacaatgacccatataccctttttatttactatgatctataatcccagggtctatcaccttgttttatagagaatttggccctaaaaccagcagcaaggcaaataaataactaagatgtaattgttgctttaagattattcttataaagaaaagtaaacctgaatgtgatgttcaaaaattattgaatgcaaaataaaataaaccttgaatcaattggtaaatggaaaaaagtgagatatcaagagaaagatattgaatttgtagacatcaaaagccagtgaaagaatttaaactaagtagacttcaaataactttctggtaacatactctgctaagattttatcataaaccctaaacaagaggaggagactgatgataacccacttcctatgcaactaaacagtcacacacaatacagacaaaatatggaagacgacttcctagcgaaagccaataaattaaatttaataagcatttaatcaacataatttaaaataaaaaaatacagaacatgagatgtgtaactgttaaaatacatatagaaatcaaacactccatgaaaacagtgataaggtatgaaacagacctcttcaagcatagaaccacattcagaagtcaaagcagtatgagtcttcaaaacacgcccatatgttgctagtgccacactggtcccataagcactatccctcattgaaagaatggtgttctgtaaatcacctgtaagaaaaaagaaaataaatagttaaataagtaaataaaagtaaaattgctcatgtaaaaaataataatctataatcattaatttggcgatgcacaaaagcacacgcatgtgtgtgtgtgtgtgtg

SEQ ID NO: 118622 - DNA, 504 bp, Cannabis sativa
taaaataatttcaacattaattaacaagtaatacacacattcacgacaaaaaatgtactctaagtaaaacatgcattctccgtgctatttaattctcatcaacaaactcaattgtaaaaggtgaaaaaaattgcatgataatcaaactatctcagaaggttagttttcttttcacaatcaaacaaatttatgatatttatgctatataaaattcgatataaaaacactgataataggtcaatcttaccaaaaataaaaatcaagtaaagtcttacaaatttaaactatataaaaaaaaaaatatatcaatttcgattgttgctaagaatagaagtgtaaatgggtcgggtcagatctgatctgactatgattcgacttgatccagatcatgtaaggatttgtcctgccccgccttgctagatcagatagtcgaatcggattagatccaacccgacttatttggatcgcatctgatctgacccgactcttttttttttttttttt

SEQ ID NO: 118623 - DNA, 649 bp, Cannabis sativa
atacacaaaataaggaaaccatattaatacataccagccgaaatatacaataaataataaaatatttttttcaattaaatatgccaaaaatggaattaacaaaaccaactctaaaaattcaaagcaggcactatcctcacactaatactcgacctaatccaataagaacgagaaaacgaataggtcaccaaactatgaagaatagttttgtcctctacatgaaaaataggacacaaacaatcaataggtaaatgtttggatacaaactacactttgttagataaacaactagtaagagccatccaaataaaataacccactttagggaaaatacgtacgttccatacaatcttccacacattagccaccactaacacatgagattgttgaagagacttataagcttatttgaccaaatacaaaccagtgacatcatgatggcaaagccaatgatcaacttgaatggaagagtccaattgaatactcaagatcaactcacgatccttaggctcgaaaatatcattaattagatccacatatcactctttattaccaacaaccacaagattagattaggactgtacatcggtcggtttggatggtttatcctatatattttctaacccaatctaaagttcgggttgctaaa

SEQ ID NO: 118624 - DNA, 4596 bp, Cannabis sativa
  modified_base (4529)..(4551): a, c, t, g, unknown or other
agccctaaaactagaaacaaagagtgaaaactaaccgaaaatatgacccgaaacttagactaattttagcctaacagagacgcctcgagaaaagtcatacacgtatgaataactatagtaagggaaataaattaaaaatatcaattaaacacaaaatccttacaaaaccataaaaataaaaactgtcctttaaattcgttccacacgtgcaaataaaagatataaaaatataaaataaaaacaggataaaaattccctcccagctcctcaggccccgtcggcatcctcatcatcactagcttcatccgactctgtagaagattccacaagatcctcgtccttcttgaactcgaaatacttcttgaaaaactcgtccaggtcccaggtagcagatttgccctctctaaactcggagtagagcttgaaggccgactgataacttccactgaggaacgccttcttgacatggctcgtcagaattttaatctccttagtcatggaccctttctcgtcggccaaagccttttgggcctgtgatgtcgccttttcggcctcggacaattcgcaacttatggaagagagtttgtccttcgttgcctcagcctccgaacggaaggtatcgcgctcttgcaacaaggcggccttttccagattcaccgcagacaaactagtctccagggaagcaaccttgtcacttagagcctttttctctaactctagagctaaacgagtaagatcccagcccctcttctccgactcaagactatcggccttactcttcaaaagcttgatatcaacttctaaggcactaactttagtgagggcaaccacctttgcggaagcagctgcctcgtaatttttcttatagcgagaatagcccttatccaagctttccctctccctatcagtctgcagagcaattttcatagcatgggcgcacctcaaagtcgtctgatggcatctagaagatacttgaagtaattctcagcccactcctcaaacgggacatctttcttaatcttaaaagcagggatctcgtcccattcagtctgggcccgcgggggatggcttgacaaaggcggggagcctcggccaggagaaaaggttgaggggtgcgccaagataggaaaaaggatgagatcggaagacgatggcgctccaagaagagaagcagaagtccgagcaggagaggtagatgaaagacccgggttttggcctaccatggcagcggagcggttctcgggctgagaaggtccctccagattgggaggccccagattgggaggtcccgtcggggccaaccccccagaattacccttgccctcaccaacgcccgatgaaatcttgaggagggcgctaagcagggtcccaatggcgtcgtcagtggccgaatcatgctgagacaacatgccaaagtctgactgagtagcttcctcaagcctcgccaccctgctcttcttcgctttgcttttgcacttaggggacttcgacataagcctcttccgtcgggcagcgttttgggcctcgatctcctcagcggtcatttcggatagcctcatttttggaagatgacgggggtaggtctctgcaaggcgggaatgatcctcagaacactctattaaaatcggcgcaggtgtttgatttaagtgttttagagcgcattttaagaaatcaggccaaataaagtaagaaggataaggagtggggatacctagggggatcctgagttcgcgaggccaggaggaggattcgattaagtcttcacgagaaaggaggaacttgattgatcgaagcttggggtcgagggctgtgactttgcggaccttctcagaaaaaatatccccgataacgttctcctcgttgtcagcaatagttgcacaaaagtaccccccattaaaatcaacatcaatacattcaaaactgaaaacaagagaatatatatatacaataaaaataataatacagttgaataattgaaaatagaaaagagaagatagtcgagtagaagggcgccctaacgatagaggtaattgaattaccaggagcccccagctccggttaataaacgaggtcgtagggttgtcggaaacaaattcgatgaggcctctggcgaaaaagaacttttccttccaccctttatgagaggtctctaaatcagtaatgaaagcccggttcttcttggggcgaagatgataacgccctggctctttctcaatcaaagaataaaaatggatgacgtcggattcctcccactggacgcccgccttatcccctaaaacaatcagacctaaaaggatagcccacgcgttaggaagtagatgggcagaagcaatcgaataatgtagaaggaattccttgattaatttagggatgggtagtctcagtctgattttcgattcgaaccaataagaatgtagacacacccactcatctggagaggaatctaccctctcatgcggtttgggaagtctaacttcgacccctgacggaaaaccgcaggacaaaactagggaatcgatctcatgctgggtcagaaccgatggacaacttgacttaacgtccaaataggaactccccagggcctgttttttcctcttggatttctttaacagggaaccgccagagtaaccccgtcggaagggacggcttgaccactaacacccgcttaacccccggagcgagaacggggaataatggagacactacctagacactccacctccgggtcatcagggacatcgacattctcggcctccatgggaggagtgtcagaaaccagcagggactcaacgaatccaggagctatacttgaagaaagagagttgaaaaccaaaggagagatgcctggacaatccacattcgccattatactacaaacaaagtaataatcgacacccagaatctacccaaggaaaaagggctaaccctaaaaataaccaccccctctacctattcataacaggggaaaggcgagaccgcaacccccggaaaggacgtagtagggggaatgccaaagttaaagcaaatggcgaaggaagggtggacctagaaataagaattataccccaattatcaagaaaccctaagtatcgcaacgctaagggaagaagaagaagaaaagggaaatgaagagaagatcccagagaaaaatagttaggagggaaaatagtgggaaggacgaaaatacaaaaaaataaatataacatatatacagagggtataaataaaaaagagagataaaaaaaaaagaggatggaaagaaatataattaagttaaaagagcagagtatatatacctaaaggcaatgagatctagcacagagaagttgaaacgagcaacaaagaaaaaaacatgtaaaggattttcgaaattgagggtcttatactcgagagtgcgccgccaaaacacaaagggaagatagaggattagtagggaatttataagaaggagtgattctcgagacaccaccatcacatcgagaaaaactgccagtttctataaaattgaaaaattcaaaagcaaaatatatatatataataattataaaaccagtaatgatgaacgaaaactgacataaaaactgctataagaagtgacaagtaaaaaaaatatgtatatatacacacaaggtaaaaatataaacgtagatttccctgtctaaaaaaaaagagggagcagttatcaaaaacagttcaaagttataaaattgtaactggaacaggggtgagtagtgtttgggaggtaaaaatcgagcgcggaagcaaaaggcccaataaattaaaatgaaaatgtcaaaaggcccacacaggttgaatgcataaaagcccaagatctgatagaacatcagggaaggcccaacccggtgtggctcaagtattgagcctcaagggaacattacggacaaaaaagaaaaggaagtgctaaacgacaaagacaataagtaagcaccgacggaagttgaaggaagaagggaacaaaataattggccgacggagtaaaaagttgattataggaggtattacaaatgagaacccaaggaggatcccaaataacctgcggacgagggaagtatctgaaatacaacaaaaaaaaaaggaacgtcgggatggtacaatgataagggcaaacacgcccgaccgaaggaaactcggattgtctcaaataggagttccgacggaagaagaagactctgggtacgaagggaaaaatcaatatttttgaggatatgataccgtcaaatcgaaggaaaacagtagcattaaagctacccgttgaaacacggacacgtagcatggcaaaaagaataaagaagaaaaacacatgttgacaacagaatagggagatgatagatcatccatgaaatcaaaaggacgtaccatataaatagagaaggatcacgtaaagaaaaggggattaggaactgaaaaaagagagaacttacaaaagaacaaatagtgactattttttgaccaaaacagttgctaaaatggaatgtcacatatgatagttttgttgggttttatgcccnnnnnnnnnnnnnnnnnnnnnnnatcagatttacttattaatataggtcagaaataacatttaatgtt

SEQ ID NO: 118625 - DNA, 1285 bp, Cannabis sativa
ttgcatggacaaataggaacgtaatgcagtggtgctgaccctatcaccagcttcatcgatttctttcaaagcttcttctccgaccttgccaaattcagcttcagcttcttctgcaaactgtgttagatatgatgatttttcgtctaagtactcggtaactcggactttctgagtttgaagttgggctatgcgggcaagaagctcttgcttctgaggatcccctttaggtgagggatcttcggagtcagaatcagtggacttgctgaggcaaagggttgaaatatttttgttgttggacaatctggctgtgttaaaagaattgagttttgaggctgtgaatggagttcgaatggctttgagtgcaatcatatttaattttcttgttttcaaaaaaagaggaaggtggtttgaaaattaaagatagaacagggaaaaaaaaaaggaggaaaaaaaggagaatattttctatgaaagtgcaagttcattccagcctctcatttgttgggcattatccatatagttatttatttattttttgtctatatttaacaaaattttaacaataccaaaaaaaattttattaaaattttaacaacataatatataacctaatatatcaagttattaacagataaaaagtattatatttgtaaacttaaaataattgtatacttaaaataaagggaaaaaaacaggaaaattctaaagggtaaaatattacaatattgctgtgggctggtccaattaacatttatacagcccacattgaaaatattacaaaaataccacttgacttataccttcagacgcacgtcacgaacggagacgatgaagaaacctccatcgatccagtctgctacgcaaccagaatgaaaccagatcaagcgtagaacaaccataaatttcggcgaattttgattggaaaagaacaactccaaggatctaaacagaaaattaaaaaaaaaaccaaaaaaccgtgaagaaactgaaattaaacatttgatttcgattttttatggttcaaaatcactcaatcgagcctcgaaaatccagattgaagcaatgtaaatctgtattgaacagatctggagctccccctcaaatctaaaaaaaggtatgaaatgaaattattttcaacaatgatatacgtcatatacagttgcattctcttttattcactggggtacaataggcaattcagattcttaaaaacaaaaaacaagaactgattctaattaaggaaccacatgatacgaataaggcatttttttttttttttaatttt

SEQ ID NO: 118626 - DNA, 1182 bp, Cannabis sativa
ttctatgttatatttatatagggagatttatggtgattgagttgcatcgatccattaatttattttgtgtttttaatatttagatagttttaattttaattttttatatgataattaattaagaaataatttaaatttcaataaattaaaaaaaaaattatgtgagaaaaattcaaaaaaaatattaagtaagatatcaacattgttgtcttttgtactcagttgacagaatctaacttttataatatttgaatgtgtgttaatattttataataaaataatacaaagatattttattaaagtttataacaaaagagatatactcaacaatatttacaaaaagattttaagttatattttaaaaaaaacaatctgtaaagttttaaattaattcacttttatttatttatttatttatttgagaaaggaatttcactaaacaacattaccgattacaagaaaatgacaagtctcgctcaattgcgtgacgagtataaggtggagaaaccccaatccacatagcactaacttataaattaaatagttaatttattattataaactaatttataaaatcacactgcctttacaagttagcgcattacaactaagttacctcttacaactaatgaaccaagacctttttgagagaagatcaagcatgagtaccagaccaagtagtttaacaaagtggagagttcccctgggcggcataacacaccccaagctcaaacttgggctgcattccgcccaaatgttagaagaggtatccaactacattttgatccaacatggcaactcttgtgtggggtacaatgcctagcaaggaagtgaaggacggcacaacaccatcccaggagcacaaggactccctgggcagcaccccgcacaggtgcgaagaccaaatcaacatattcatttaatgttgaatgtcttcaaaagaatctccgtacaaatttagaaattgattgggaacacgaaatcagaagtgttattgttgtgttggaactttgtgaaatgttaaaaaatgatgtgtgtgagtaggagtcccacttgggatagaaacacttcatttgaagtgtataactagtgcaagtttgagatatgggtttgggccccaaggggtacccagtttcgcgctcatgggtgaggactcacacaccggaccaccacacacgcgcg

SEQ ID NO: 118627 - DNA, 1398 bp, Cannabis sativa
aagtttattgtgctctgcaaaaaaaaagggtaacctgtcagacaaccgtgtgaccagcccagctagccgaagatgactgagaacgatcctctacaaccacgatgatccaagggaacctcaagccgttaatcagacggtcatgattcatccactaggtttgatttcctgtctccttagaactcaaggaaatagaggtacgagtctatagaacacatcctattcaagtaaggtggtgacagtacttcctattaacttttcttcttaggttggtcaatctaaagtctaaaccctactcacactcagtactcacgaatcaccattttcaactcagattcatttctttgatccgattcacagccatggagataatctccgatttcaaagaagaacacaaagagaccaaacctaagcctaagcccaaccctaacctcaagccctccgcatccccttcttgttcctcttcctcctctgcagtgacaacttcgtttactgccagttttgacccctccaatccgctagggttcttggagaaagttttccactttgtcgctcaacatagtgattttctcgagaaagtgaccgtggagaagaagattttgtcagttgctcgcgtcgccaaggagaggaaggagaaggagaatgagagtaagaggagaaaggtggaagaggtcaaggataagaaggttagtgtggtacctaagaatgtgactaaggtacctaagaaagaagaagaagaggaaaagtttcccgtgaaagtagaaaacaaggaagaaagcggtcccagagctcccaatcttgggaatgggcttgatcttgacaaatactcatggacgcagagcctgcaagaagttactgcatttatcccagtgcccgttggaaacaagtaaaggtcggttgtctgtgatataaagaagaagcatctaaaagttggactcaaagggtcagccacctatcattgatggggagctctttcgacctgtaaagcttgatgattgttactggagcatagaggatcaaagttcgatttctattctgttgccaagcaggatcaaatggattggtggaaatgtttggtgaaaggtaatcctgaaattgacacccagaaaggtgaacctgaatcaagctagttatctaacctggacccgggaactcgatagacagttgaaaagatgatgtttgatcagagacagaagtctatgggactcccaagcagtgaagaaatacagaaagagaacctttagaagatattcatggctgagcacccggagacaaaagtctatgggactcccaagcagtgaagagaaaatgttttagtaattaagaaacttaataataaaaaaagagtaatttgcggcataaatgcctaagtttaactcccagttgcaaataaatacctaa

SEQ ID NO: 118628 - DNA, 2999 bp, Cannabis sativa
gtgtcttagttcgggatctattttgggtctaggtcgtggtatgagttttggtccgagtctaggtctgggtttgggtctaggtctggatcacagtctagatctaggtttgggtcaaggtccgagttcgggtcccgggtgcgtgtctaggtttgggtttgggtcaagatctcggaccagatctttgtcccaagtttcaatcccaatctgggtttgggtccaagttcaggttcttatccggatccctatctaggtctgagtctatgtttgggatcgaatcccaaatttaggtccaactcttggtatcgctcccgatctagctacacgacggtctccgagcccgagttctagtctcggtttgggtctagggctaggtccgagttttgttctaggtctgggtctgggtcttcgtcatggtccaagtcttgttccaggttcctggtccgacggttcttgtttaggttccagttttgggtctcgggtctaggcctgggtcagggtttggattctggtttgggttcagtctggttcaagttctagttcaggtcataggtcccaggtccaagttttggttcacgattgagactcgggtgcagttctaggtcccaacccatattttgtttctcgactctggttccatgtttgggtaggagtttggttgcgggtttgggtcccgagtctaggtctagattgggatctaggtctgggtcccagtttgtgtttaggtttgagttggagtttgtgtcctagtttggttacggtttcaagtctaggtctaggtccggttacggttccaggtccatgtcctagtttcggtcccattcttgggtcccggtctacctccgatttcggttctaattttgggtcatagcgtacgagttcgggtctaggtttgggtctgggactgggttcaggtccgggtctgggttcaggtgcggggttagtcaccagatgcagacagcggctatgggttcagtcgaagcactgggtctagatttgaataacgatcttgggtcccagttttcttccatttctggtgccgagtcacgagctgggtcgtaggttcatgtctgagccgagggtcgagttctaggtcccggtccttgttccggttcctaggtccctatcccaattatatgtcatagtcccagttctagtttgggtttttgtcctagtctaggttcaggtttgagtcctagtcttggttcaggttcgggtctcgatctcggttttttctgagttcgggttctggtttaggtcctagtcttggtctgtgtcctagtctgactctagttctagttgtgattcgaagtttgagtttggattcgagttcaggtcggggttcaatccctagtctgagtttgggtttgagtttggatttcggtctaggtctagatcaggctccgagtgtgggttcgggtccttggtgttggtgttggtctaggtccaggttcaagtcccaagttttgaactcgatctgtgtctgggttcaattctaggtgtaagtcctgggtcctgatctcggtctgtgttcgagttcaggctcaggtctaggtctatgtttgggtcttattctaggtctgggtctgagttcgggtcccgagttcaggtccgattttgggttcaagtcttggttcaggttttttcctagactgtgtctaggttcctgtcctagttttctttcggggtaggttttgggtccaggtctgggtctgacttcagattcctgggtccaggtcaggtcccagttcgggtttgggtccctggtctaggtctcccatctatgtccggttcctaagtcctggtctgggtctaggttttggtttgggtctcgagtcttagtttgagtccaggtttcggtggggtttgggtccaggtctcggtcacagtcctggtctaggttcgggttctagtccctatcatggtcaagaacctagtctaggtcccagtgagtgtataggaccaggtcacgtccaggtcgcggtacaagtttgggtttcaggtctcaggtcccagtcctaggcaaggtctcggtctaggtctcgtctgggtttgggttatgatttgggttcggttttggtgtcaggttcaggtcctagtcacagtttcagctctaattctggcactgggtttggtttcgagtcacggtctaggtccaggtttaggtcggggtccgagtcttaatttgagtttgggtacgggtttgttggatcctgggatgggtccaggtttgagtttgggtcccaagttcgggtctgggtctacatttggggtctagtccaggtctcttgtttcgatcccagtccgggtctgggtcggtattctgttctaggtctaagttcgtaaccatgtctaggtttaaatcccagtctcaatcaagggcttggtctgggtttaggtgccgggtttaggtccgagtccaggttgcggtcctattccaagatcccagtccggctcaagttcaagttttgatttttgttcccgagtgtgggtctcagtttggggtcaggtcatggatctcgatctaagttttgaggccacaaatctagtcctagtttgtgggcccgatttccaggtctgggtccccaatttatgttcaagtcctaggtcctggtcctggtccatgtttgtgttccggttcaggttcgagtctcgagtccctatttgagtccaggtcccagtttaggttatggtcccagtttgggtcccagtcctagagtcagtctaaggttcgggtccctggtctgagtctagttcttaggtcttgggtccggccccagtttttgggtttgggtctaggtctaggttcaggccctggtttgggtcaaggtctcagtccttgtttacgtcctaagtcacaggtcccggtctaggtccaagtcctagtatgtgttctggtctaagtttgtgtttaggtttgggtcctgttactgtcccaggtctgggttctagtcccaggcttggttcgattccaattttgggtccgggatcgggtctggatc

SEQ ID NO: 118629 - DNA, 919 bp, Cannabis sativa
  modified_base (630)..(630): a, c, t, g, unknown or other
aattgtgaaagcccatttgcctttgttgacctcggttttggccaacgacaagtagtataatatagatgtaatatagtgaaataaataaagacatagagtttttataaaggtttggccccgagaagttcagtaataacctactccccttgatatgtattgacgtaagaacaaagaatgtagtgattcgtcccttagagctcttacaatgatatctttgagtacatactcttagagaagtttttcgaccccttgcctagtgaaaatggatcactattcatagggctataagctttgagagaaaagtttcccttctatttacaatgtctataattggtaagattacatattaaatacagagtacactgattaagggatttggacagcttgccatatctctgtgatatgatcccagaattatagggattgcttttgtgattcatgatgcaagtattgaagttcctaagtgttggcacgctgtttggaccgtccactgcccagtgaggaaggcttcgtgtgtacagatatatacggtgttctgttcggcatatctctttcgaacagatatgcaaagttgcttccacgtgtcaccagattgtgatgccatgtcaaagtactaaaattgggataacnttgccccccaagtctgtatgagacttccgaagttgcatgtagacttcatctgagatgcctacgcatttgaatgggtgacatgtgttaggcgcgtctgttcgtgactcgatgtgaggctgaccaggcgtctcttcggttttcggctaattaatgcgctgacttaattagtgcatcggaacccaatttttctcatcacgctttgaaggttacacttgattaattttgatctcccgatatttgcttttgggagggaatcaaagcgtctgaggtattttgaaatgattacctc

SEQ ID NO: 118630 - DNA, 2119 bp, Cannabis sativa
gcattaaatgcgaggtgatcgttcaatagattccagtacctcccggaactgccttagtatgtccctggcctccgggagcataaagatccttcttatgtctcctccgagagacaccttcccaaatacactcctcttttgtctaagacttagttgatttctataagagctggtcctctcagctccacgtgtcatccttatccaggtccacgtattttgggcaaaatcaagggcaacaattatattttgtaaaaatgtctgagtctggttttgaaatttcaactccaagtttcttaggaatagaatatcctaaggaattagcccttccattcaaacccaaaatccaaaaaccttaatccaaacttgagatcaatgatgccgaaattagggagcatttaataaaaaccaatcaggatgaagtttccagtcgctataggcaatttttagaagagataactgagggtaaatgttgttatctgcgagatgcaacctggctgaacctcaatatttatcttctaatcctatagcgagacccttatttttatctcaagtcattgttgctttttcattaggtgaccttgattttgaaatcatgtccaccaagcctcgtaaatcaaagaccccccaaggtcctagtgtcacatttgaagctgaacttattgaatccaaggtgagagccattggagaatatgtgggtcgtgtattaaagtcttgcagtatcaagcaaaggcaaggatgtggtatacttctagttatagccgaccaaaagtataagagcagactgttggtggattgggccagccagggcaagaccaggtggccagccgtattaagggagcattgcctagccaattagatgaggttatggccgactagcttgtggaggtagtggttggctaggttgttgattttatggctagccctttggaggccagtacgatgttgtagtttgatcccttctgcatttagttggctttgcccccgacatgattgtcgtagagcctttatgcactcctgccaataactattcaacttcttttttggtaacacttcttagaggtggcattgggataccacgtctatgcgttatgttgtctaggattgtacacccatcatctatcctccttacccctactttttggcaaggtctttgtttggaagtatgctgctataggtgtatccatgttggttgtccaacacgtctatttcttttgaaataaggatgcttacttctttgaagaactgagtgggtaccaagtttgccttggttgttaaggcacaacttcctagtcgagcgagtgcatcgatttttgcatcatctttggggacttacgttttagtatagcctttgagttgacttaacatgtcatgatattagctcaaataggccattgagttgcatactcacctaggacatgacctccaactagttgagagtcgtggtgtatgtctaggtgttcaactttcacttcgtgtgctagcctgaggcacacatttggagcttcatgttcagtctcattgttagaagctttgaaactgacctttgttgcctcgtgtagccattgcccctaagtgttctacgggctaggcctgcattgggcaagtggtcaatgcatcttctaggttgagttgtcttactcttactcttgcttcttctctggctcttacttttctcccaaactttgagagatttagggagatatgcttctatgtttagccatgaagctggcgagagcttggcctttatggtcatgctaggtttacaggtggccttatattgcccgagcctcagtggttgattggtgtggtgggccaggtggttcaggttttggtgacacctattgccatggctggttggcaagcattacattgggagttttggtaggagagtgaagcatgcacagttctcctccttctcccttagacttcatagcgtaagggaatcattgaatttctccttttgccattattttggttagagctattgttgttacgcttgcctcaaatattttcattgttggagaattggcagaggtcgtctatgctagtcggcacgtcagacaacactcggggcagtatgatgccatgtgtcttgtaacatcctaactaacataggcgtatt

SEQ ID NO: 118631 - DNA, 861 bp, Cannabis sativa
atagagcaagaaaaaagcgaatgcaaaaaaaaaaaaaaaagagcaatcaaaaagcaaatgctgaaaaaaaaaagagagaaagcaaaaagcaaatgctccaaaaaaaaaaaacaggaagagcaagcaaaaaatgaatgctcaaaaaagcaaatagaggcaagaaaaaaatcaaacgctcggaagttaataataataagcaaagcaaaaagctaaagcttagaaaaatagagcactgcagaaagctaaagctaaaaagaaattgagcaaagcaaaaagcaaacgctcaaaaaaaagttgggcaaagcaaacacaaaagtccaacaaaaaaagaagcaaaagctcaaagaaaatgagagtagaaaaaagctcaaagatcaaagcacaaagcaagaactaaaggcaaaaaaccatgacgcaaaacaagaagctaaaatgcgttcagaaaaatattttaaagtataaagcttaagcatggagtaaataagcacaaatgcacaaagtgcttttttcgaactacgataggtttgatcccgtcaagggtacgtaggcaatctaaataataatagatgcagccaccaaattaaaagttcaaactggtctccctaagctcagatatttcttttcaaatgagagtgataaagaagaaatctataaggagagatagaaaattcaagtatcaaattctcaaagtcgctcgagcatcacacgtgtccatataaattcccacgcgcatgctcgagggggcatttgttgaatgccttttttttttcttcttcttttatttattataaaaataaaagataataataataaaaaagagaaagaatcgttcaattgaaaaaaataattaattaataattt

SEQ ID NO: 118632 - DNA, 3429 bp, Cannabis sativa
  modified_base (32)..(62): a, c, t, g, unknown or other
  modified_base (3373)..(3380): a, c, t, g, unknown or other
tttagaaagttcttatttaggatgttaataannnnnnnnnnnnnnnnnnnnnnnnnnnnnnnaaaataatttccaacaattcacagcgtgttgttaatcatattctcaaagagtatcaagcctgagggtcaaacatgattgtatacttaaggaacgctaaggatctattagcgtagctcaagtactactccatcaaacaagtgtcacgtgaacagaatgccaatgaacactcacttgccaaactggctagtactatagattttgatactcaaagtgtagttcccatcgaataactcgacaaatggagcattaacaatgactcagagcctatcccaatgattgaaaacactccatcatggatgatcccgattacacagtacttagaacaaggtattcttccaactgacaggaacaaagctaagagactgatgagaaatgaagctccattcttcatgcatggatgcagtaatgtacagaagaagtttctcaatgccacttttgaggtgtgtcatgaaagaagaagccaaacttctcatggtcaaggcacatgagggtttttgtggcaaccatgctcgggggaaaagcctttcaaagaagatcttgagacaagggtacttttggccaacaatgacagaagactcgatggactatgtcaagaggtgtgacaagtactgaaaaattctccaaaatgccaaaagcttccccaaatgaactcaagagtagcaaaaacattggccatttgttgtctagggaatcgacctcataggttcactacccaaatgggttgaagcatagcccttagccaccgtcacatcaaacaaagttcttagattcatggtcaagaatattatttacttatttggacttccaccaaagatagtgtcaaacaacagcacatagtttaatagtgacatctttattgatttttgcattagatatggaatcattaagagtttcttagcggttgccaatccacaagaatatggacaagtggaactagtcaaccaaactcttaaggatacattaaagaaacgcctagagcaagcaaaagggaattggcctaaataactgcccaaagtactatgggcctatcacacaatagaaagaatagcaacaagtcacactccttttgctctaacctatgggtacgaagctatgataaccgtagagcccacacctccatcctattgaagacctacatacgaccagcaaattaaccatcagtcattggttgaatccctagatggaatagaagagatcattgaaagatttgagcttagaaaggtggtgtatcagcaaagtgttgcaaaacattacaactataaggttaaagatggaaatttaagcctggagacttggtgttacaatgggtattcctgaacacgaaagacgcagtagcaggagtacttgggcctaattaggaaggaccatatgtcgtagttaaagtgcttgaacctaaaacttacaagttggcatgctatgactacaacttgaatccagtgccgataccgaggtattagaatagggtgcatctacgacggcactactaataaaagcaactttcttcaaaatagttcgcttcataataagatttaccttaccttatgtaagtgaatcgattgcctcttaattgatggcatcaatgaagttgtacctaggttaagagatccatcgctaaggtatggctcctatattaaagagtcgaacagggcattagtatagtgatgaccacttcaactaagcttggatgaagaagaaattctacaaatactacttttttctttcaacttagctcacaataatataattgaatttaatttgatgagaaaaagcattgaacaaaattttttttggtacttcattttaatcaatcaattacacctcacagacctgacgacactctctaagcgctaagtaaagattatgagttggtcttgagataacttcaatagtttcttaagtgagttaaacactgccacccacgaatcctcaaataagtcgagaatgctcacacgtgtaacaccactcaaacttcatgatcaagaaggcccagggggtttggtttagcaagtgaccaatgaaggcatttacttaatcacttgggggcacataggttatgttatggtatacgagagcgccatatgttacacgagtattcaattttttttttttgcacatctatgtaagtactctcatggtaaagataactttaagaagcagtgacattactctcagtaatcgactttcttaagacatggtgtatagtacaagtgttaaatggtcaagcgataaataataaagtaaattaaaaaataagtattggaataaaagttttattaagttggaaataatttttgatttaactaaaataaaattcaaatatcatttcaataaggcttatccacatcgaaaggccgcatgggaatatccaactaacacactaaagctaaatactaaaaataaaaaaataaaaacagactcaaaacatatcgtgaaagcctgttatgtcaacaattatttcctccctcccttcactctcagtaagaggtgcatcaccagtagaaggagggaagtcaggatggtcagggttgtagccttcatctcgtgaagtgtcttcgactactggttcaccaccatttgcagtgaagttaatttccttgagagtttcttcaccaaaatgctgctcacaccactttatgaagtcttgcacctctgtgtcagggaagcctttccagttgaatgacttggctccaccattaacagcctaagccgtgtagatgccataaaagcacaagccatcatagaaggtaacatcaagaagagcctgatccttaagggtagtcactctctttttcaagacgttgacttgtttttaagatcatctaccacaatagtctgctcatccagggcatcacgagaagattcttcaagattagaaggtttcttctgaacaactgcaaagttcttcttttgattattctcttgagtctaggcacaattagccacttctcaaagcttggacatttcactctcaagagaatcaaccttctccttcaaagtagacacatggtcttccgtagcgataacagggtcttctgcaacccctagattctcagcaagctccaccactttcttttgttcgttatccatggtgtaggtataaccaatacaagcctgaagacaagaaaatagtttcaggtgttgataaaataaaagaaagttaagctagaaggagacaagacaagacagttaccccaaatatgttggtgaagcatctttgggaaatcacatgcggaggcttggtgctaaccaaccgatgtaataggatgttcttgttgggttttgtgctctaaataaaactcattttaatatnnnnnnnnttactaattaataaaagatcagaaattgcttttatgttgcatggttcac

SEQ ID NO: 118633 - DNA, 1627 bp, Cannabis sativa
aataatataccatacaacaaaatagaaatataccgtacaacaaaatctatataccaacaactcaaaacaactcataaaaaattagaaaaattgacataactttacaataaaaaagattttaacaaaactagtatagatataccataatatttaaataatttgcttataattctaaaaaaattaataattttgaaatgaggacatttactaatacagttttatgatttagggtcatttgctatattttttttttaaatgaggacataaactaacatagtcctatgattttggaccatttactataattttgcaataaaaaataccgaaaaaaatataaaatatttaaaataaattaaaattattaaatattatctatttattataataatttatttttttagtaatatatgatatataaataaatttattatagtgttttttaatcaaataaagttcataacaactttagcttttagttgcatctttctataaattatttaataagctcatttttaagagtttaccaaatacttttatagtacaattttttttttcttttcaaaaaataccttttagctttctttaaaactgtgccaattgtatgggtgttcgcggtgtatgtggtgcgggttgtaacctttttttttaaaccaaaccgcatatgcagttattgtaatttctccaaccgacaccgcaccgcgagataataaaactacaaaaatcacaccgcaaaaatgtggtgtggtgtggtaccatttgagcggtttacactatcatcattatcgaacattataataaaaatttaaaaatcaatctataaagttttaacaatacaaaaaaaatcttattaaagttttaacatcgatcataacatatatatactaatcatcaagtcattatattaaattatctctaaaaaataatgtaatatttacgtatattacatatatttatttttatatgaaaaaagaataaaaatcatattataaaaaatttggtaactttataatatatagtgcggtgtggtttgaaccacaattgtaaaatttaaaactgcaaattgcacaccgcaccgcacggtttgaaaaattgcaaactacaaccgcatcgcaaaaaaatttaaaatgtattttttatgcggtgtagtctagtacgggcgatttgtacagtataagcaatttgacgaacatccttagccaattgggtcctaaatccttgagtttatataatagcacaaatctcttctctttaggtcattttttaaagtatcattttaagtctcacagcttattagttcctagttacctttcatccaattttactctctcgacttgaatattaagtggtcatttggcaatagatacttgatttattaaataaggtgagaataatcctctcttaataagccgattttgatcaattgaattaggctcaataactttcttaatatgtcgtgcgttcggatcttcctcccttgataatgtaaaaaaaatatataattgacatatgaataaaaagaaatattatccaaaaaaaaaatatgaactagaaaaaattacaacttttagtctcctaagcaaaataataccaggactagaaatgagataaaataagagagagagagaga

SEQ ID NO: 118634 - DNA, 1321 bp, Cannabis sativa
gggttgggttgttgggttctttcgtttcgtgggcagggacgaagagggaaagacggagagagagagaggaaaagagagagtgggaaaattaaatgcaaggggtgttttgggtagaatttgaaaatagtggaattgtttgtacaaattagtaagggctataaaatttgttatgtgttattttattagggctaaaaagtgaaattttcctttataaattagtgaagtgatttagttaattgcataagtgtaataaaatgataatattatgactagatattaagtaaaattggacaagaactactcattgaattattttttttgaataagaaaagattttgatcaatcctagtttaaatatgttgcattcaagactattgtcttacaatgtaattatccaattagaataaactattaaatattctacgaataagatatttttttaaattccccaccttaaaaaaaatcctataaatatatataggaagttttaatgattttattaaatatgtaattacggtggttacatttattttagttgttagattattattaaacggttgtcattaatttaaaaattataaataaattatctgtaacctgatacttacctaattttatttatttccttatgaataataaaataaaaaatatttataatcttcagttgtgaaaattatgttattaaatattttaattaaaaaattaatttattttaagtatataattaattttagtctaaaaataaaatttttacctgttaataacctgtatagaaggtcataaaaaattgtaattatcatagttatcatatcaatttggattttatgtttttataaaaatcttctatcaattttgtcaaatgataattcagaatcgatatatgtttataataaactcaatttttgctaaaataaaatataataataatttgattttgaagtgctatgactaggtttattacttttttttttgtaccagttcttgtgagaaatttgcgtcaggttggttatactaaaaaaattaacgaaaattgagttcatgatattattttgtactattttaaaaaatacaagctctaaagtattatttaacaaaataaagaatctaatcagttataaaaacacaatatccaaaatgatatttacccacttattttatgttcaatcaaaagagtgtaatagaggttgtttggttgtatttttaattttttagaatgtgtttttaaaagtgagaatagaaaataattttttgttattttaaaaatctaatggtgtttggctcaagttttttaaaactatttttttttttgaataaggaaatt

SEQ ID NO: 118635 - DNA, 5967 bp, Cannabis sativa
  modified_base (5567)..(5567): a, c, t, g, unknown or other
tggattacaagtataatttgaatctgtcactggatgataattcgaagaaatcaacagggggaaagaaaaataatcagaagccttcctcgcccaagggtgggaaaaattacgatggcaagaagaaagatagtgctggtgggaataactagaaaggatcacaaatgaacgccaagaaacgtgtggggtatttcatctgcaatggtcctcacatggccagggaatgtcctagtcgagagaagttaaatgccctaatcggtcaagatagaagaagcggtagcgagcaagagtgtgttgttgagtgacacttggcaaaactaaaccgtgagtgtgtgtgcatactaacgggttgttgggttggctgactagattggggtgaatctaggtcaatcgcacggaaaatttgagtgtgagaaattagccttgtgacaactggtatcagagcggaaattgtcttgggtaaattgaaaaaatcatggtgacgaatgctgaactatgtactcgagttgaaagactcgaagagttggttgattctcccaacgaagatgatggtgccagtttatttgttcttggtgaacaacattctgaacaactggagtcccttgaggcgctggctcgagatttgttgaaggaataatcagatcaagttgcgggttatggcagggccatgatggatatgcagagggaattcgatgagaagatgcagcgggtgttggacaaactatcgcccttttaattactgctacatccacatcgagagccatgaatctctccttcacagaattagataggaaaatgtactcgggtcgaactcttcatcataactacttcacattgtccatcatcataagtacttttaatgaactatgtactcgggttgaaagactcgaagagtttgttggttctcccaatgaagatgatggtgtcagtttgtttgatattggtgaacagcattctaaacaactggagtcccttaaggcgctggctcaagatttgttgaaggaatcatacaatcaagtttccggttgtgacacggccatgatggatatgcagaaggaatttgatgagaagatgaagggggtgttggacaaactgtcggacttgtctttttctgtgtaggagagattcattgctctcgatgcggatgtagcagtaattaaaagggaaatagcaaatctgtcacaaggaaccgagtcatattcagcccagtcctcaaaaatcaaagtccccaaaccgaaagccttcaatggcagtaggaatttgaaggaattggaggatttcctttgggatgtcgagcagtacttcaaggcagtaagaatttcagatgtggatagagtgaccattacaagcatgtatcttcagggtgatggaaaattatggtggcgcacccggatggaagaagatacacgtttgggaaggcccaatattgagacttgggacgtgttgaagaaggagttgaaagatcagttccttcgaggcaacacggcatggatcgctcctgagtccctaaagaaacttaagcacactggttcggtgcgagcgtatgcgaaagaatatagttctttgttactggatataaagaacatgtccgaggaggacaagatgttcaacttcttgtcaggattgaagccgtgtgcacaggctgaattgaggaggcaagcggtaactgatttaccattggcgattgtggctgccgagaaatttgtggattacaagtataatttgaatccgtcacaaggtgataattcaaagaaatccatggggggaaagaaaaataatcaaaagccttccacgtccaagggtgggcaaaattacgatgacaagaagaaagatggtgctggtgggaataactagaaaggatcacaaacaaatgccatgaaaggtgtggggtgtttcatctgcaatggtcctcacattgcgagggaatgtcctagtcgagagaagttgaatgccctaatcatacaagatggaagaagtggcagcgagcaagaaactacttctagaatgaatcctttacaacttctcaattctatcactacgaagaaatcaaatctgttcaaaggtttgatatatgtgaaggcgtttgtcaatgggagagaagtgacggccatggtggattcaggggcaacgaataatttcgttgcacagaaggaagcaaccagacttgttctggaagtgatcaagagttcaactcggttgaaggcagtaaactcaaaagaaaaaatgattcaaagatctgctacggtgatgttaaaggttggggcgtgggagtctcagtccaaactcatggtggtcccgttagatgattttgatgtgattcttagagtagaatttctgagtgcagccaaggcaatggttgcatcccatttgagaggggttatgatttgtttggaggactgcccatgctttgttgaagcaatctcctcaagtcagaataaagagatgggcattgtgttggaatcagcgacccgattcgggaactctattaagaagaaacgcaaccaggcatatgtggctaccttgatagagataaaactagatcagtgggtagaagtacccgatgaagtgactcgattattggaggagtttcccgacaccatgccagaagagtttccgaaggaactccctcctaggagggcgattgatcacaaaattgaattaatacctggagcggttctgccagccaaggcactgtacaagatgggtccttcagagtttgaagaactcagaaaacaattgaacggaatggtggaatccagatatatggtgccctccaaagctccatatggtgctccggtattgtttcaaaagaagtcagattgatcgttgcgaatgtgtgtggattatagggctttgaataaagtcacagtgaagaacaagtatctggtgccaaatgcggcagacttgttcgataggcttacaaaagcatcatacttcaccaagttggacctctgggcgaggtactggcaggttcaaattgtggtggggaacgaagcaaagacaacttgtgtaacaatgtatgggtcttttaaattcttgatgatgccttttagtttgacaaatgcccctgaaacattctgcaatttgatgaacgatgtactatacaaattttcggatcaattcgttgtagtatatcttgatgatattgtgatttatagtaactctttagagcaacacttgcaacatctaaggaaggtgttgacaaggctgagagaggaaaatttgtacatttaaaaggagaaatgcgagttctgtagaaaggaagtgaaattccttggtcattgggttggccaggggaagctgagaatggatgaaggtaaaataaaggcaatcatggattagcctattcccactaaggtagcggagttgccaccatttttgggattcgctaattagtatcggaagttcatcaaagggtactcaaagaagttgagcgttgttactgatctccttaaaaaggatcagaaatggtgttggtccgaagaatgcaacgaggcatttgagaagctgaaagtagcagtgtcttcggaacagataataaagttgcttgattttgatctaccatttgaagtacaaatagatgcatcagattgtgccttgggtggagtactggtgcaggatggtcatccaatagcttttgagagtcgaaagttaatggatgttgaacaaaggttttctacccatgagaaggaaatggctgtggtagtgcattgtttagatgtgtggaggcactatcttctaggaacaaaatttatagtggtgacaaataatgtggccaatacctactttcaatctaagaagaagctaaccccaaagcaggctcgttggcagaagtatttggctaaatttgattttttatgggtgcatagatcggggaagcagaattaagtgcctgatgcacttagccgaaaagatgtacatgcttttgttggtgcgttgactcagttgagtacacaactttcttcgaccgggtgagggagcagtcactggtggactttttgaggaagcatgaactggagaacttgtgcggtattgggaagaaggtggactttctctatgccaagggtggcagattgtttatatcgaacagtcgaactttaagaaggaaattgcttaaagaaacccacgatactaagtgggctggtcacccaggtctggctaggatgctagctttactgttgaagtcttactattggcagaagatggagcaagacatagaggtccatgtgaagacctgtcttgtatatcaacaagataagagagaaagaaggcaagaagttgggttgcttcaacctctaccaatacttgagaaaccatggtagtcaataagcatggatttcattgtgagatttctggaagtaaaggggtttcggtctatctaggtggtggtggatcgattctcaaaatacgacatattcattcctgcgcctcatgcgtgtccagcagatgtggcagcataatttatcatgaaaaatattgtcaagtactttgggttgcccaaagacatcataagtgattaggattccaaattcacggagaggttttggatgacattgtacaacatgcttggttcagacacaaagttttcaacagaaaccatcccaatactggaggatagacggagagaatgaatcagttgcttgaagagtacttgcggcattatgttactgctagtcagaggaattcggttgaactgcttgatgtggcccaattttgttataacattcaacaatcttctacaacgggaatgagtccagcagagcttgtcttaagaagacaaccgctgacgccacacgaggtggcgaaatagaagtctcaaggtgtctggccagcgacatactagttcgcgagggaaaggactgagttgctggaattggccagggacagcctgggaaaagcttcatggaggatgaagaaatacgcagacaagcataggagagacttggaattttctgttggagatcgagtgttgctgaaactcactcctgagatttggaagaagataactgattaacggtatcacaagggcttggtctagaaatatgatggtcccttcaagattgtccataaattgggggttgtaacatacaaactaaagctaccggaatgcttcaagctacatccgactttccatgttagtttccagaagaaatttcatgagcacaaagacaaaggaaggcaacagatggcgtgggctttacctagtgtgaggaaacaatttgagaagaagttgtgaaagatctacgatcatcgcactcttggagtcagccaaaagaactagagaatcaagtaattggttcaatgtgaaggtgaagatgtggcagatgctacatgggaaaaggctgtgactttgtggcagtttgaagacaaggtacagagctatattagaaatatatcgacgaggacatcgatttcttccggtgggggtggtttgtgagaccctatgtaacgccctatcaaccagggacgccacgtgtatgatttcataaaattcatatatagatactatataattataccaaaagtgtgggtaattaaatttttttttgtaattaaaatcaagcatgtanaaacttctttatagcagaagataagtaatgagaactatggggaccccttgttttcaaaatagtacaaactagtttactagtacttttacaatataaactttgtaatcccaaaatactatcaaaacgaatcatcctgttcatttgaccgatacactgcgactgatatgtacattgcagctacgacctcgagctcatggctgctcaacctttgctttcctcttacatgcaccataaagcacatgtgagtcacagagactcaacaagaaaagtgaaataaacaataactgataatacccatcagctctatctcatgtcaacatgcttacacatttacataacatcataaaagcacaatcttggtactttataaagtactccttttaccactcgttaaccacga

SEQ ID NO: 118636 - DNA, 1051 bp, Cannabis sativa
  modified_base (27)..(42): a, c, t, g, unknown or other
taggatgttaatcaaacatacttggtnnnnnnnnnnnnnnnnggtaaaatatttccaacaacactttggttggagagctattacagggacactagcaaccaaagttcaacttaatactaagcatgtccatattaacccgaaatgtacattttgaaatattgcagatgagtcaatcatacatgttctggttggttgctcttatgctatgtcatgttggcacaaatcatcactcaacatagcagccttctctcagctacattttcaagattggtttcaagctttagtacagatcaataatggtgaccagatcgaagaagctttaatggtggattgggaaattttgaatgcaaggaataacctcctatggaatcagaaagtcaggaaaacaacagaagtagttatatcaacacgttctaatctttaccaatggcaaagtgctcaacaacacagacttgaacctctattatctctttatgaggtaggtaaggaggtggagcactgtactaagcaagtaacaaattttaatctaatcctgctaaaccgtgattactaggaataagagcagaaatttaaactttaattttattacagagtaaaaaatataacttgtaactatttaatgttacaaatattctaaaagatcatacacgtttcgggatcccataaaaacctttacaaaacattacaagttatttttacatgccgacctaaacgacaaaaactgagaatacaaaatacatcatctggtagacccaacccgcgtggtctagtgtgacccaaacatgtacaatacaccgtcaagccctcgaactcatggttgatcacaaactgatttaccctttcctgcacagtagagcacccatgagccaagcccagcaagacagtataaataataatatgcaatatttcttaattcaaataaatattgatggcatcgaatctattatttattttgttgggttttgtgctctaaataaaattcatttcaatataatcaaatttattaattaataaaagatcataaatcccttttaatgttgcatggttcaca

SEQ ID NO: 118637 - DNA, 837 bp, Cannabis sativa
ctattaggcactaatggtattgtttctttaagaaattaaaagactgtctaatagacatgctcctcactttgtacctttcgcttagtcatttgaaacctgtcacaagttattaacataggattttgttcaggaaagacaacagaaaatgtttaaaaattatgtttcttcacattaaatttagtaacatctgaatgcataagcctcaagaaaataaggggcaaatgccagaatctcagttacaaatccatttcggcaatgtacagcgctaataacactattaaaaacaagtgttacagagactctaatttattgcctttcaacacacaaatcacaaataaagaaaagggtatctctttacattaaaaacactataatgaatgaaatatgggaacatctgaatgcgtaaatctcagaaaaataaagtaaaaacgccagaatctcagttcccgggttcaatttcggcaatgtacagcgctgaaaaacgctactgaaataaagcgttacagagactctaatttattgccttcaaaatactcaaataaaatttcataataataaaagggctcagagattataaaagtgtttgcatcaacaagctcagtttttcaagctttcaaagtttgatggtataaaaatttagtcttcactgccactgtaaaataagaacaattaaattcttaatgacaaggcctcagaaagatttgtaagatgattacatcagacatcagatggtacggacaaatttggaaaaatcactggccattgaatcatatgatttaatcatgtaaagaagaaatcaatacaaatcaagaaagaatcatacaaaatttgtcaaaa

SEQ ID NO: 118638 - DNA, 2190 bp, Cannabis sativa
  modified_base (2124)..(2133): a, c, t, g, unknown or other
ccaaaatagtatttacccattattataaattatagaaaataagatgttagaaaaataaaatatcatctcacatctctatattatcattattttttcacttttgagaatatcttttttatttttaacaattcttttggagatgaattattattgtttgattaatttttttaatgctaaagatgagtatcatgatcacataatcaataaaaaatgtcaaaaaacttcttttattacaaatatttctctttcgacatattttaaacattacatttgtaaactcaatcattttaatatacttaatacacattaaaatagtgtattaatcactattacacataaattatacaatttaaaattcaacttaaaaattttttgtataaacttgaaagactatatatttattatacattacttgaataatattatgacaaaaaaattaaaattaatagtttgtaacttcactaaaaagtaaaacaacaaaaaaatgaatataaaagaacattatgacaaaagtaacttaataaaattaaaattttgaagagcaatcgaaagtcattagttaatgaatttattattaacatatttattggtcggttacttatttttttttaataaaattaaagctaattaaatgagaagctaataaaatttaaaaaattaagagaagcaattgaataagtttgcatgtacctcctacatgatcttgtttcaaatgatataatatcaaaagtcattagaattctttatgtttctctctcttttttttttttttttgaaatcaatttctctcttctcttcaaaattccaaacgatataataaataaaataatcaaacattcacacaatgtttatttatttatttttcaaattaaaatcactgatttgttagtgaaaaaatttaatagaacatttctattataattattaatattaccattttcttattcttgttaaaaaaaattaaagttatgtcacttattttcttttattatttatttatttttataaattcatagcgtatatgcttatatattttgattacaattgttaaataatatcttagactcaatagaaattacgtattagagtgttctattatggagttcactaattgtggactaaaaacattttaaatggtatcatcaatagaaaaacaataaacaataggtttctcttttttctttctttccttttgaatacaaaattaaatttaaaaatgcaacaaatatacatctacactaaatgagaatcaaatacataaatgataatagaccctaaatattaaggtaattttcagttggattttgaatagaaactctctttcacattgataaaataaaataacatataatactaagaaaatagacaaaatatagggagagataagtgagatagatacacttgaatctaattattaaaaactaaatacacttgacaaaacaaaggcatagatgagcgtgaataatggcaaaagagacaattccaatcattaatattttagagctctccgaaagagtttaaaaataggggagcgaggctaataagtggcttcatggcagtgcaaaagtgttttgcgggggcatccgtcgatcctctcacttgtattctttcatcgagatacgaaaaaatatgattgagttaggaaagttcaaacttaatattcttagataatttgtgaaagactattttgtacaaaaaaaaaataagctcgatataataatgaaatgattaattttttttttctcgacaatataaaaattaataattgatagacttcccttaatcacttatataactgtgaacgtatagtacatgtacaacaatataataatatttcaagcaaatcaatttaaaaaagaaaaaaaaaactatatattaattttgagattttagtgtactttcataataacttaaaaaagaagcacacatagatctatctttaataatatcgagaatgataaaattaaatgcaatattttttttgtgcattcaaattgtgaaaagaaatgatgataagaataaaagttgaataataaagtcatatatatttattttaatttaattttataactgaaacatttatatgcatataaatatgttgggttctatgccctaaataaaacnnnnnnnnnnataattagatttacttattaatatagatcagaaataacatttagtgttgcatggttc

SEQ ID NO: 118639 - DNA, 2566 bp, Cannabis sativa
  modified_base (1763)..(1767): a, c, t, g, unknown or other
  modified_base (2515)..(2522): a, c, t, g, unknown or other
aggtataatgtttatattccaagcattcatggttttgccttggacactagttcccatgttaccagctggtcaacaatgtgtctctctcaccaactccaaaatacccctacaagaagcagttccgtgattagagcaataagcctctctaatctgttgagacgggttcgctctctgtttttcttggataatgcgttggctttcaatgttcttctaattttccatcaactagtgttaataccgttcgtgttgcttatcgagagagttgcgcaactattgttgcaagtcaaccacagttttgttgagctgagcaacctgaggattgacctcctcagggtcttctatctccacaggtggctcctcagatgggatctggtcattggtgccagtcccaggagctgctgctagtggccttggaggacgagttgaggagctggttttgaggcctgctcctgatgccaagggcacatgagtagtcccagtagtatctccatcaattggcgtgcccccagttgattggccaggtcctggagtctgtctatcaacacttatagaatatgtttgtaatgactccataattaaattatggattagtagggaaactaacattaattatctttattttataactatatatgaataattgtgttgtgggcccaattttttgaaatgggtactagagatataatttctcaattccagagatttattaaactctaagtgtattatttatactatatgtcaaaaaatataatttttgctcagtgatgatgaaaaattcaatgggtggtcattagagtcacatgggtgagtttagaaccttttatctagtgggagaaacataagcaatgtttataatatcgtaattaggcggggttatggttttggaccattttacccctatacctatatgctgcttaagcttgaagtaaaggacaaaagggtctttttgccaaggacttagtgataatttttaaataattctattttatccttaatattattttcttggctgagttaagaaagtaattaatgaaattagttttttggttagataataccaattagatttctctctcctcactaaactctctttctctctctctcagctccttcaaaccccaaaacaaaaacaaggattttaatgtcaatggaagccttcctcagcaagtttaaaaggggaaattgtaagcttaacctacggtatgattctaacctttgttttctttgaatttagtaagtttttcttaggttctaggatgaaatttttcctagaatggttctgttcgaactagtagcttttgggtttgaagtttgggtaaacttgtggttaattatatcttgtttgaagttattttaaaccctgattcttgagttgagcaactttgagatcaagaactcaaacttggctcaacaatggaagattttatttttatgtatgtatgctattgttattgcttgaattttactgttgggtgtctttgcaggtattctagaaagttttgttgagtttaggattgatttgagtgagatttggggttttttgggttctctacagagaaatggttaatcggttctatagaatcgattaaacgtttctccaagtaggaccataaaaactagttatccattcgggattccagtttacagatttgggaagtttctagagccttagttttgatgttttctcaatatttagggtattgccacgctatttattgataaggaaacttctagttttgagtttaggtccccaaaaagggttnnnnnaagttgtttacccatttatgtgattgtgacataggtcctccattgaacgcgtgatttcccattcacgtcgaccgacacacttgaatttggaaacgaggtaagactagcatagaatatctatgtatatgtgcacgtgtattttatgtatgttgttatgtgattcatatactaccaacactagtatagtagttgtactgagtgcatttgtagagtatatgacttttaaagggtatgattcggtgttaccaacactagtaaggttaagtacatagtgcatgtggtacaacactcagtagtactcgaagtacggttcagccctaccaacactagtatattagcagtacttagtgcatgtggtatagaggttggacttctgttaagaacattcttgatcgtctatttagccttatggataggtgtatgggcgcctaaatacaagtcactaatatatatattatgttatatacttttcttaatgactcttttgactcacatatattattttcatgtgtaggtaaaggaaaggctaaagctgaacattagtgtgtccagagctcagggacgattctacatgtcaagatggtgcaacctggagagttcagtctcgggacgacttgggcttcattttatagttgctatgtgacatgtttgtaaattttattttgaaaattaatataagatttaaaagcgggatcttagctttttgttgttggaaattattttacccggatctagatttactaacaannnnnnnngattaacaacctaatatgaattccaaaacaatgaaaataaacac

SEQ ID NO: 118640 - DNA, 846 bp, Cannabis sativa
caatgtcacaaataagctgcattggctcatcacagattcataatagaaaatcaaaccagaaaccataggaaaaacacgaaccttctttgcaccaggtgttaggttccgaagggtatcaaaatgtgaatttattctaggccctgcgtcttttctctgcctcgctatggttcttcaaagcctcaatagttctctcggccgacaccccttttcgctccaacttcgcaggagcctctacaagctctcctttcacgctatccaaaaccaacccacatcttatagaagaatttcccaggtatccatcgtttcttatctcaaaatcagagttagaaacgcctgaactccacgaaaaaggttccatggcaaggcaacaagagtgaaaagtgaccaaagaaaattaacaaacagtttatgatcaaaacttcagatgaggaatgggaccagaagacagggttaagtgttagtgaacaggagtttgagagccaaaaacacgatcttgtacgacgtagttttgggtttatatgattgctactaactatataagttccaaagaagaatgcttgaatggaaaaaaagtcaccattttcttttatgtcaagtaatggttaagatgttttgaccgtttctcgtaatgtaaaacaaaaaacaaacccaataaagaatttgtgagctaagcagcaaaattggaggctttgaaagtggtcagtggtcagaaacagtgtccactatactatccacaccacgaggcttaaaatataaagctagtgcttttttcttttaggttgttcacatatacacacattattttattgtgaaaaaacacacattattttaaagagtattactata

SEQ ID NO: 118641 - DNA, 1590 bp, Cannabis sativa
acatgttaaagttcagggggcaaagtcctaattagcatttttacatttttatgaaaactttttccaatatagttgtattatttagttttatataccgcacataaaaaaattctctagtaagttagtaggggtatttattcaatctaattcgcactatttgctcatatttcatccgatccgcatgaagtgcgaattttatattttcgaaccaatttaatctgcacactagctcaaatttaattcgcaaaagtacagattaaatcgattattttggattagttacttttcaatattatattatttaatttttatttaaaaaaaatatattatttttttcttataactaacaacaaaataaaataaattattgttggtttatatcttttatcttatatatgttaaatatgtttatataatataatttttttaatactataatttaaatttaaactcattgcacatatttaaaaatatatatttctattatcatttttttattaaaaaaatatatttaaatgtatgatatatcaaaaataatgaaaagtattataaaattaaaagtattacgataattaaattaaaattataattaatataaattttaaatattattatattttattttgataaataacacttacattaaactttttttaataaaaaataatcttgtttattgaataacatcaatattaaaaaaaattaattatacaactaaaaatatgcataactaaaataaaaatctaagaacataactaaatataggagcattacttacacataatattaatctaatatatataaaattaccacatattttgttacattagttttttctatcacatctttatttttacctaaattccccaacttagaatgataaacatttctccatataatactgtatgatctaattaagagtgtatttgtgtacaattttataatttttatatgaaaatattttacacattcattaaaaaaaaaattgaaggaatataataaattatatttgtataactaattatctctagtccaaataattaaagcaaaatcttatatgtcgtatatatttattccatcaaatcttgaaagaataatttaaaaaaatcaagaattaattctatgggatatgatataaaccacacaattcctaatgcatatatttcccacttgtgcataacatcctattgttggtattatttgtgataaaggatgagacctaatagattcttattcattctcatcaattaaacttcaaattatgattaatttctataattatgtggtatatatgctattcttaatttttaggttgaagtaacagttttattaaaagcatcttcaatcttgatactaaattgtgtcaaaaattctttttactctaattataatgccaaaaattatattaaaaaaatattttttaatgttatattatttttgggggaatttatatattgaatttttttttttgttatttacattttttttttagatttttttcgtttttataaaagttatttttattttgagattatgttgtttccatttcgatgttattttatttttattttttataaatgaataaaaaat

SEQ ID NO: 118642 - DNA, 984 bp, Cannabis sativa
  modified_base (939)..(953): a, c, t, g, unknown or other
ggtgaaaaccaccccttcatttttgtctcgtgaccaaacaataatagattattgtgagatcatatttgggaccattttggtcacactgtttttggatcaatgccattaatttgattagagggaccaaacacaattcttgtggtacatctttgcctattgcatgcaaccccgtgggcctgtcagaaggaaggcccgacaggcccatagcctacaaagaacgagaggcccatggcccacaaagaaaaagtatgcaacaaaccagaaaaaaaaaagtccacaaaaatatcataaaaatccttttaaacagtctaaattactaaactccattcacaagctgtgatcaaattgttattatgtaatattgtgtttgtgaacttcattgatcacaatttcaaatcaatgttttttctttattcgagctaaaaaaaagcattgtgttttatatagaagaatattgtgtgagacacttttgttgagtacaaataataattattaatttatttttgtcatttattttaaaatttatgaaaaataaaattgtatgtttattaattattatttatgtgtgaaatttgttgtcagatacattgcaaaaccattatgtatacatcaaaatgttatttagcttgtggaaatataacaaattaattataaaattattaaactttaaataaataattaacaatgacaagattaacaatcataattagtaataggagaaaaataaagatgaacgccaaaaaacaactaaactaagaaataaaaaaattaatatcaatatatatactggttcaaattcgaaagatcaatgtctctattgatttagcaagagcacgtacaatacagaaaattctttttcatttacaaaagattctttatacaaaaacctaaagtcaatttctctcttttctctatatctttctctctctctctctctcnnnnnnnnnnnnnnnctctctctctctctctttatatatgtatata

SEQ ID NO: 118643 - DNA, 1397 bp, Cannabis sativa
gtaaatttagacccaaatgacccgaccaaatgtgttaacattggaaaggattgggggaagaactaaattatcaattaatcacagtttttaaggcaaaccaagaccagtttatttggagccattcagatatggtcgggatcgagcaaaatgtgattttctactatcatgacatagttacctcttacgcattaaagcgccaagagaggcatcctttacatcaaaagcggcaaaacgctttgaaaggagaggttgacaaattgttaactaacaattttattagagaagcattttatcccacatggatatcaaaccctgttctcgttcctaaaccaaacgggatgtggagaacctacataaacttctctgacctgaataaagcatgtctgacagatttctttttgttactaaggattgatcagttggttgatgcgattgtagggcacgagctgataacctttatggatgcatattctggacacaactagataaaaatgcatatcccaaatcaagaatgtacacgcttcattacacttatacagtactatattttttcaacagattaataactactacattctatgcttttgttgtagctgttactacaaattttattaaatgttgattaggttgagtaaaatgaaacatgtcaatatattagcagtctaactcatttttatttttaaataattattataagctcttaaactaaataacaaaaggtcttgaaagatagaaaaaaataatagaaatatgttattatttatttattagaattaaataattattttttctttttttcaattttgaaattatttaataattattttaattgaaagtgtacaattaatcaattgacatatgttagtttaatcaaatttaataagatttattgaaattgatattaaaagttgcaagaaaaacataaaattaatatttaatttattgaaaaaatataacatatagtatatttaatcagtcaaataaaatatataatatataagtgtataaaattaaaaatataaaatattttatttagggctttttagcataaatttttcaaagtagatctagtgattatatagaaatattctgatacatgcaaaatgacaaattaaccaaaaaaacaaaacgaaaagatatataataagtacaaatcttaaacaacatgtgtatatgacaatgagtattacgagtacttatttatatattagtgaattattttatacatcattttataatttttttttttttaatttatagtttttatgttgttttagtgtttattacaaaaatctgctacttttagtgataatattttagtcacaatataaatttttagtcataacaaaaaattacttatgactaaaacatagtattacaagttgtcactaatttag

SEQ ID NO: 118644 - DNA, 3897 bp, Cannabis sativa
  modified_base (54)..(54): a, c, t, g, unknown or other
  modified_base (2776)..(2781): a, c, t, g, unknown or other
  modified_base (3721)..(3725): a, c, t, g, unknown or other
  modified_base (3853)..(3857): a, c, t, g, unknown or other
aaccatgcaacatagaatgattttcgatcttttattaattagtaaatatgattntattgaaatgagttttatttaaagcagaaaacccaacatcaacttatctaaatgcttctaagaatgtgggagtggctcaattttcactacctaataatatcaaacaaagaatcaacaatgttgagaataagattaatgcttcttctactattctccaacaaggaacaagggacaatgtcgataggattcaacattttttagattttgtgtcagtaaaatctatctatatgtaatatattacatgttttagaagtttatgcaatacacctttgtgtttttttgcttctaaatagatataaaattattgtttttcttttatatacttatatcaattgtatttatttaaatattttgattgattttatcgttattcagttttagaagacacaaaattttcattttagttttactgtagaaaaattaggactgatgatagaatcaaattaactaaaacttaaacaacaaacaattagcaatgacaagattaagaaatcataaacaataatcgaagataaaatagggatgaacagagcattaaacccataaacaattaaagtagtagaacaattaaatcaacgtcaagatatatattggttcaagtcgtatagatcgatgtgatctatggctctactccaattttggaacaccaccaaatcttctttattgattgagcaagaatagggtacaatatatttgagatagattctatattggattctctcaaagtattttaactcccacactcttatccaataatctcattcatccataagagattcttcatacaaaatccaaatccaatctctctcttttctttatacctctctctcaatctttctctctcaagatcacatcttaaaactcgtctgatctttttttccttcttctaaaatgctaagtgttggtggtatttatatgttcaggatagagatcctatagtcagtggctgaaagtgctaagttgttaagttagttacgacttaaaaaacttaacaaacttctcgtaataataactccatgccgtcttaagttgaagtgcttccggatgagatgtacgcttcctggaagatagaccaaaacatacgctgaagggtctttctgaataggacagacacaactagagtcgactatctaggactcttttctgggagagaacaactagtcatctagaacatctttctggaggaagactagctatcttgaagaaaaatttactaagctagatctggttctagatagactagatctagtagttataacttggatgatgcaagtgaattcctaagtttaggtttttcttagtacattgaatatggatattcattaccttgcataacttgagaatcgatgtttaattagtgttctgtaactttgtttgatatagaaatatattgaactaagtggtagaactcaatttgtgagttttagaaaaatctcataaacacaagaaaaattatgttaactctgtgcaactttgctgtagtaatgttgaaaaattgggtagaattaacaaaggggggatttagctattcaagtctattattccataaatactttttcttgcagataatttttcaatatttgttgtcttattttgagcatatttttattgtcaccaattgatttcactttcatcaatcatccatttatttttggtttattttttctaacaaaagactttaagttgttaactagttgaatttacatctattttaatttacaatccctatggagacgatactcaacttatcattacattacttgttgttgattgcgcgcacttgcgtataaatataatttttataacaaatatatattaaatcaaaacataaattacataaaataaataaatacctcttgaagcctattagggcattcttgattcttttcgtaagttgtgtcatttaggattgattagaaactcacaccgtagtctttcagattgatctaccacatagaaggagcagtgtgggctactaagataaagtgtatagtttattcttgttaaattctcaatacatgagcaagaacggtttgagagagaaaaatagtttttcttttctctctgatatttcaaaaataacagtgtaaaaaaacttcatctaatttctcaaaacaagcttctatttataatagttaattctcaattaattaaatcatatttaattatttaaataatatctatacccgaattcggttactgatatttctaataaggaaatctctcaaccacttgagagaatacctcaactacttttaggggatatcttaaccaacttgaaatatctataaccacttttcaaattcaaatatttatctaattgaattaattaattaaccgaaaaagataaaaccagtagggacaccctactttagggtagacgcctaccttgtcttaattaagacaagaatgatgtcttttgtcttaatgaattttgtcttaacaattattttcatgacaaattttagctttataacttttgtattttcccctatttgattaatttaaaaaaaaattatttgtttattacaaaaataaagaattactattttgccaattaaaaatagatttttctgaacaacattaaataactctttatccttatccttgatagtattttaaggtggcgattcgaagaccatggacctataattctaagctccaattaactagagttttttttagtctcatcaaccaaataatcttgtttattaattccatnnnnnntccactataaatatagaattgaactcttggtacttatagaattatatctactgagttttactgtattgtccattgatataattaattctagtgattaccccttctcgtattagttcgtaattagttttggtcaagttatcattttactcttataatcacttctttatcatttagtaccattaattcactagtacaagtataatttagatcccatctaaatttgtgtgcaactttccagttctagaattaacacataaagggaaccaacattcgattcgttagaaaagtcgggattttattattgtagatcatgtttcgagccatccacattattagattcccaaaatagacattataagaatcatcttctctgagaactttaacgagtgaatcaaaaaaactaataacatgaacaagatttcatgattactcaagatttaggttgatctactaattgatcatcattatgatatgaattaggtctttatagtaaatggtaagtttgataaagactatattcatatcagtccttatcatatataatctctattatatacaacacattcacttagatgtcatgctacatcagtaatctgaatcgagattacttgcactgactaacaaacatcagtgaaacgtactgacaaccattgattaaagattcctaaactttaatatgttgctaacttttttattcatgattaagtgatcttaattctccatacaactacaagtcacaacctcatatatgaaaaaagaatattccaatatttatatataaattattcaatattaataatttaatattcatgcataaatcaaaatgttcaattcttattaataatcataaatatctttacaggcttatcagggcatagaccctaacagaaacttcacataacattcatcaaatcacataaatgttggaattattttaccnnnnnctagatttactaacaagtatgtaactaacatcctaaatatgaacttcttaaacgatatgaaataattacatataaagttttaggaaccttacagtggttgcaacggaatataatgtctccttccactnnnnnctctaacccttgtatactttctgtagcagagtatcaccaa

SEQ ID NO: 118645 - DNA, 1071 bp, Cannabis sativa
  modified_base (174)..(179): a, c, t, g, unknown or other
ctttgaccatttctaaatattataatacaagataatacaaactatttcttatgtattaaataataagattcatattatatgaaaatttatagtcgtaataattaatacattcaatttatttaatacaatatgtaccaattaatgggcattataaaaaatcttacttttagtcannnnnnaacttgtgactaaaagtaaataagttgtgacttattataaattatcattcatacgttgtgacttaacaatttgtggctaaaagtattagtcatataaatcataatttgttgtgactaaaactaaattagtaacagctagtaactaaatactatgttttagtcataaataactttttgttatcaataaaagttatatttaatcataataaaatttatgttgtgactaaaagattatcactaaattaaggagtattttttttagtgggatcctaaaaaaatagaaataaaagtataatattttaaaaatattaagtatgttgcgcactacagttgagacttttaataagttgatgagatggattactgaagcaaatgactccattttccaatgcagttttttcagttaccattctaattatagttgttgtaagtcatttggcgagcaagaaatacaattttttgggaacacagttattagaagagagattatattgttagggatgttcaatatatattgtacatataatagaataagtaaaattattctagttaaaactaaaagtactgtagatattgattggttttggactttgaaccatgtatatatagtttgtttgttgcattttgttttgtatagttttgcttatcaataaaattatttacttaccaaacatatatattaagtatatgtaccaaaaaaaaaaagaatataattaagtgaactacttcgaaaatattagatatatttacaaaaaaagaaagtgtaaaagtgtacataatttttaagaacattagtgtatgtttgatattataattaaaaaaaatattttttgtttttaaaaatagaaaattattttttgaaaacaatttgacttgtttggccttgtttttt

SEQ ID NO: 118646 - DNA, 1233 bp, Cannabis sativa
aacgcatttttgtttttcaaaagcaaaatttttaacaataaaaattttacctttattttttgattaaaaaattagaaaacaaaaatattaccaaaccacacctaaatgtgtattttttgtaattaatcatttgtcaaattatggtcaaactttacataatttagttaaattaagtctaagatgggtggcaaccaccggcttagagcatatttggtattactttttgttttttgtttttaaaaaagtatttttagaaaagagaacaaaaaatagtttttaaaatttgtaaaacacaagtcgcgtttggttagtgtttttaaaaataatattaaccaaaactatttttttaaaaaatagtttgttgtttttaaaattcttattttttgtaactttgttttctaaaaattgtttttaaaaaataaggctaaacaagtctaattatttataaaaaccaattttctattttaaaaacaaaatataatttttaattatgatatcaaatatggacttagtttttctgatccttttattggcaaagttgtggtttgtctattaactatggagacgacaatttttttaaaacatctttaatttgtgatgattgagatttttgagacagttattaatatgctaaagggaacttatttcagttgaagtattattataactaaatgcatcaatgtaatatattttctaatttgttcgtagattataatttttttattattatttttagacttaatttgtaattttacggctcgtaatgtgactaaatgaacttttgttcaaaacttaactaatatgattgagatatcaacaataacaataacaataaacattatataataatcaggaggtgtaattattctttttatatataaacacttgttttcaaaaatagaaaaaataaagactatagggtctatgataatcttaattaattatttcttaaattaaggtgaagaatattatgttatattatataacatattaacataatatgtgataaattattaattttgtcaaatactaacacacaatagaaatttacatagtatgaacataaaatcataaaaaatgagttgcaaatcccttaaagatgataaaaacaaatttttgtaactcttctccacagggccggccctcacacaaagtgggccatagggagaaaaaaaaattttgggcccttatgttagaaaaaatgtggtatttttcaaaatcggtaaaaaaatg

SEQ ID NO: 118647 - DNA, 1294 bp, Cannabis sativa
  modified_base (49)..(62): a, c, t, g, unknown or other
aatttttagtggttcacgtaatatcagttttaaaaaataattataaatnnnnnnnnnnnnnnaaaaaatcagaaaaaaaaaatttaaaaatatatttttctagctactcatgttcaatgtcaaacaatatccatctaactcctaataaattgcttagctactcatgtttatcgtagcaaattcacacatattaattcagaatagaagaagaaaatagagaaaaaaataatgattaaaaccccgtcttaaaaaccttcgcgattgattttgctcttcaattttcgtacacctgaatcgcttgttgaaaaatattgaagtcccactctttttatagctaaaaaaagataaaaaagataaaaaaaaaatatcatctttttgaaaattaaaggggtgggcctcggcatggaaattctatgcctcagcctgtgtttccaaatcttcacgtcctccatagattgctagacacgggcctacgcattggatttctatgtctagacataacccctctttatttgggtagtgagttttctactacatcgattgatactattttagtcataactgtcttgatattgctcagaattagacgattcaagatgtttcgaaaagataaaagagagatctagaacttttatactttgactttctccaaaatttgattaaaaaatagtgtaatttaggcttgaaattttagctttattttctttctattttatagataatctttttgtgagatttgaccaatttatacatttcaagtgtcgaaacctaaaattaaaaaaaaaaaaacaaccataattttattcgaaaaagtgatgatgaaaaagaaaattaactctaaaaataacataaataataagctaaaaatatccaacactcttacaaataataaaaaaaagttttttaaatcagtatatgagatttgtattatataatatattgtgcacaaagaattatgttatatatgtaagaatagatatatactcatagatgtttaatttggctcttctggggaaacaatattggcgattgttggttaatgatgactctttggttagtaggctctataaggcaaaatattatgctcatggtaacttgttctctgctgaattgggagataattctagtttcatctgtcgaattattcttaaagctaaggatctagtacattcatgtgcttaaagaacaatcgctaatggggagaatgtatctattcttgaagatccttggcttccacatagttctaacagctatgtcgttacaaggcaccctgctcttgtgaacaaatcggtca

SEQ ID NO: 118648 - DNA, 1517 bp, Cannabis sativa
tagaaatccaattttacaactctaaaaatacacaaacttaatccaaacttcacctaagtcatcaagttgatttacaagtctaacatagagcatgataggtatatttcccatcaaactatacatgcataaacacacataatcaatcaagcttaaatctctcataaatcactttatcaaagctttaaaaatcaatttcaaattcaaacattcaaagcttcaaaaaaccaaaatcactcatttcagaattcatgctcaaaacaaagtcacaaagtgacctagatttcaaattaaacaaaactcaataatactaaaacctcaagttatcttccaccaaattatcaccaaaatatctttaagaacatcacataagaattcatgcaaatctacaaaatcaaaaatgaaactcaaatctacaaatattcataaatgaatttacctttaatagcctttccaagaccgaccatagctgtaagatcaccattcttctcaacaagcacaaattctcctcaaagtacaaaataagttaaagaataataaagggaaagagagagaggccggtagaggaagtctaaaactagaaaatgagtttttttgattatttacattttgcacaaataacataaacctcaattttgtaagattggtcaaatgaccattttgcctatagggcctaaattccacatataactcaattaaggactattaaatcatttcaattccatgtatacattcaaatattctcaaataaattatgtcatatcacaattacacaataaattagttttggactccgaacccagtttgagccaaaatacccgattatgattataccgtgctaacttatcaaaaatcacctccaataagacaatatgaacatattatataataatatagtccattagcacaatatacttcaaaattatgattttatccttttcgagtcaaaataacaaaaaaaaaatgcccctaactcataaacgatgtcttatatgcgaataaatctcaaataattttcacatagttaattatataataatataattactcaattaccattaatctattttaattagagtttctaatccatttattaatcctaggatattatagttctgttaccctcctgaacatttagcccgggaagaaggctgcaacaccagcgagccttcaaaaatcgatgcttggagcgttgagcacataagagctagagaaatcctttctcttagggtttcaaaaaaaaaaaattaattacataggtatggtacgatttcaactcgccccaaattcttacaagatccttgcatttttaaaatccctctataacatcttgaagtgggaatgtccaaccccactggaaatctaatactactattcaattaatgcttgtcctgcgaggaaccatggagcaggagacttttattatcttgggacctagacaaatgattgtaagatcattgtgaggttacccaataaaaaggagtttaaggatgacttcttttggaccactggtctatatc

SEQ ID NO: 118649 - DNA, 1539 bp, Cannabis sativa
tttttattaaaaaaagtaagtaaaagttaaaaaaaaaaaaaaaaaaccctaaatctaagactcagtcaccacgactcactcgtctctctcattctcatcctctctcgcttcctctattcatttcatgccgtcatcatctcagttggtctgagctctccctcgtcacgacaacttcacgcagccatgaactttcttggagactcatcgtctttggttcggtactccgatagccaaacagagacccaggactcgtccctcacccaaatctacgaccacagctcgacctatttcaacgatcaacatcaagatcttaaagatgttactacatttcaagctttctctactaactcaggctcagaagtagatgactcagtctcaatcccaagtttggtcggtttgggcggcccgaccaaaccgttagtcggtttacagattttttttttgaaattggacgggttgcacttaaattttagcaacccgaactttagattgggttagaaaatatataggataaatcgtccaaaccgaccgacatacaatcctagtttatatttctctattaattctttcagcaagtccattttgctgagggttttgaggcattgttagatgcttcccaatccctacttgcttgcaatattctttgagatcatctccacagaactttagcccattatttgttctcaatttctttactttcttaccagtttgattttccaacatgattctcagttccttaaacttgctcagtgactcatttttattttttcaaaataaaaatccaaatatatcttgaaaaattatcaacaaaaattaggaaatacctagcatctcctcttgattttgttctagatggcccccacaagtctaagtgtaaataatccacaatctccttggtagtgtgcttccagtgccaaacttcactttggtagccttttcaagtatgcattgctcacatagtcccatctgttgtatcttatacttgccaaataccccatgcttgctcagaattttcacaccaccatagctgatacaacccaatctcttgtgccaaactagtgtctattcttcacttgtaggagcaactgtattcacctggtccctgaaagtattgccctacaacacataggtgccattcatcacagtagctttcataacaaccattgatccttttgtcactctcactgagccattcccaactttcactgagtatccatcctgatccaacattgccattgagatcaagtttccctttatctttggaacatgtctcacatgttctagcattgtaactctgcctccatccattttgtaacttgactgatctaattccagcaattggacaagagtgattatctcccaatttgacattgccaatgttgataattctataattgatgaattatttcctgtcaggacagatatggaaggagcaccctgaatcgattatccaaccagtctctgatctagcctttgaaattaccaacacactagaactagggttgtacaaaaaaatttgtaaaccgctcaaatcgaata

SEQ ID NO: 118650 - DNA, 549 bp, Cannabis sativa
tttaatatataaagatatatatctctttccctcacaattcaatacttcatattttttccacccaattttttatgttattaaagtaatcaattagtaaaatttcttgaaagaagttggtgactctcactgctttcttaaaataatatgatattaaatctttctaataatctaaacaaagtggtggacttaagtggtagagcgttaattttttttttctgtggttcattaagtggagaaaatagaataattagagtgcatgtactaatacatgccttttagaactaaagggatggtaattagattgaaatgacagtttcctttaaatggttgttttttattttttattattatttttttaaaaagcatacattgaaaaataaattacaaaaaaaattctatatgagatactcagttataaccaaataaattaccacacttgattaaaaatcaaaagctaattaggaacaccgtatatatattagagtattgttattagacattagtagtgcttaacatttttcagatatgtcgctttgtgattgactaacg

SEQ ID NO: 118651 - DNA, 950 bp, Cannabis sativa
taaagaaaaaaaaaaaaaaaaaatccactgtaaagaagaaaaatacgtaatctctttgacttggtagagtcgtcatttactttttcttatgatcctctcttggttagggcatgttaaccaataattcattttattattggttttagttgagttaggttttttgttagttgttttcgtcaagattagttagttttctttcttgctaatcttttgtactaaaaactaactctataaataagaccaaaattctagctaagtgatttcattgcaacttactttgttctacattcttttcctagtttttatcatttttgatttttacctttgttcttcttctacatagtatcagattcttgctaatggacttgtctatacacacctccactttcgatcctatcggtcttaatggccaaaattctattgtgtcttagagttctgatctagttcctttaatctggaattcgttttccagctctcttacctcctttctcactcttaaactcgatcactgaatttttttagcttgaaaatcacaggttgtacccactgtgattggtcatgaactggatgaaatcctgttcaatgatgttactcctccctctactcttctcaatggtgctcctaatctggcatttgctcaatggaaaaagagggatcaactgctactttcttggcttcgctcagccatgacgagggtgttcttgcttcagttgtaaatcacaacacatcaacttagaaatacgtgacaacatattttggactatgtattaacccatttttcgtaattaagtatcaattcagaaatacgtggcaacatattttggactatgtattaattacgctaaaaaatttgtcgcctcacatttttgaactgatacttaacggacttaattgacactaattcacaacaaaaaaaaggtacaactgtaacaaaatcgtaaaacaaagta

SEQ ID NO: 118652 - DNA, 1888 bp, Cannabis sativa
  modified_base (1759)..(1770): a, c, t, g, unknown or other
  modified_base (1854)..(1856): a, c, t, g, unknown or other
attggatgccgaaaacctcggtcaacagtttaatttttattctgatgtgtgtgttaagatttgggttcgaattttattatatgtattttcaatgtttgagttttagtgttttattaggattctactgtttgagtttgtgtttatgagatttgtcttttttttttaatttattttcatagattttaagattttgaaatttcatagatttcgacgattttaaatatttataattggtagtttaaatattttattttttttaattattgattaattttattgtatttgttgagttaaaattaaatttaaaagtttccaatatctaatttattgagaatatttaaaattgagtattgtatatatcttattttatagaataaaaatttattttagttttttaatttaaataatagaattagatttttttttttttaaaaaaaaaagagtatatagtaaatagttttgaatgtatttaaataagtgcaagttaaaagtacatatatgtatttatataatatacttgattttgattattcataaaaattatatattatatttgattttgttgttgaatcattatactttttatttaaactatcaccctttaaaggactctctatatacatcacatatatgtggctcttcaaatttgttattgtaatcctaacatggacattgcatcattgatttttcttttagataccactttatatataaaaaaaaaaaaaaaaaattaaaccacgccacacaaataactatatatacgattaatcatctacaaaaatctcatcagtagcaacactaattcttgaaatttcttacaactaaccaaatcattcaaagttaaacaaaaataaaataaaaaaaattattgtccaaaaccttcccaacaacaataaaaaatagccaaagaaaaattaaatcaaactctttcccagttaatatcaatatgagaaggacccataattactacaaaaatgaataaatcccaaaacacataacacttcccttgtgaatacaaaatcatccagccacgaccattatcttgacgcttatatatattgatatcggaaaaagagaatgccaactttggatatcctagccaatcgccatcgcaagcatctcattgatatctctagctatattaaactcaaacaacatctcaacaaaaaaaatcaaaacaaataagaaaatatcattatactgcttttaattttctaaaaaaatgaattcatggtgatttgaatattagggtagaaaatcacatattaccttacataatacctttataaatataattctactaatattgttatatattaatattattatgataataataaaatattaatgtttcgatgtgagaaaataatatataatttaatcatattttttcatggttgataaagagaaaaagagatgaaggatgaatgaataatatgaattaattaagttaagattatgccatatatatgtatgatatttatatagatatttatagtgttttttttttaaaaaaaaatgattatttggtaaatattagaaaacgtttttttctttatcaaaatttattattatatatttttcaactattggtggttgaaaagaatgaatataaatatttttgttaattattaattaatatttataaatgtaataaaaaattagaaaaatgagagaattaaggagagaatagaaaaaagtatttagagtaattttagagcgccacatcatcgttttatacttctcatttatatatatnnnnnnnnnnnnatatatatatatatagattggattgacatttaagtggttgaattggaaaattgacgtttttgagaaaataagatgggaaaatgnnnaaatggcaaaattgcaaagggggcccaatcca

SEQ ID NO: 118653 - DNA, 642 bp, Cannabis sativa
ggttgaatactcgcacttgttcttcacgtaaattgcttcttgttactaataatatcatataatctggtgttgcgaaattcactcgacaacagaaaatattctaataggttaaagagaaacactcagaactactatataatgcttctttcataacttgaattttcagttatttcactttgttatgtaatcttttgctttctcctgtatcatctagaaagaatatataatttagtttgtactaacaaatgcttctcttttttgggaggggctgctattatttttgaaaacatatgaagagaggggaatgggtgacttcatgatagaaaatccaaccccattgccatctcaatcaactccatcaacactagactccgagaacttgttcttcctactgattccatccacaccaatccttcagagtggaagccccccctgagggttgggtggcttgcaattcagacgtagctattaggcagaatcaatcgtcgggggctgccgttttcctagacaacataggcaccacactgagaattgcatcctttcgagaaaataattaattataattaattgattctgaaaaaagaagttttacctattagtaacctgctattataggtaaaagaaaaatgtaaccatgatggt

SEQ ID NO: 118654 - DNA, 2216 bp, Cannabis sativa
  modified_base (1718)..(1724): a, c, t, g, unknown or other
  modified_base (2159)..(2167): a, c, t, g, unknown or other
gtgttctatgttatatacaaatagatcttgggttaattgttaatttatctaacaaaatggactagtgtgatgggttctgcttatccgattcagattttgtctcgaccgttcgtctaatttttcataataactaagagccatgaagttagaataattaaattcacaacttcatattttcacttttttaacaaggtgaattactcaaaaaccgggtagttttgagtctctcgttttcgtaggacaacaacatctctgagaactggtgaccagtttcgccaaaatacaaaaatagactaagtgatgttaaaatatcacttaggcatcaaaaaaatacattcccactgcgtttttccactcaccagcgtccagcttgacttgtcaacctgggcgctggacccagaatatccttcagtaaaatagtcataactcactcaatactgatatgattttttcgattcaacttgtgtttcgaagctatttcaatactctatcaagtaatgtctcatacttcaatcacaattttgaagttattgactcccaattcaccccaagagacttacgactttaagctacaacttattcaaagcgggtcccgcagacgcgactcaagctctaaaaattaacgactgacctctggtgtcaatttcatcgttagatcatcatctacggtaaaaaataacctaaatatatttttccatattttttggattatttcattattgtcatttaacattcccctataaaaggagagtaccacaagttcatttttcaaattcaaaaaagcagtcataagatcagagcatctctctctaaaaattaaagcatccatacttagctatttttctgtaatttatcctgtgagaaataaaactcgaagtagacatagctctaatactatcttgatacagggagtgaactgttataaattccttgtgtctctcataaatatacttaacatataattcattcttgccaatctagcaaacaggtgtagctcaaagatctttgtccagatttctacctcaacataaatattactccaatacataaaatttacaacataaattgacataataattaaaggttttgaaaaatattaatggcaatattataattaaaaaatatgcatttgcaagaccatactataaataaaaaggcacattttatcgttgttgtgtcatatttaacacatttttgtaccacgctattgaagaaaataattttacaataatactatagtattacaccaaagactgactttagtagggtcaacaaaatgagtctaacacgataacaagagttgaaaccactcaaaacttgagatttggactaggatcactcaaaacccaaaccccgataccatgaccaggactccgacacggacttagactaggtcccgaatacggactcgtacctggacccataccctagtcacgagtcctaggtatgggtttgaatcctagggtccaggctccaagtctgagttcgagtcccgggtttagggtggggttggattcatcatgtcatggtatggtgtcgaatattaaagttttttttagtaaaaaaaaatttaaaaataattttttttagaaaacattagccaaacactattaaatttttaaaaatgacaaaaaagtataataaatttggcaaattaagttgtaaaacttggcctacacaataaagattaaccccaattcatatatatatatatatannnnnnnatatatatatttatatatatcaaggatatgacaaactcaattataaaggatttggcaaatcaagttgcccattcctttagatagtcgctagagattttttttttatttgtttttgccctgatatcaggttagaatttaagaataaaatgaatggattttcatctcaaaattaattggaaatgggaggagtaactcattctttttatatattttattatttttccacacattaacaacgtgagactcttagacaatctaacaaaattatcatataacaacaaccttcgaatatgctttaacattccatcaatttccgtacactttcttctttttttggattgattggacaacttttagacaatctaattcaatattaaaattatatagttagttaattaagttaagggtgactattcaatggttatatttttattnnnnnnnnntggttacatttttctttgacctgtaatagcaggttactaataggtagac

SEQ ID NO: 118655 - DNA, 7055 bp, Cannabis sativa
  modified_base (46)..(46): a, c, t, g, unknown or other
  modified_base (6110)..(6122): a, c, t, g, unknown or other
catattaggatgttaatgaatcattcttgttagtaaatctagatcntggtaaaatatttccaacagcagcctccttcaggactcctcccaagactatattccaaagacagtgcattgtccggtgatcgctcaattcaagaagtgattgattcaaataatactgaagcatgtccttgcccttctttgccttcgtgctcagcaccacggccgttgaaggggtcttagtctgatcagacccgtccgagcttccccctttggtctttttgacttcgaaaccttttggattggagagtccacagtaggtcgttcctcagaaagatcaataacctcttcgaccggccctttctctttggacggagtctcatttcctctagatcttttggtcgaaggagtctagcccgagctgtcccccactctcttcttcaaagcctggggtaccttctgagacatttttgcataaacaaaacaacacagttagaagcaaatatgatgtaaagcatatcatgaaagaagtaaatgtaaatcaaaaataccctgcacgtgggtaggagcatttgcccgaacaagcatagacaaaacatcatcgtctcaagagtcttcctcctactccacttgaacggctttctcttttccctccacaagggtggatggccgagcaagcatatcaagttccctaatcctgatagcgtgttctactggtacttagtcggttgggagggccttcttcttcttcttgcttggcctctcctgctctgaatattcttgagcatactgcttggctctgttgtctcccttcaacttagcctcacgcttgagttaaatcagctccttttcttgcttggtcccaccagcctggcgtggatttgcctttttcttcttctccttcataagtctcggcataaagtcctctgggaagagtttgtacttaacatagttggcctcagtggctagcaaagtgatgttttgagaagcgtctggcagttaaagaattctatgtgccctctccctaagtcgcaaggtgaaaggagggcggcagtacgagggaatctgttagaaccgagtgtggacggtatccatgccttgaataaagtagtactcctccacaaaatgtcctattttgctaacatcggtgtccatagtgcccttcagccacttctcatccagttgagagaagtagaaataccccgacctactctacttgggagttgacttctggtcgaaaagccagttagtatcatgcggggatggcttgccccatccttgcgaggcataaaggatgtacagggcagattaatacttgattcccttaggagtaaattaggttgggcaaaggtggtagtagttcgcaatcttcttgaagtacggaagcaaaggcaacattgcaccctgcttggtatgagcgccgaccaggcgcagaacccctgccttcgactagttgcccgatgatttggagaggaaaggaagcatttgacatcccccaagtagctgtgcttctccaaattcttcatcttagcttgggttactatggatggaggagaaacccatcgagctcctacgacaccttgtcttctctgaggaatagcctcggtgtattccttagtaacatagtcttcaccctccaccaagacttcaccagcctcagacatgggttccccttcctcattgaaaccccgaaagggcaatccccgagcaactccctcctcctcagctttagatggagtatcaagatggacctcgccatgatcctccacctcttggacttcggtatccccctcattgtcttcttcctcagcagcaggccaggcctgctcagtactcggcagtgtggcaagctgagccacatgaggatcagtcaaagtagattcccaaactgttagtttgttgtgcgccatcattctatccccgaacggagcttgaatagtgtgcgtggcaacggtcacggcaaaagtggctataggcgtacctacagcagcaaaactcgggcgacctacgggtatattgtcaactatatccggtcggacaatgtatgtccaattggatgacaaatattgcctccaccccttctttagctcccagataaaatgtccgtagccttcacctgcgatctagccaggataaaaatggtgttgcacatcgggttctagagaagatgtatgtttgctgcttatctctcagtcttcaaagctcgagttggaaagaccatcacttgattaggacggactggcactaagacgaggatgatcctcgtacagaagttggagaaggtcctggtcgatatgatgttctcctccccaaaactcaccaaggttcatctacaaacggtaggacacaagatgagtatttggtcggatatcgaacaaaaacaaatagaatatactgaccaggtccgatcgaaggattaaaaagggactttgcatgatattaggtccataacccggaatttcaaaatttcaaattaagggttaattttcactcaaccccgaatgggcaagtgaaaccgaatattgtggaataaaaatcaaaatgcaatcacatttaagccacatggttgaggatagttaaaatctcatattcctaaacctagattctctacagttttcctagaacaagttcaagaaccatcaaattttctacagtagaaatccaaaaatcaaatattcaagcataaaagaagaaagagatgaagaacttactcacttcctcgagattcttcaaagaatttgagaggaaaagctttcttgctctaaaatcttcttgaatgaaaaatgctaaaagtggtttattaggaatttctgccctatttataagctgattaatgaagaagggcaatcgcttcaaaatttaaatgcctcagtttccccctaaaagtaaatgttaaacactcaaagtacctgaatggcagccgtcaaggcgtgctgttttttgggagtaattcgaggtacatgtcagtcagcattaatgaacagaatattgacgagacccttggtcagaatcacgtcggatcaccaacagatgcttcaaacacgtgccacctgttcaaataaagatccaaactgagtaagtccacgtgcgacttcgaaaatcccgcgcagacttggagggcaaatgttatcccattttttgcactatgatgtggcagcatatacgagtgacacgtgtccatcattccttgcatttggaaataatgatattctgaatagacttcaagcaacataactgcacgcacaaagtctgcttatccgagcaaagaatgaggttagttctccgagctgtgtaccaagacttgactacttcagaatggtatcgtgaagcccaagcacgaaggcaatccctacaatcataggattgtatcagagagatatggtaggttatctcaatccctcatttcatgtattctaattatgtaataaatactctttccaattatagatattgtaagcaaaaggaaaaccttccctcatgcattaagcccctataaatagtgatctagcttcactgtaaaagagatcgaaagaattgctttagagagagatctcaaagaaacactcaggaatttcattgtgagagctttgagagggaaaacactgtgttatttgttctcaagtcaatataatctaaggggagtaggctattaccgaactaaaggggctgaacctcttcacaacctagtgttctttattgcttattggtttttgctctgtttttaatatatttctaatcgcttcataattgactcattgtcgttgactaaaagcgaggtcaacatatattgaaggagaattgtaaggaggctatgtggcatcatatccttttaataatctatgtattctagtttgtagatatatttttctcattttattttctacttttcaacaatttttacacttttaatagtagttgagttcttttaaaaagttccacatggtttaaaaactatagtgaatttatacttctaggatatatatatatataaaagtagaattgtaaggaggggccatgtggaatcatatccttctaataatctatattttctaatttgtagattttttttattttttttattttattttctaattttcaataagttttacacttttaataatagttaagtttttttaaaaagtctcacatggtttagaaaccatagtgagtttatacttctaggttatatatagatttctattatttcaatttagcttgtctcaaattagaattatttattttttatgtgggtgattgatagacttaatattacctaattttttttttttgaagtgaaatacacgtttttttgaattttttagcctttgaataataaaaaaataatcctttaataattttttttttaatataaaatttattttcttagaattttttattgtaatttgtttttgctaacatttttattgcaatttttatataaatatatataaaattattatttacgtaaattaactaaaattaaaattattttgttcttatatttttattgatatgagactattgtgaatgttaaacttattgattatatattttttagtattgtttgttccaaaattagtattatatattttatatgttggtgattaatagtatttatttactacgtgtgtgttgatctcgcttttagccaatgataatgagtcaaaattaaaacgattaaagaataattaaaataataaatatgaataatataaagtaaagaaaacaccaaaattataaaggttcgatcccttgatgatggtaatagcctactttccttcagttgtattgacttatgagtagatgaacaagaaagtcttgatctctattaaaagctcttacaataatctctgagtatttcattcttaaatttagatttctctcgtgtgttttctttgaatcaaatttgtgtccctgtatagtgagacgagtccactattcgtaaggataaattacatcgagttggtttcttaaaatcaataaggaatgaagtggaaaatttattggttttaatagtactaaatcagctacgcagtagaagaatttgtattatctcattatcattgtaatatagtccaatggatatccaaatgtgtatacattaaatctaaacataaaaaacaagataagaatatatacctcttgatgactatcaggatatcatcgaaacttctcgaatgttgtatctttttggttgattagaaactcacactgtagtcttccaaatcgatccaccatacacaaggaatagtgtgagctattaagataaagtgtataatttgttcttgttgaattctcaacacatgagcaagaactatttgagatagaaaaacagtttaccttttctccgagtgaatttcaaaaattactatgtgaaaagctcttctgaattatcaaattaggattctatttataatagttaaattcctattaaataaatcatatttaattattaaataaatatttataaccaaattctattaatgatatttatgagggaatctctcaattacttgagagaatatttcaactactttgaaatatctttaaccacttttaaaattcaaatatttatctaattaaattaactaaaaagaaaaaactaatagggacaccctacactagggtaggcacccacattctcttatttagaacaatgatggtgtcttttgtccagactacttttgtcttttccctatttaattaatttaaaaaattatttacttattccaaaaataaataattactatttttctaattcaaaatagttttttccaaataacattatacaactctttatatcttcccttgacagtatttcaagatagcgattcggcaaccatgaacgtataattctaagttccaataaattagattatttattgagtctcatcaaccaaataatcgtgtttattaatttcatgattactctactataaatatagaaatgaactcttagtagttataaatttatatttaccaagttttactacagtgatcattgatataatcaattctaatgattagccctccatgtgttggttcgtaattagttctggtcaaattaatgtttcacccttctaattacatttttatcctttagtaccattaattcactagtggaagtnnnnnnnnnnnnncatctaaatttgtgcacaactttctagtcccacatttaacacttaaagggaaccaacattcaatctgttaggaaagttaggattccataattgtagatcatattcccagccatccacattgttagattcccaaaattaaagttgtaagaattatcttctctgagaaacattaaggagtgaatcaaaaaactaataacatgaataaaagttcatgattacttaggatttaggctgatctactattgataatcattatgatatgaattatgtcattatagtaaacgacatgttagatacagacaactttattcatatcggtccttgtcatatataatctctattatacacaacatcttcactttgatgtcatactacattagtaatctaaatcgagattacttgcactgaagaatgggcataagtgaaccgtactagcaaccattgattaaaaatatcataactttaatatgttgctgattgttttattcatatctaagtgatgttagttctttgtacagctacaagtcacactctcatatatgaataaggagtttttcgatactatatataaattatttaataataaatattaataatttaacatttgttgacctcaaaaattgatcaactaacagtgggatcgtgcagatctgatgcttgccacgtgtgtgtacaaataagataaaaagtaatagacaataggatttattatagaggttcagcccccttgtggtagcaggtaatgacctacacccttttagttgtataatatcgtgggaatcaccatctagatcgctataggtaagatctgctatagtatccttaggatcataatgtataaattaatgcctgacaaaactcaagtgttgcacaacctaggatgttggatagccttaggtaggtgtgggagagaatgaggaagagagagagaga

SEQ ID NO: 118656 - DNA, 778 bp, Cannabis sativa
ttgtattttttatcggttttgtcggtttggtttgggcgggttattcgggttgggcggtttacgaaaatatttgtacacccctaatatatatgggtgcactcttaataggtattacccatgaatgggtaaaattagaaaaaaattgagttttgttgaaataaaccccatattacctgtacactgtaaaaccagattatttccaaaggtttacaggcagtaaaataaatcctaggtggcctttggcctctaaatacctaggacagatcagcaagttagtcacaaagtttaataaactttgtaactaactcttttctctgttttttccactattacaacacatatatagatcaacattctaaaatcagaagaactagaaaagaaaaaaatcagaacagagcaagacacacaaatcagatccgaatatatctccagatcaaaaacaacaaatatcagcacagaagatcaacaccagaagaggctgagtactttggaggaagcttacagcgaggttaagctttggaaccctaggattagggttcagatatccgagaagccaaggagatcgttcatgcaagatcaaggtgaaaaagggagaaattagtactgattttaagtgagaaaacaaagagaaaagagaggagaaaacactgtaaaatatttgggaatttcattttcatacctgtgtatttgaaatccctgcaattgtaaactttgatcattgaagatctatagtggaagaggcgagctcaagaggatgtacccagatttctttggggaa

SEQ ID NO: 118657 - DNA, 845 bp, Cannabis sativa
ccgaagcagatgatgcatgtttgaaatgacttgatgctgatatcgctactattcttgatactcttaacattctaatactcaaaagtatatgagaagaaccaaagctgaaaacttcgaggcttttctcagttggagctccaatggatgagccaagaagatcaattaaactcacctgtggaaaatggttataggttgatatgaaaaagagtactgtgagagattcattctttgaagacttttatcaaacaggtgtctgtgtgtgtgttgctattaacacacatttttcttactcttttcatcaaatttaaaattgtgaaaatttcttttcaaactcttcttaaatttttaataatactaaaggttgaaatcctctacattgttatttcttaattttccaaactgatacataattttatatgctcaatcaaaacagtgtcagtaataatatggagaacaattactattgaaagtaaatttttgacaattattcaagaaaacaaagctgtgaaatgtagaataataagaataatatatgataaaagaacatacttgttcagcctggctttaattgactttgtaaaactttaatgatcttagcaaaactgcctccgaacgccaagtttgggttttatagctcgctaggctctacttctttaactccttgtcgatgtgggataaaaggactgaaaacgtatgactaaagtaatgctatgatattatttgactggaatttgataaaatagcttttgttgagtaataaaaattaagctaattagtaatttttttttctgatctttgacaagtactaaatcatattttttgaatttttttggccattaaaaatt

SEQ ID NO: 118658 - DNA, 886 bp, Cannabis sativa
aaagaaaaagaaaaagaaaaaattatattttaaaatattttttaatttttaattattttttattaaaattattatttggactaataatggttcaacatgtggtaattataaaaaacttaacggatccgttaaatttaggactaaggggcttacaaaaaatgtgacatgaggactattgacgttatttttcgaggttgagaattaatctgcatcataataaattttttagggacttttgtcgcaatttttttttttattattaacatagagatctaaggattaggagagaaacagaaaggaaaaaaaaataagaaaataagaaaaagtttaaaaaaaaaaaagatattttttttattattgttttattttatatatttttaaataattttttataatatttaaataattaatattacgtggaccactaaaaacttgctatgtgtaaattttgtacactatggcatgtcctacttggcacttaacagagctttgtggacgaaagtgtaaagagcaaaataaaatgtgaattttagccgttaaaaaatcaatttatatggttaagtgttacaaatcgtataattcaagtggtttttaccgccaatattcctgaaaaaaattgggagctaaactaacagttgtcgatattttatctctaatgatattttgatcaatacttattgtctagttggataaatatattataataaaaattataattttttcttgcttttggtggagatagatgattcaacaaaagattttttttttttttttttttgtaaggaacaaaagaaaaatgaaattgctggaggataccttgataaaaaaatagtagagaataaaaatacagggatatgattttgtcccgttattgtactttcacgga

SEQ ID NO: 118659 - DNA, 633 bp, Cannabis sativa
ccacaacatgcgccaccacttggctaacttgtgggcatctcttagcttgtaacgtgccatcatagactgcacctaacactagactcaaattggcaaaaaccttatagaattgaagatgagatatgctccgaaacttttaaactcaaacacataaatagatttatggtcccaaaagtatggaatgctaatgatctcaaaaaaatactatcagtagtttagagtttggtatttgatttcatcttcaaattttctattaaaattgtgaactaagtaatttatgcaatgtattatctttttagatttatgcaaaataacttaaaaagtattatactattttagtcacttgaagggtagcagtgcataaatatatatatccataagtatatatataaaaaatttctctcaagactaaatgtcaaaaaaagagtaaattaaaaaatagacttggaaaaaagccagtaaaatgtctcctcaacatatataaaaaaaagaaattacagtaaaattctcttctttaatattaattaattacttcaaacagcttgagcagatgccgaaaccctcagagcatctccaaggagctcatcaaatttggtgtcacattatcaccaaatttgatgttaaaaactatct

SEQ ID NO: 118660 - DNA, 3688 bp, Cannabis sativa
  modified_base (47)..(48): a, c, t, g, unknown or other
  modified_base (2556)..(2556): a, c, t, g, unknown or other
  modified_base (3635)..(3640): a, c, t, g, unknown or other
taaataatttcataattaatcatacttaactgctaatttccaaattnnactaagcgggctttacagtaaaagtaacttatgaaagtttgcaatactatttataagatagcttgtaaaaaagggtaatcaattcaaacgctcagactcttcgatctccccccaaaagcaaatattgggaaatcaaacgcaatccagtgcgaaggaacaatagccgtcaaaagcatgcaaaagaagacgtgtctcgagatactaattattcagagcattaattagccgaaaactgaagggacgcctagtcacactcacatcaaatcatgaacagacgcactcgacaaatgtcacccattcaaatgtaaagtcagctcagataaagtctacacgcaacttcagaagtcccgtacagacttggggggcaaatgttatcccaattttttcactatgacgtggcatcacatgcctgtgacacgtggacttgatttcccacatctgcctgagagagatgcatcgagtagggcacatcacacacctacatggacagtgtctttccagccgagctatggataagccgagaagagaatcaacacttagcaatttcataatttgcatcgtcaagcccaagaataatccctataaatctggcatatcatagagatatggtaagttgtccagatcccacagtttgtgtattttaaatatataatatatgttcttactaattatagacattttaagaaaaagggaaaccttccctcaagcatgtagccctataaatagtgatccattctcactagtaaaggggtggaaagaataaactttagaaagttctaggagagcatactcagagatttcactgtaggagctttaatggaggaaacattgtgttctttattcttaagtcaatacaaatcaaggggagtaggctattaccgaacttaacggggtcgaacctctttaaaaaccttgtgttctttacttatcttttcatattatatctataccatatcccttatctcttattattaagactaattgtcgttggctagaagcgaggtcaacataaagtatcgttaaccctcgacaccatcgagtttcttatgtcactattattgtgtaattaaacaattgataaataagaaactgaatagcagtttcaaaggagaataataactgtttcttaacagcagtaattaccgtatcttattttgacatgctaagcagtgtaattgcctttccttacctcaagtccaaagtcaagtgtcggagctgacttgagtggaatggtgctcgacaatctagggccctatgtcatgcaaacaacacttgataaataacttaatcaaactagaagtaggccctaaactcaaaacttgacaaaccctaattgatactagcttagaaatagccttaagatcgataaaacacataaaactaagttttggataaacaccccaaacggctaactcgtttcagaaaaaatagggttccccactgggtcaaccggttgaccaattccatagtacaacgtagaaccggttaaccaatttctactgcagaaacgagtaacctagtttttgcaccaaaaccaacccaaaactcctccaaacctattaaaacgttccagaatagtttaacaacataaaattaacataaccaaatactcaaaactcaaaaatgcatcaaaattataaacttaccattgttgagtgagtttttgagttcttgatctcaactcacccaactcttggcacaaaggtcctaaaatcatcaactaaagcttagataatcctaatttataatcaaaaaaataagctctaacaaggtaagcatacaaagaacctgcttatcataatcctcttcaaaacctaacattagaaccttaaaaccttcaagaacactaagaaaaacatacctcaagtttggatgtcacctaagtttgtaacgccctatcccatagggaccccacaagtgtaattttataaattagtttaattataatagattaattaattattaaaaatagtgatgatattaaaaacatgactaaaataaaacactaaaaatgggcatcataatggcattaaaaatgtatttcggggatccctgttataaaaggtttacaatcagactatgtacgacaacaattcaaaacacaaaaagtgaaatagacagtagatacatccctaaacaactcctagaaccttggctcacaagccggtggggtcaatttgtatatttctggacaagactgtcacctcatggttaatctagtttttatttgcctttacttgcaccacatagcactcgtgagtcacaaggaattaacaagaaaaattaataacaatattcatatagtttattattcgaatataatcatttatagatagacaatcagaataaaataatcacacattactcataagatgaaatctaaatcacttttcatatcagccacgaataaacatcagtatacaaatatttggtaatacaaaactcttataccaataatagaaatcatattcattcaataatataaattatatatatgttacctcatanagtaaccatcttcattatatcacattgtttaatcatgcaagtcgtttctttaatctaatagtcttgtattgcattgcctaatcaggcaagcccgtgccatagcttagcaaccacatatcacataatcacatcacctaataagttgagcccgtgccaaatacttgcacccatatatcacataattgcatcacctaataaggtgagcccgtgccacaacctgacaccaatatattgtatcgcctaatcagatgagtccgtacctacgtcctgtactcacaagtcactattgttcgtacctaataaggtatgctgccaggaagaaacccaacaaaggtttcattacctaataaggtttcattgcccgtacctaataaggtacgtcgccaggtctacaacattacctaataaagtgagcccatatatcacattcatggtatcatcctattatcattgcttaatcaatcaatctttttattatataacaataatatccatatcttaatcccaatagcaatcaattctcaacaatattaattgcattacaacataacatgctatgtagtgaaatatacttttcttacctttaatccaaattgatgcatgtcggccaacccaagtggagaaacattcctagtgatcttggccctatgtcacagcaacggtaaaccaataagtgtttaccccaaaacactacttaatattcacataagacaatctaaggattttaccaaccccacggtataaaaacactaaaataaaacttttttttttactccaaaacatacatcatattgtagggatggttgcaagcttcaaaattgtatatagaacgtcaaaaagggatagctaagtcgaaagttatgacaaaaatacaatttcttatctcctaataatttccaaaaacggtagaacatgaaaataccaaatttcacactcgccaaaatactcccaaaacctatctaaatcattccaaacttcataggacacatatataccatatatactacattcccaacgtaaccgaaattaaaagagcgcccttaaacaaaaaactccattaacgttcggactaagctttnnnnnnttccaaactcgatttctaactcaaaatcacctcaaattcaacaagtaa

SEQ ID NO: 118661 - DNA, 1038 bp, Cannabis sativa
cctcagaacctctaccaacgttaaacaaatatgcaccattatgttggacgcttctgaacctaccatccttgtgttatgctatcaaatctttctcaaaattagttgccgaatgggtagcacacttaacttgcctttttgagacgttcacttgaaccaactttgtagtgtgaaccttatgaactcaattagagtagtaattggatatttccaaaattcttctactacgttattaaggctttcaacatcgttgtttgtcattatgttgtacttttctcttggataataaggacgagcctacttttctaatctttttactcttaacataagcagcgataataagatccatccgttgaagcacctaaaaatgtctatcacattttctctttaaccatgcgtaagcggccaaccatatttacgtgttatatacatcaatcttgaacttgtgggtgacattcatagaaatatgtttacatcatgcatagtggcatgctttggggaaaacgacctcggcatgttcaatgctttgattcatattcgatacaaatactaagttttcaacctctccaattgcttcccttaacttctgcaagaaatacttccaagagtcgtgattttcactatcaataattgcaaaggcaattaaacaattggttatttgcattgtacaccacagcaactaacatattgtgcccccatatcttgtgttcaagaatgtgctattgatactaatcacaggacgacaaaacttaaatcccctccttcaagcatccagtgaccaaaattagtaattgaacttgttgtcctctatgaaaatgtctgtattagtacccgaattcttttgctccagcatgtacaagtaataggtaactttgtataagattgtactgacatacccctaacatgcataagtaccttcttactgcacctccatgccttcttataactaattttgtttccataatcgtcaaatatatccctctgtatgtcttttaccttgtacttagttccatctgatgtgtacttgttcttaataaggtg

SEQ ID NO: 118662 - DNA, 834 bp, Cannabis sativa
gggttggaagttcatctgttgtaactcatagagaaaaggcaatagagaacagagctttgatcattcattcatttcacttcttctcattgtttaatcttttaatagttacatattgtgcgactactaatttggttgacgagttctatctgtcaacaacattatatcaaaaatgtacaattcaaattcaattttttttaatctcttctttggctcaataactttttttttttttaatttttctcagctaatgaaacaactatgactcatataatctaaagataagatattttgtttgaatttgataaaaagttaaccatagaaactaaaattttcctaataatactcattcatgtaaaatactcattaaaagtacacttatatatattatattaaattttaataaaaattgtaactcgataaactaattcaatgtataaaatgtatgtaattttcataagttcaaggcttactattataatttatcaatgtcacgtacttgataatgttaggcttcttaagttattcaagcaattgtttaaaaataaaatagaataattagtatttttgtctcttaaactttcgacactatctgatttccccccctaaaatatacggcttgttaaaaattctccttaaaatataacagttacataattataccccttctgttaggttttgtttcttttaccgttgaaaattagtatttttacctcgtaaactttgatcaatccaaaatttttccctcttttattaaaaaaaatataattttaaaaattatagtattctatcttttttaaagaaattataatgttctattaattcaaaaaaaaataa

SEQ ID NO: 118663 - DNA, 1044 bp, Cannabis sativa
agagtgtaatttcctctttattattcgcatattttcataaataccaaaaaaaaaataaaagaaaagttacaaaaatactaaaatttaggttagtttttataaaaatactcacatataatttttttcaaaaatattgtatttttataaaacaatagcataacataaaacagaacaactaaaaacacagtagaacaactaaaaaaacaactaaaaacagcagtagaataactaaaaaaataactgtagaacaacagtaaaaacttaacatagtactcagtatttttaaaaaaaaattctgctacacaataaattgtataaaagttagaaatttcaatgtgttgtataaataatctaaaataaaaacaaaattataaaattatggatctacagttttttcaattttttttacaaaaatatgactgttgttttcacattgctttatattaaaataattattactatttctaaaacttaattatttaaaatactacatataatatggaatcttttcaactttaatctggaaatttattagtatttcttttcttgtattaagataaatctatgtgtttttaataatatataagaagagaaatttataaagaaattctagtgattatatgttatttttaaagtcatagtttgaaaatggtaaaattctaaattaaggcccgaaagagaagaggtcagaaaagcccaacgcatcagtcaaaattgtctgaatgaatggcattggcaatgggaggatccataggtgaaactccgagaagaagatcggaggaaagcacagataggacgacgactcacactgctgttgcaacttgttactcaattattattctactggaatcagaaattttcctggaaaactagaaacaaaaatgcagaattccgatgacattcgtaatctacccatagacattacgttttctcgtcttggaggtaacgccacttttctcccttgctctctgaaatcctgaccaaatgaaactgacctaataatatatgtgtgtgtgtgtgtgtgtgtgtcgattaattgttgtg

SEQ ID NO: 118664 - DNA, 3211 bp, Cannabis sativa
  modified_base (505)..(506): a, c, t, g, unknown or other
  modified_base (3155)..(3158): a, c, t, g, unknown or other
tttatatgtgtttatttcgttgttttagaattcttattaggatgttaatgaaacatgcatggtagtaaatctagatcctggtaaaatatttccaatagtgatgtcccggacgacaacactagatcactaccttaataaagatcaccgaatgtctggtccgcaagcaatgtgtgttagggtttatgccctaaaaagcctgtaaagattttttttgattatgatataaagagttgaacatttaatatatgtatgaatgttaagttatcaatatttattattaaatatcaaaaaattcattattcatatatgagactgtgacttgtagctgtccggaaaactaagaccacttagctatgaataaaatagtcatcaacatattaaagttatgaaatctttaatcaatggttgctagtacgactcattaatggtcgttctacaatgcaaataatcttagttcaaatcactgatgtagtgagatgtataagtgaaggtgttgtatataatnnagattatatatgacaaggaccgatgtgaatgaagctatctttattaacataccatttatcataaagacctaattcatatcataatgatgataaatagtagatcgacctaaatcttgagttatcatgaactcttgttcatgttataagtttttttgattcactcgttaaagtttctcaaagaaggtgattcttacgacttctgttttgggaatctaataatatagatggctaggaatatgatgtataattatagaatcccaactttcctaacacatcgaatgttagttccttttaagtgttgattttggaactagaatattatgcacaaatttagatgggatcttgaattatacttccactagtgaattaatggtactaaaagataaagaagtaattagaagggtaaaaaaagtattttgaccaaaagtaattacgaaccaatacatggagggctaaacactagaattgatttattaatggatactatagttaaattcattaaatataattctataattactaagagtacaattctatatttatagtaaagtaatcatagaattaataaataagggattatttgattgatgagactcaataaataatctagtttattaaagcttagaattataggtccatggtccccaaattgccaccttgaaacactgtcaagggtagggataaagagttgtataaagatgtttggaaaaatatattttgaattggtaaaatagtaattatttatttttgtaataaataaataatttttttatattaattaaataagaaaaagacaaagattattaagacaaaatttgtcgagataagatttatcaggacaaaagttgtcaggacaaaagataccaaccttgtcttaaagacaatggtaggtgcatatgcttgttcctattcctatggagtttgtccttttgggttaattaattattcattaacttaattagataaatatataatttgaaaagtggttatagttatttcaaggttattgagatattctctcaagtatttgagagattctctcataaatatcactaaccaaatttggttatagatatttattaatttaaacacgggtagataccattttagaccctgtgttttacaaaggttaccaattggaccctctgttttgttaaatgataaaatagatcctgtattttctgaaatggtaaaaatagtaccttgagcttaatttttgacaactttttttttaatataactaacttgaagaaaatttctaacacaaacaaatacacaaaatataactagttttgtcataacacctttagatcggattatcattaaattttattttgaccaaatattagttcagggtcctatttgtaccgttttggaaaatacaggatccattgtcatttaacaaaacagaaggttcaatttgtaacttttgcaaaccatagggtccaaaatgatatttaccctttaaacaattaaatattatttaattaaaagaatatcactactataaataagagcttactttgagaaattggaatataatttttgaaacacttctcactctttttgaactggtattttttaaatatagagaaaaaaataatttttttccctcaattattcttgttcacgtgttaagaactaaataagaacaaaagttatacactttatcctaatatcccacactattccttgtgtgtgctggatcaatttggaagatactggtgtgagtctaaattgcacatttctcatcaattggattaaggaatacaacttacgaaatgttttgagatatcctgataggctttaagaggtatattctaaacttataattttattattttgatttaatgtacacagatttggagatccattggattatagtacaatgataatcagataatacaaaactcttccgttgcgtacctgattagtactataaaaactaacaattggtattacagtcaggttccatgaatgtgtatacattaaatactgtgtgagttttatgcatttatatatatgagatatgtatttgaatggatggttttatgattatgaatgtatgagaggtgatgaatcgttaattatatggtagaattaggtttaaattttgttgttattatatttataaaataatttaagccaatttggagcatataaattttatataatttatttatttttaaaattaaattttacgtcaaaattataccaatataatattcatagcatgtgagcttggtttttaatcatgaaacctgatcatgcatgtcaaaatcacatgcatgtgagcttgagaatttttttccggccatgcacaaccatctgagtggttttgggtatcgtgcccacgtgaaaaccatgcatgcatggcatgcaattgggaagtgattcctttaaagtggagcaagcacaattgggtccaattggaccagtgcggctgtgcatgggcaacgattggagcacgaacccatgaggctaaacgggtggtcggaccatcgtcgagcacaataggaacttgatcccttcctcccgtgctcggcctcctgctcgtgtaagaaagacttgtatgggttgtgtgattcctttttgtgctccgccatctgacattgatgttgggttatgtgccctaaataaaactcattnnnntataatcaaatttactaattaatatatgattagaaatcacttttatgttgcat

SEQ ID NO: 118665 - DNA, 1093 bp, Cannabis sativa
acaaaagaccagcaaatcaaacataaataaacactaaaacaaaatcaaagaaagcacatacctcattaaccccttttctggtgatctcctcgtacaaatcatcagattcaacattctttaatgaagatttacctttctcctacgagttaacaaaataataaaaaacaacaacaagacaactgttaaagaaatacaaaaacacaacaaagaatagaaagaaaaaaacatggaaaataaagaaatcacatatagatatatctgtaataaaacaaaattgtaacaaaaactctaaaacaacacaaaaataataaaaaataaccttatcagctttgggcgactgtaacaactctggctcaaactcaaattcagagtttaaatttttcaaaatggggcgagaacatttggatatcctcttcttcaaagttccaccaactaattttcttttggaaggaacaagagacgtaggactaggaggatgatccttaaaattcttcttacccatagatgatcaaagttttatttttctgaggtttttttgggggattttttataattggagaagaagagtttgcttggtaacaaccatatataatgaagaatagtatttataggagaagaactacaacaaaaaaggcaaacaataagagggaaacttgtgatttaaaacaaaaataaaaactaaataaatataaaataaaacaaactaaaccgcccctaacacaataactatatgaataataaaataaaaaaaaaaagaagataatgaacaaaaagatggaaaatagaaaatggattaaactgaaaaacgggcattacattttaaagaaaaaataattttcaacatcaaatttaattaacataaaattaaaaacaaaattgtgactaaagtggcaacacacgttacatcaactttttatatcacttaaaaattaaattaaagatatgaaagaaccctgagatgacacgtgtaacaaaaagatgaaaaaaattggttttaaaaaagagttatttgcggtataacctccttaagtggctaagtttttgcatctaacctccaattctatgttatagattttattacaatggaagaaaa

SEQ ID NO: 118666 - DNA, 1304 bp, Cannabis sativa
aagatagtgtctccaccccttcttgagttcccaattgaagcgaccgtaacattgaccttagatctgcgtgggagaaaaattgtgttgcaccttaggttctggggaaagtgttcgctcactacttacatcccagtcctcaaagctagagttagaaaggttgtcacttgacgacgatggattggcacaaaggcaaggatgatcctcatacaacagttgaagtagatcatggtcgatatggtgtttgcctcaaaaaaacttaccggggttcttctacaaaaggtaggagagaagaaaatgagaattggtctgaccaacgaataaaaaataggttcattatattgactacgtccgattgagggaacaaaaatagaaatttcactcagaaatggaatttttatcccaaaagttcaaaactttgaattagagtctgattctcactaaacccaaaatggataagtaaaaatggatatcgtggggttaaaatcaaagcacagtcataatcaaacagttttgttaagcataatcaagatttctaaatcttaaacctagaaattctacggttatcctaaaaaaggtccatgaacaatcaagattcctagatagaaacccaaaaaattaagcatggaaatgtataaaagaaaaaagaacttactcactaatttgaagcttttgatgtgctcggatggtgctggcaagagtttcctagaaattctttgaagaatgcaagagagaaaaatttcaggaataaaaatgacaaaaatcattaattggcgtaagtttgttaatcgatgcctaggacacgcgtcactcgtccggacaagactctagctcagttgaagtcccatgtgcgaccaggaaggtcccgtgcacacttggggggcaaatgttatctaggtttttgcacattgatgttgcaagaggatcaagcgacatgtgtctcacaattccaatacatgggcggaggtaaatgtccctaacagcctgcacacaagtcgtcagcatctctaatagtcgattacccgagaagggtggtaaataaaacattcgaccatgtagaagtctgttatgttgagctactaacaagagttaattactttagattgatcttgttatgtccagacacgaagacaatccctataatcttagttaggattgacccagagaaataatatggcaacctgttctagtttcctattttgtgtattgtaattatgtagtcattgtaatttcctatttatgtattataagaaatagggaaaccatccctcatgcattaagcccctataaatattgacctagcctca

SEQ ID NO: 118667 - DNA, 1547 bp, Cannabis sativa
  modified_base (1493)..(1499): a, c, t, g, unknown or other
ggggcggggcggggcggggcagatccgtatatgatctggatcaggtcggatcagagtcggatcagatccgacccgccccattgacattcctaaattcgaccaaccgactctaaaaaagtgatgtagcggtgtataagggtacctccgtaagcttttctactatattatttaaaataaatgtactaccaaaattttatttttctatttcacttcaaaatataattttaaatatttatatataaaaaattattagaatttacaataattaataaaatatgtttagaaaaatggttaatattagaacaggaatatttaaaaataatgaaagtgaacatgtttagaacatctgatctgattggactattgtagtatatatgttttgggttttgagtttacttatgccactccttaagtaactgaggagtgagagatctggccccaagggccacatggacattcatctgatcaggtgcagttcacgtgaccaagcgatcccgtatcggattcagccccaccaccaactccaatcggttgcccaaaacaaaaaaggcttctgcactacagcccacgtgcaccctttcaaaaccaacgtccccacgcctgcataagctctggcccttattgtgataccatttaattacaatggcccacccatattttctttatcaaaaagcaatttacttgtactactctttaataattacaagacaaattacacataaaataaaaaatataaaagtaacactcaaacataaggtatatatgaatgaaaatttctgtttcaaaaatgaaaaatatatataaatgaaaatttgagtgttattttttaaaaaaatatataaatgaaaatttccattttcctctctctcaaaaaaaaaaaaaaaaaaagtaacaacactcaaatattagttatttttaagagacggaaagaaaatttaaaacaaatttaaatgattaataatttctagtaagaaataataagaattcaaaaaaagaaaagaataaaaaattctagttgaattctgatcaaactaaaaaaatattttaaaaaaacctagttgtaagaaaccataaaaggagagttttgtgggggtttttttagcgataattacataaggaaattacataaaagtaacataaaaataacatcaaaataataacaaaaaatagcatacaaataacaaaaaatcaacaacaaattaacaagagtacaacataaaaagaccgtattttttgtaaataaaataaaaaaaattgtaaaaatatttaaaattccgtgaaatcgtatttttgtaatttttgtttttgtttttgtgtatttgtcaaataatcccttttgtaatcacctttcaagcattttggcttcatttttcaatcattattgtttttttaaaaaataaataaataaatgctatctatttggattttgaatagttgtcaaatttttaaggaatgattacataatacactattttttgtaaaatatttatatnnnnnnnttcaaagaatgttttttttacatttttatggttttccaaaaaataaca

SEQ ID NO: 118668 - DNA, 5357 bp, Cannabis sativa
  modified_base (1892)..(1896): a, c, t, g, unknown or other
  modified_base (5281)..(5309): a, c, t, g, unknown or other
aggagtctggtcttgagtttctaggtgagagaaatctcactataacaggatcatgtattcctacgggtgtctccaatgaagggagtcaagcatttcgagaaaagaggaaagttatgttccctagatttacaagaccttttgagattctcgagaaggttggactagtggcatatcatttagcttttcctccagctctatctgcaattcacaatgtgtttgatgtatgaatgttacgaaagtacgttttagatccttctgatgtactgagttatgaaaattttgagctgcaacgagacttatcatacaaagagcaaccagttcagatcttagacagaaaagataaaggcctttagaacaagaccatagctttggtcaaggtactctagagaaatggaaatgtggaggaagcaagctggaagttggagtccgacatgaggactcagtatccagagttgttcaagttagatttcaaggatgaaatccttttaacggggggataattgtaaagaccgcttaactttaagttataatttagcagataattaggctttaattatgaaacttgcatattagttatgaattattattttacggagatttatttgaattgagaatgcattatatatgtcatatatgaaaatttatatttttgcatgttttgtgcctagcaacattggaatgcggcgtttggccattagaatcatattttagtattttttagtatagcggggaattatagttagatattggaaatgtcaagttttacctgagggttggaaatgaccattttactcctagaccattttgttagttaagcttttggggaggggtatttttgtcatttcaccttgggagtggtgggatttttagagtagcagttggccacaaatggtttaattatgttaaggattattagcttttttagaaaataaaaggaattagaaagaaaaggaaaatttgagaaaaaaaccatctttttcaccctctcttgttcgaaccctcaaggactagcagctttactgaaccggtttggttgagttttgggttgatttgagtgagttatgaatttttgaaacttacctgcactgaaccggtcgaccgtttcattgggacctatagaaccggtcgaccagttggtccccaggaaaccccacagaactggaattcttgttggggaaccggcctactggttgggcagttttgggatccttagtttttcccatttttatgatatttagggtattgccatattatttatcgatagggaaacttttattatcaagttaaagtccccaaaaagtgatttagcgtgtcactcacaacttttaagaatgatgtgatttaggggcctataattcgtcgaacagttattccactcaggttggtcggcacacctgaattcggaaacaaggtaagattattataatgatatgctatttacatgtttagcgtgcatgttagttaagcctgttagattacattaaaaatgtatgttggttaaagaactatttggcaatatcacatttgtacgactagagtacgactattgtaccgattataggctgatattacagttgatattaactgtactacttgatagtatcacatcattatgactagagtacgaccagtgtattgagtataggctgatattatggtcaacaatactgtcgtacgaatgttctagactcagcattgtgttggacacggggatagggttatgattgggggtatgggcgcctgattataatctgagttattgctatgttattgtttatgcttttcttattgagtccgtcgactcacatttattatttccatgtgtaggtaagggcaaagctaaggttgagcaaccgtgagagcgagcagatggagattgtacatgttggggnnnnnaggcctggagcgtacggtctttggaacatcagggcttattttgtatagtcgctaggcgacaaacttttgtttatgcacagtgatacttttgtaaatacttttgtgaacgggataccgattttatataagtatgttattttaatttttatagttaattaagaagaaattttattactcacgatttgtaataaactcgttgattagcagcaagctgcaaagttagttaaaaatcacgttaacatgcctaaactagttgggtgttatagtcccaattttgggtagtttgcaaggaaagggagcacgcactatatattagttcatggaaacagctcaaaaatacatcaatagggaagaggtaaggttggccaataacctccctcttccttctggacaaatagaagatattccaacttcaaaaaacaatacccctccaacgcgaacagttccaacaagagaaaaaataaccatggtgggggccactaaaataatatgaaatggaggactaaccaacctctatacaccatcttcacaaaattgactgaactgttagaaactattttcctcaccaatgagaaaactttgaattttagagttccagagctaatgaagggaatcagaaaaaattgagatacctcaaagtattgtcgataccacaatgacgttggccacacaactaacgagtgcagagccatgaaaatagaaattgaagatctcatccaagccggaccactttctggttatgtacacaacaagcagggaaaatgcctaagcacaagggaaagcccaaaacaatgcccaagtcgcaccaaacaataagcaagccctgccacaaggctaaaatgtagatatggtgccaccattaaaaggagatgaagtcttagtaatttttggagctccacactttgctggaacgagtaatggggcccaaaagcactacattaatgaactgaaaagtaataacaatgcacaagaggcaccacctcaacgtcccgcaaaacgaccacgtataaaaaatccattttctttaatgacgaagatgaagaccacgtacagatgccacataatgatcccttcgtgataactacccaaattgccaacaagagagtgaggaaaatacttgttgataatggaagtggggtcaacttattatacaagtccgcccatgacaagataggacatgagacttgcgattcgcaaccatgccccatatatctatatggatttactggcgaaggcatagcaagtattggaaaaaataactctctccctcacaacgggagatgccccacaaactgtgacaaaaatgatagaatttgttgttgtggacattccatcgatttaaattgtgataataggaagaccaacacttatcgcaatgggggcagaaacatcagtgagacatttggttgtgaagtttctaacaaactatgggaatggcatagtacgtggggaccagatggcggtaagagaatgcaatagtgtggcaatgaaaggacaaccccaacctaggactcaacgtttccaagccacatctattgaacacacttgccaagataataaaagtggctaggagaagccatgtggagtcaccctctttagcttttatttattttctcaagattaaacaattttatagttttatagttgttaagtgccatttcaaaagtaaaacatttaaatttcctttttagacaattgattgtttatttttcaattagtgtttgcactttttgcaaaaaatattttttttgtaacgttacgtcctcacccaaacaagttacataagtagccaaatacttatataacttgggggcatatagggagctatactccaccactccacaaaataaatctcaaagtcattgccaacacatcactttacgagcatgagattttaaaaatttttgccatgaatattttttcaaattgttcatcttggacaggccgcaaagtcggtatatcaacgagatcaaaataaatctcaatgtcattactaacacgtcactttaagagcatgggattttttaaaataatcaatgaatatttttttgaaaattttatctcggatagagggcaaagtttgcacactgacgagataaaagacaaacgagggcgttctgatgagccataactcaaatatttctacttaccaaagacatctcgaatggccaatattggagactttgataaatgggtcgcgtgctaaaattgagcatcgaaagacttaagactatgtcgaaaactcgctcaaactagcaaaaatgcaagccaccattggcaatcaaattaatgctatctttaaaacctcgaattactaagacaataagcatcagaataaaataagaagaaaagatatattcaacttaaaattccaaagtcgccaagatatggaatgaactaagttatatatgcttaaaaagttccaaagatgtgaaaaagacttgttaagttttaactagcgagtactccacaccaagaggacaatgagtgaacccacccatgtgggcccaaatgtcaatacataaaaccactcctcagcctccgtcgcagtcacctccatggtggttacggccacgtgggccttgcaacaatgctcttcgaattcaccaaaagcttgcccataaagttgaagtccatgtcctatttttggcaccaacacaagaaagatattcgaaaaacattcttctcggcacattcttcaatgaaagcaacttctgtcttgtgatctactttattctgctcaatggtccttgcgttctccgactccagcttgtccatggctacggtgtggctaacactcataaccttcgactcaacctccaatttaataaacatggcattcaacgaaccaagctcatcattcttggttgtagcctcttcctcatcaacttcttatttggcactcccttcctctaacttcctctcagaagaagcaagcttattctcaagctccttaattgtcaaggtagcttccgcattgcatttctcgaggtccttacacttttctgtatatatgttatgggaggtagtggtcctctggtaaaggctgaagtcatcaaagaggaacaataaagacatagcaaaatagtcagctacatcataagtgtctacataagaaaaataatagatatatgtgtgcatacatatacataagctaaagttgtaaagctcaattaccatagcaagggagccaaggcgtctttgcaccagatcattgattgggacctattattcgtgtttctagcattggacacgtggactctaattagcattcaagacccataagtggggcccttatcaattgtaaagcagaccagacccacctggatatgtgcgttcgggaaccatcaagttgctggaaattttttaccaggatctagatttnnnnnnnnnnnnnnnnnnnnnnnnnnnnnatatgaattctaaaacaatgaaatcaacacataagagtttaagaaaac

SEQ ID NO: 118669 - DNA, 716 bp, Cannabis sativa
tcagggttcactctagttagtttcaaggatgaagctactaggaatgttattcttgagactggggttatccaatttgataggaaacctgtgattttgaggccttggacggaggatatggacacagctcggatggtcaaatcggtccctgtttgggtgaggttaaatggcctggggttacaatattgggggaagaagagtttgagtgcccttgttagtactatagggaaaccgattatggcggataaggtaactcttgagaggtctatgatcaagtacgccagagtgttggtggatgttgagattaaagaagaacttccgagaactatagcctttgtcaatgagaagaaacaattaatagaacagcctattgaatttgagtggcttccaaccaagtgtacggcttgcgatatgcttggacactcaattgctaactgtaacaaagggaagcctgctatgtggaagaaaaacaagcaaggggatacgcgacctgctgtcgagaatgttgctggaaaactggagactgtctttgagaaagggaatggtgttacgaaaccagcagagagcaatactgaaactcaaaatactgttctacaggccaggaacgagtctgctgatgttagtaatttagaggatcgggggaccatttctgagggtacaggggctgttaaaaatgcttctttacctgcaagtaatgaacaatggttaacacctaagag

SEQ ID NO: 118670 - DNA, 1625 bp, Cannabis sativa
  modified_base (51)..(58): a, c, t, g, unknown or other
aagagaattgtaacattaggtatttttacctccaaaaataaacattaggtnnnnnnnngtataaaatctgaaacattaagtatttatgccgcaatttaccctttatattttaaaggttgtgttttatttattcaaagtttcgaaaagttaattaattatacatttgattttttattttcacaaaaaaaaattataagaatagattattatcaatctcaattaacattatctactctaatatatatttaagtgatgaaatagtacttctcctaataataatatgttcaacatcgaatgaaaatgatttcacattatcattggaaagtttggtgaattttgaagatgtgagggatgaaaatggtatgtatagagaaaaaattaaaaatatatattgtgttattatgataattaaagtactcttcttttatatgcttgaaaaggtaaaacataaagccaaatttttaatgtgggatttgaaaatattttaaattttactttcttatttatttttagtttggttaatattttttcattcatttaattttgggttatttacaccgcatactaaaatttacttttttacctttttattatagggtggaattttttaaaaaaatactgtgttaagttttcactgttattctataattattttttaattgttctactgttgtttttagttgttttattttgtgttccatgttgttttataaaaacacagtatttttttaaaaaaatttcgtatgacagtatttttataaaaattaattcaaattctaatatttttgtaaatttcttttaattttccaatacaaatttataataataataaaaaaaatatacgataatatttattgtatgaatccaagcaagcaaaactgtcgatggaatcaaaatttatacttatttattatttttgaattgattttgttttggtttttgtttttgtttttatataccaagttcagtggtttttgtcatccaaaaataataaaggagactgcagaaaaaactgtggttgattattccttttatttatttattcaatgcaaagcttatgtttaaataaatatcaaacttggacttattatacttcactagtgcaagttgttcaactccaagggggactgaatgaaacaaacggcctatgaatgaggtatggaacagagcctcgaaaaataagttctagaattacaaatgaaacttcgagctcatataagtcataggccgttttcttttttatttcaataaatatatatttatatattggacaagattatggtaggacttaacaatagcataaaatctctacagataaagaagtttttatggccattaattttagattatattgtcattatgacataagatgtatattcttacaacataactgcttgtatacaattaaaattttgtatatataataataatataatatttaatgataaatttattttttttaaaaaaataatattaataattccaattttttttaattttaatttgaattattatttttttgaagtacttaatttgaattatttttatatagatattcattttcttaaaaataattttacttataaattaattttgggaaattaccccatatactatttttctaa

SEQ ID NO: 118671 - DNA, 1649 bp, Cannabis sativa
  modified_base (1589)..(1595): a, c, t, g, unknown or other
ttaatcatttttttcttttattttgtttgattgttttagtgttgttttacagttgtttttccatgattatttatttgatgttaatttcactgcagttcctttgtaatttgcatgttgttaggagttaatcgtcctttcgtgctatttgaaggattcataaagaaaaatttgggcatatttagatattactcaagtggtgagaattatatcaagatatacgataatgaaatttaatgatgacgctactcatgatcatgttcttgaaaacgtaattgttcagtttgattgaatgtcattcattgtgaggccttggaccacttatctgaatattgttcgcttacagttcgatttgttccagtgtgaatctgattgcatgatcttggattacaatattgggacaaaaaatgcttaagtgctcttgtaagtataattggtaagccactaatggtagataaattgcaaaagagcattctcaaattcaaattgtcaaagttttggtagagatggatattaaggatgatcatcctcatctaatttattattaattacaatgaatttaggcaattggtggaccaagaggtcgattatgaatggctttctgtgtagtgtaaatcttgtcaaggcattgcccataaaatagttgagtgtcgaaagggtgagaaacttcattgagttagaaaggaggctaagaaatccaggatagaggagacacatatggttcttgactctgctgctagtggaaatgatgttccaaagcctactttggagaaggatgtggatgagcaatatattaagagtggggagaatggtatgcaatggaagactcgtaaaagattaactcaaaaaaaagaaagatatcgagagtaacaactcaaaagttcctattcttgcatagaataaccagtcccaaactagcacaaatacttttgaggtactccaagtgtttggatcttattttacctagatcttaatttactaacatcctaaaatacaagtcaggccatccctatgccagctagagaagggaagatcaatatacctcccaagattgctctgtgagtaacttcatcaaaaaatacaagtcttgaagagaacctagtcgagtcatcaacatgctgatcaggataaatgatgccaagaatgtcgagcaaggctacacaagtcttgatttcttctacaacaacatccacaaatatctctaactttatcctacagatacgaatttgactgatctatccaatatagggatatttactttctggtcactccttttacggaactaattgtaacaacctttcttccataaatagtgaatggattcacaaggggaaaggacctaaaatcataatcttacacttaagagcactttgttgaatattctctgtaaacatcttgataactatagctagaattcactctatctaccttagtgatctacaggacattatctcataattaatacaaaagagagtaggccattaccaatatttaaggaggctgaacctctataattccatattcttgttatttatttattatctttaactctaggggtgttcacaaagtatccaatccaatccaatccgcannnnnnnatccaatccaatccgcaaaatgcgaatatccgcacttgtgcggattagattgga

SEQ ID NO: 118672 - DNA, 1703 bp, Cannabis sativa
agatttgggaggtttcgtccatgcttctatataccggggcatgaccaaggtttccaaaaaggaggatgtccttttgcgaagacgggattctcaatcaatgtacatagacatggtggaagcaaataaagaactaattgctgtgatgtcctttcatgaaaaatatttgataacatgtgattttaataatatgattttaaaatacaaggtaccaaataaatgttatagaatacttaatttgtatttagataaaacacaaggtaccaaaagtatagatactcttcattttttatttttttttagaaattataaacatattttgagatatgagaagtatatgttttagttactttttaattttattattattgataacacatttggttatttatttcatacaaaatataaggtcttggttgtttgctagtttatttgttctgttcaatctctttttcctctgtttttttctttttttttttgaagtctctaatcatggatgacagtatgagaaggaactatggtaacatatcattggcagaagatgaggaggaagaaggtttattatttgataatgttggtattgataccctagaatttgactcccaatggtgtcttgtagggaggtttttaactgatagatctcttgactatatggcgatgcaacataaaatggcttcgttgtggagacctggaagaggcatgactgtgaaagagttagatcctaatctatacctatttcagttctatcatgaaatagacatagagagagtgatagagggcagcccgtggacttttgatagagttccattgatctttgctcggttaaaagaacgtgacgatcccagatcagtggtactaaataaaattgacttctgggtacaactacatggactgaagacaggtttcatgtctgaaatagtggtgaagcaattggggaattacattggcacttttgttgaatctgataagaataatttcatgggactttggagagattatctcagggttagagtcacaattcaagttgatcaaccgctgaaacgcaagaagaaattgcagttgatgaatggactggtttgttatgcccattttaagtatgaagatctctccacattctgcttcatttgtggtattttgggacattcagaaaggttttgtgaggttatctttactactccaccacatatgatcaagaagtattatagtttggagttgaaggcagaaccccaacgacgtcgacaacattccattggagcaaaatggctccgagaagggccagaagtgggaagcagcagctccggcagccagtgtgaacgggacaaatcaggggtgagtaattacaatggggagcaattaatggaggatttgatgtgtgatgaaaatcagctgagaagtgagaggatacgatctccactaatcaaggaaggtagtaatgccaatatgcataaagtggggaatgaaatggatttttctataaatggtaatcacctgggtcaaactgaaagtaatgaggagaatgagttggtggtgctagagaataaaagagggaaaatgctgtcaaaagatttggttgatgactcacatgaccaagatgcaacacaaaatgtaaatgtgggccaaaaaaacttatctggtgcgggtactggttcccaggcccgcactccattatgaatgttttgagttggaattttcgggggcttgggaac

SEQ ID NO: 118673 - DNA, 712 bp, Cannabis sativa
  modified_base (151)..(158): a, c, t, g, unknown or other
tttttttttttttacaaaatctataaatgataagttggaataatgatttcttgctctcactctcactattttgacgtgtcactattttatagtgtggcgtggcatgccatgaattgagttttgaacaagagtctctctctctctctctctnnnnnnnnctctctctctctctcttattattagatatgaatatgggaatgcatgtagtactattgtgagccaacttataagcatgcgatgaggaggggtctctcaaaattaatgcatcactaccactcattacctttatgttttactgttaagcttcatgcttcctcaaaaggagctttatatatagattatttaattttagtaattaattaattaattacaccaaagatttaatgacataatatttcttttgtgtaataatttcaagttttatctgttaagattcaaataatgatttgtgtttgtcttcactttgtgtttatttgtttcattcacaatcacacatcatcttcataattatcatgtttgtttatagatccatataaaggttattgcaatttgcccatatacaatttaatttgttaggtaacatattgtaaaaagctatgttatatatttatatatatatatatactaggtgaatgtacgtaccgagccacgtattgttagtttcatttaagattttggtctttttaagattttgaatgtattttatttttaa

SEQ ID NO: 118674 - DNA, 1708 bp, Cannabis sativa
ctgaatcggaaacccaaaaccatcaagcatttcctctagaaagctccattcaatggtgtcataggccttcctcaaatctattttaatcatgcagcttggtttataatttttcctcccatataacctcaccatggcctcacacacaaggacattatgagcaatatatcgtccatgaacaaatcccccttggttttcagcaatgagatctggcaataccttcctcaatctgttgcagagaaccttggtagctgtcttatagagcacattacagcaagagattggtctgaaatccgccacatttttgggacaagctaatttgggaatgagagtgatagtggtgtggttgatctctttcaaaattttctcagtagtgagaaaggataaaatagcctttgtgaattcagttcccactatgtcgcagttatcctgataaaaagcactaccatacccatctggacctggagccttgataccaggaattgaaaacgaagcctcttttacttcttgttttgtataatctgccagaagaatagttttatgcaactctgtgatcttggggccaagattgactacagatcgcagaaccttccttctataatgcatactagttcccaacagtttctcataataactcagaaatgcattttgaacaccatcaggagagtcaaaccatgttccatgctcatcttcaatcgagaagatcttgttttgaatccttcttgatttcagagaagcatggaagaaagtcgagttctcatctccataggacgcccaatttagtttagcttcctgtgaaaggaacatagaaaaatctttatgaacttcattataccttctgttggcttcttactcagctgccatcagttgtaatgagagcggattcttggtcattgcatcttgggctgctattagttcattccttgcaatcgtatcagccttttgaatctcagagaagccctcttgatttatctgtttgagaatcggtttcagtcttctgagcttagacaccactttgaacatctttgtaccaataatgtctccttgccaacattgtcttacttttgcattaaaatctggggctagtttccacatattgtagtagcgaaacgacttcttccccgagttccactctccataaatagacacaagtatggggctatgatcaaaagataattcaggaaggaacacaacttccgaatcaggcaaagcactactccatttcgaattaatcatggctctatctatctttgaaaaaattctatcttcgggcttttgtttattgttccaggtgaaaaaagatccagagtactttaaatccatcatatcacatgtctccatacagtcccaaagtcgtgtggaaggattacattgggctttcctaccaactctttcattagcaaacaatatctcattgaagtctcctagcacaatccagggctcctgaataccagctgctaacttctccaaatcaccccatagatcttcccttttatgctcatcattgaaaccatagaggaaagtgaccaagaaattcccattctgttgcattgattgcacctgacagtggatcatttgactagagcagaactgaatgttaaccgcaaatacagagggatgccaagctacaattattctccctttatccatccatggattattattagtgaaacaccacccttgaaaaagactacaatacaacttccccata

SEQ ID NO: 118675 - DNA, 2040 bp, Cannabis sativa
cacatgacaaatgttatgttattgaaaacaaaccttaattgtctgtgtaatgaagataagataaaccggtatacaagataaactcatttactattacagagcattatacaattaatactaaaattaagtaattagcgaaaacacagtcacttagaaacaaattaagtcttacatttccttctccatttgtttcctgataaactccttagtatgtgctgtcactttatctgttttgttgcagagaataagcactggaatcttcttcgtcacaacactagccttggttagaacatcataaaggtaccttttgcagaaaaaatacataagttagaaactcatggccaaaggtgtttgaatgggacagaaaaggaggaagaaaaaaaatgaacagaaataaaaggaaacaagtgataatatcttactctgatgcagcacgacaatttggtaaaaattccaaagcatccaccacaaaaactagaccggctgcttgaggcaaaaagtcatctagcttaggtcgaagacgagaatgcccaggaacatcaacaagatgaactggcttcgtttttccattctgttaagaaaattcataataaggaggaggggaatagattattatggacatcacccttctagaaataaagaaattgcagttcattgcatacatttacatgtacaagagaagatgcatatcaatatatcataaactaagcatccgtctattacaaaagacaacattcggggcaaagatgtcttaacagaatacactatatttccttgtgtcagttgtgtacatatgcagtacatagtgaaaatgagctaaaatatgtgaaaatgagctaaaatatgctacctttgttttctcagaatgcagcacaaaggtgccctcgtttggttccatagatgtaacagtgccctgatgcgatgagccatcccgcagctggccataagcaacaattcatgcgtatgagaaatgaaactaaactagtggattgtaataaatccttgttcataagttgacaaatattgcaaccagaagaacaatgcagatgccccaagctcatttttcattaagaaaaagcataacacgaatggaaaaattacactattatgcaaatttcaacatcgagcaacaatccaattaactagcaccacctcaaaatcttgacttatgaagacaatgttatgatatactcataggtgaaattcagttatttacaatactagctccagtactaatcttcaacagatctaaaatgaaagtagaagaaccgttcttcaacagcatcaaattctacactaccactgtaccacaaacccaaatgcaataaaccatgaaaagcccagaaaaccagcaatgacgaccttacctgatagaaaagaacagtcttgccacttccactaagcccagtgagtacaatggtgttagatttggtgcgtttgaacagccgaactggaacaagcaacgcgaaaaaaaattgaaacaaacaattcgaaaaatgggggaaaataaataatcaaacataaaattgaggatgaattgcgtagtaaaacttactgagaatgaagaaaaaaattgtgaagataagaacaccaagagctacatagagctgttcttcgggtatctgattaatgtactgtatagcttgattccaccatggctcaaaccgagtcttcaattcttgaaaaccctccattgttctcaatttcaaatcttccattaccccaaaatgaaatcgtcttcggcttctcgattaaagagagaccctttgggggaagttaagaaaggaatcgactagttcgagaaatgaaaaaagagcagggaatcgagtcaatcaatctttctttaagccctagactgatttggtaaaaaccaggcctggcctatcacagtgtgccaagtcatttttctttgaaacttttagagcatttttaaaggtaaaactttaaaggatgtttttaaaattttatttttaaaaaataaaaaagtgttttaaaactatttttattttttgattttaaaaataaaaaacaaaagtgtgt

SEQ ID NO: 118676 - DNA, 2134 bp, Cannabis sativa
aaaaaaaaaaaaaaactatataaagacgtttcgatcaacgttttatctttataattatcctaatgaattgaaaaaattcaagtggatttcacaaaagagaaaaagtcttactatattttaatcaaattatttaattattatattttttttttgagagggtgatctaaatcacactatgataatcgtcgacttagaggaacttccagtcaataagataattgtctaaccaaagatatacttagtcagaatatgagtcactacaaacaaagcgacttatataagaccaagttatctcataaatttagacaaaacaacttgataccaccttcaagaggcatatgatgtaaacaaccgccttgaccaaaagtacctacaaaataaacagatgtataaatgtggattaacacactatacaatgataatgttgtgaatttttaaattaaggataaaatacaattattattataacaagaaaaaatttatctttgaagcctttttattattagagctaagtcttccaaggtagaactatactaaccaatataatctacatcatacataagatttaagagattaatcaaactaaataaatcaaatcccaaataaaattaactattttcaaaaaaagtaacaaaactccagtgcctaacaaataaatgataagaaaataattatataaaatgatagaaagaaattcctccaaaattaataaaatataattaaaaagtaaaatttaaaacttatttgtgaaaatctacaatagcactctttgaagttgaattcatgcgcaaacgaattaacaacaaactgcaaactagctaaataatatggtacaaaattgtcaaacaaaatgacataaacttgccaaaaaaatagcacaaactaaaaaaatataaactataaactatttatataaaattattaagaaaaaaaatcattctacatttacatttttttagattactccaattttacttttaccccctacattttacaacatgcttagcaataaaatatcattttgtaactgactagtaattttataatatttattgaaataaaataaaaggactttttcatttttacacttcaaaacgattttttttgtatttttacaaaattttacataaaaacctcctattgcaactggcgctgcaacttaaaataaatcaaatttaatattaaattatatcactaataatattattataactagaccctttgaggttttatctccattttattatcaatgttgtcgtttcttgtaacaataacaaacaaacataggcggcttaaccgtacaaaaggaggaaaacaagaacacattgggtggttaagtattacaaaatgggcaaataagcaatagccaattagaggaacaaatagtgaaggtggtggcggtgctcacattcacaatcacaataatatgattcattcaggagtggttccattcagttccaccaatgctgtgtttgggtgggcactcccataaatcgcattcaaaacacaaaacaaacaaacactactctttatttactctttactaaatcaatcaaaaacatcaacggctgaaattccattcgatactggaatctatagggtcccacccatttccacctccacttgttgtcttgccttctcttggcttacattatcaaaacctcatcttcctactatcctattcctatatgctatctcatcctattaattataatatacatcactttttcatatataaaaaaaaaactaaagaaaattccaaagtcaagtcatcttacgtggcttcccatgccaccatatattataatagccacttccccctgttaaaaagagctgtgttaaaccaatttaattttaataaattaattaatttaatttatattaaatgtattaattatttttattaacttaataaaaaatttaattaaggtgtcaaacttaaattaatttaatatgtaacacttctttttaacaaaaaaaaaatcttcgattctttctttccatcactcttttttattctttatatatttcttttacttagggcatttccaatggagaaactcaaatttgatgttaaattaacaccaaaaaactactatttcaatactaatttttttttcaattccaaccacaa

SEQ ID NO: 118677 - DNA, 2471 bp, Cannabis sativa
  modified_base (27)..(29): a, c, t, g, unknown or other
tctggattacattgaaatagagttttnnntagggcataaaacccaacatttaggtcgttacaacttgtcgtttttagtattttatgagatgatcaaaattcttattttggccataacttttcactcgggtgtctgttttagacattctatatatctttttgaagcttgtaacgagctctacaatatggtatatatatattagaggcaaagtataatttttattttaaggtgtttataccatgagatttggtaataaaaaccctagattattttatacgagtattaggcagtattttggaatagaaacttatcaatttaccgttggtgcgacataaggctgagatcatcgagcatgtttctccactcaattcggccaacatgcatgaatatggattaaagataagaaaagtacgtctgtaccacatagcatgccagatacgatcaagattgtttgtgagttagttgattataaaaaggagcgagatatttattaccattatgaaaataaggtgacagttattactgttataaaagcaaggtgacagtcattactgttatgaaaataaggtgatggtcattaccgttataaaagtaaggtgacagtcattaccattatgaaagtaaggtgatggtcattaccgttatgagaacaaggtgacagtcattaccgttatgaaagtaaggtaacagtcattaccattatgaaagtgagaaagcagtatggcagttatgaaagaaaagttatgactataaactggaatcgttgttaggttccttatttgtcagttatctccatagataatgacagtgacatgaataccaggagtggtatttgggttgatccacatggaacaatcgggaaaagtaatgactataaactggagccattgttaggttccctacttgctggttatctccataggtaatgacaatgatatgaatattgggagtggtattcaggttgatccaaatgggacaaccgagaaaagtcatggctagactgaaactgttgttaagtttctcacttgttggtaatcccgattaggtagcggcagtgacaagaataccagttagtggtattcgggttgtctgattttacaacgatgataacatttggatactagggattgagtattcatgttgcctggctcaacaataatgtgatatttgaatatcaattttgagaattagggttattttattaaacaacgatagagatattagtatgtcaagttaggcatcagagttgttttattaagaaaatagtgtgaatagttactttatgaagtaacagttatagttattattgttagactgataattgtgtatgattgtatatccttatattagtattcattgtgtttgagtatctgtggggaactagatttaaatacatgagtaacgtatgattctttgattctggtgatgtgagtttacttgttgatattcgtgtgatgaattgtatgactgttgttattgcttttcttgctgagtctttgtgactcacaggtgctttgtggtgtagataaaggcaaggaaaaactaggacaaccatgagatgatagtcttctccggcaaatgtacatatcgacttatctggcttctatggtcgagttgttagcagtgattttaggttgtacttgatgggtgttttgatttattgttgtatatagtctttttgtaaaactttaacaggggatccccgaaacaaatttttagcaatgtcatcacttttattgatatggtttcatttgggtgaagtttttactattataatagatttgattaaatagttaatctactattagtaaactatgtttcaaaaatacacacatggcgtccctagggtttagggtgttacattcctagagactccttctggatggataaactagactttcagaactcctttccggatgactactatctttccatgagacttcttatagagaccttttcatttggaggaactataccacaaattctacttagttcctttatattaaaagtgacggtgatgaagaaataatgcagccatcatggttggtattacaggtatctcagtaaactaatttttgagattgatcaagtccaagcagtgtatgaacttgttgactgttaagaccttagtcccaacatcagtaggattatcttctaatctgacattttttttaattcaaccaacccttcttctatagattctaaattatactccttcttacatagaacgctctatatactaaatatagatacactatgaattatccattatttgaatcacaataattttgatcctctatagacggtttacattgagtagggacaaaattattattttacccttcattgtattttaaccataaaatacttagctatttgtaaatgatatttcaataaactaatataattaccaaaatgagcgctctatcatttattgcgttaagccaagctaaggaactatcgtttcactt

SEQ ID NO: 118678 - DNA, 2407 bp, Cannabis sativa
  modified_base (1040)..(1050): a, c, t, g, unknown or other
  modified_base (1245)..(1250): a, c, t, g, unknown or other
ataaatgtttaaagggccggtccacagaatatttttataaattgaaaaaaaaataagatgatgtagattccttcaagtattaaatttgatattaaaatttagcacacaataatatttatgtatcttttattaataatagtgttatttactattatttttaaaggaagtcattaaatattaataaatgtttttttttaaaaaaaatcaatattaatatattaatggtttcaataaaagtgattttttcgctaaaaaaaatatttatacaggactttaatatataatttttaattactatatttctattaattactttttaagatatttaatttaattctgcctgttagcacatgaaaatactagtgtgttagagcttaattataaaaattgtgaaatataacatttatttatatctacccattttaaaagttctaaataatttgatcgtgtataataaaaagtaagtatacataaattgtttgaacttaattttgacatcaaaattatttttaaattttctaaaatgaaaaagaaaagtactgtttttcaataaaagaaaatgaaagaaaatataccataagaatggataaggatgaacacatggattggtggagccatctaaataatatcttctgcatcgagatcttaatgatgagcgaagactcatacttaaatatattaaaagttactttgagttttgtctaattcaaagactcagaaaaattaaaagctgtgtccaattattctccttagtaggtggggtcacaactcacagtgtgagatggataacataattttggaaaacgacacgtggactcattttcaatagtcttatttttctcttattggataagctttttatttcttttacaagtttgaataaatatttgattttctttataatttgaggtaaatattattttggatcttatatttagtaaaaattattaattggattttttttattaaataacaaatagatcctatatcttccaaaattatataaatgtccaccttaaattaattttttatcaaaatannnnnnnnnnntaatttgatctagagatgttatgataaaattgattacattttctatatctgtttatgttaaaaattatcttatagttgattatattaaaaaataaaattattgaaaaattgagttcagggtccttactattttggaaaatataaggtcaattttattatttaacaaaataaagagttcaattagtaacttttgcnnnnnncaaggtccaaaatgatatttacctaaaaactttaattctacagtacactcttttaaagaactgttctggtagatttctaatttatttcgaaacactttataatcaaacctttttttaatgataaatattataattatttaaaattatttttaaatttttaaaaaaattcgaataatttataataaaaaataaaatttacatatttgttgcacacaacattttttttttatacgtgtagtaagtaattgattaaatctaatttttagtacggtaaactatttagaattttctaaaaatgtacaaatactcctaaatcagtataacgtagatgattataaaaaaaaaataaaataaactaaaatgtatttttttagatatcaaaacatatgaaggatttactagaacaactctttaagggtctactacgtaaatatctaaaatttaatattaattaagttaaagtttgtgttatcttctatttttcaacattaatttacactacatcatttttaaacacgtgacatcaaaattatatatattatttttattatttctaaaatattttaaattaataataatctaagagaaaattttaatggttacatcaaatatattattactatggctatagttatatttatttttaaccattaaaaagaaataatatattacttgatagtaaataaataataatatattactgttgaatggttgtaaatcatttaaaaattaaaaataaataaataataattaacttattacttgatagtaacttgatactttaattccttataaaatcttaatcaaaattaatttacaaataattattaattaactttttttaattagtaagaattttttagcaattattttttttgtttttggtgtgtttaattattaaaatatttgtaatacaactctttataatttaaaattattacatacataaccttaattaataaaaatagtaagaatgatctctaattagaagtaattctacaatcaatcttatttttaatactttaagtaagaaattaatgtgacagtttcagattggttcaagtcatttaattattttttcaatttaaaaatcaaataaaaaaatagtttaaaatgtaataacaattataaaattaaagataagttaattttttttt

SEQ ID NO: 118679 - DNA, 975 bp, Cannabis sativa
tactgactttgacaaagacgagcggaataatattggcgtatgaaactagataagtacacccttcatgttattcaaaactagtaatttaacaccgttcgaattatataatatattcttccaaaaaaaaaaagaattatataatatatatttatttatatgtgttaatattaattaagtaatataacgcatgagataggagtgcatatggcctaatttggttggattagaagtgtttaattataatgagacaatttaatgcttgtggtttaaagaagttataaaccttcaatttttttatttttattattatataacccaaccctacttaatataataatatttctcagtgattcaaatagttcaatgtaagttcgtcttactcttctagctctaaagattttaaaattagtagcaaaaagtctccagtcacatagaaaagggtcaaagagaaaatttgattattaggagaaagacaaagagggggagttagtgggatgaaaaagaaatattaaaaaaatgtttttttttagtttttaatgattttataattttaaattattttttgtaatttcaaaataattttgaaataattttttataatttttaaataataatagtaagtatgccaatataaatatactacgtgtataaaattgtacacataaacagtccatattgacaattaattgtaaaaaatggatgacacctttaatttgtaatagtttattggtatgaagagttttaccactaaaatttaaacttacaaggttaaatgcaaatgaaacgataattgaaaatgtttcaccaccaaaaattttaaatttatattacaaacgtgataacatgatttaatttagtgcatacacaaaaaacgatatatgtaaggctaattagtaattgccccccctcccatgcactaaatcgtgctctttgaacttttttggccgttagaaattccccccgaactattgagat

SEQ ID NO: 118680 - DNA, 1124 bp, Cannabis sativa
ttactttctgctgctgcaaacgcttacagtttttatattttcttatttacaactgacatttgcaaaaacacggtttttcaagatcttcaaataaagtgcttaatcttggaagaatcgtagtactctaaagaaacgaccacaccatttcttcaaaaaagttcaatttgaagtggaaaggcttgagtaagaagtagaagcgaggtgatatgccaattttacaacaaaaagactagaagaatgacaagaccatatcaaagaatcatgattattcaagtcagggataaaaacttttagaatttctttaactgtatcatgataaaataaattagagtaatttatttagtcccagttcccccttttattcagccgtgggaatagtaggactttcaaaagctttgtaatttaggtatatagcattgttatcttaaagtttacacagctgacgtggcctttccatgtggcatgatctaaccatctttttgatctagtccgagcaaaaatatgccttgcaggtccatacaaggagtaacaaccatctgcagatgtcacatgaagcatctagttggatcatctacctttcggccagagaagatgggggcaacaccctactggggtgattctacaagccaatgtcataaaggagacaagtgtcgagagatcttatcgaatgactaacatgccgatcagatctagtactaccagggatactggacagagatacatgttcctttatttcgtcctcaacaagctttctaaaatatctacaactgaatcctacaaactcggatccaacaaatctatccgagaataaaggagattcaactgattgtagctggaccttaaaaaatagggatatttattatttatttactcattttacggagccatatgtaacaaatctcccctataaatagtgaaggcattcacaaggggaagggaccagaaaaccaagagatatacttgtactcacgcatctatgatcacttcactgaattatttctctgtaaacatcttgagagtcatagctagaattctctttgtcatccttagtgatctgcccgatattatcccactaaaggaccactttcttgttataattttgccactttatttcaaccagttat

SEQ ID NO: 118681 - DNA, 1273 bp, Cannabis sativa
gagagagagagagagagagcatagagggtcgagtgtgtgttttttggacaaactttgtactggtttattgagattgaataaagattttcaatgcccgtgtggctaagaaactgtgactaaatcggagttgcaaagcctttggtggaaccatatcctgtcaggtctatttgcaccaccatctttttctggaaaaccaatttaaattttcctcatttggggtcgacgctacgttccacagccggagtatttgacgatgcttgctgccatcgtcggagcttcaagcttgctttatcgccagatctgagcttcaacaactcggagtttgacgacgattactgccatctacagagttcgaagcttgcttctatggcctaaccttgatgctaacgggtggagtttaaatgccgatttgggggtcagattatcaccatctgtagtgaaagagagagctacagattatcacctcggtgctaacaggtctgtttatgttggcccattcctttggtcttattggttcctcgtcctcggctggaaaaagaatggaggagctgtgttaatgctgccggcgtctacgggcgacggagaaaatggatcgaagggagtttcgtcctacctgtctcgacgtccgagccaacttgtgaaaatgactgctcatgcggctgatggtctcgggaagtcccaccgtgctgtgtggtttcttaagagtcgtccgtacggagtagagaagtcaattgccatttctggctttggaggagagaaagttgatctgggtgtgagaaaggaacctgagtctttacctgttttgccttcaaacagccaagtctttggtgttaacgctggttatttcaattttttgaccgttagagagaaaaacatggaaagtgggccttgtgttaatgggccgtgtggtaagttaagtggacaggccggttcttgcgaggtgtttggtcatgggcctagtaataaagttaatagtaatggtaatgctgataatgggcttcattttatttctagtaagactcaagtgggtgggcctgttttggaggagatttatgttgagtctaactttaaccaaggattggtggggccgtgtatcttgggtaatggctctaattctaatgggccgacttctctagccaaagacaaagttgggcttgtggatgctaatttgtctactaatatccacggagcccaggagcaattaaatgaagaaaaagctttggctcaatttttaaatgctcaagagagcttattgcatgacctcaagcacttt

SEQ ID NO: 118682 - DNA, 725 bp, Cannabis sativa
tattaattcattgctatattcatttcacaacatgacataacgtacaattgacaatcaacagaagattaatcaaactatatatctatatatgtatatttatagcatgaaacaacacggaaatataggtatagagcaacagtggcaactgcaatatataattggtggcagattggttttaataaaggctatggacaccttacatgttttggggtagctttatatatagagacttgtattagtttgtggttgtggtgacagaaaaagtcattgcagaaaattctcatatgtaggaaagtaatatttattggtacaaaatcccaaaatttgctttctaaattgtgatccaggtaaccattctcaaatgtttgtattgggaattcccggttagtgtggaagcagagacaacaactacaacaagtgtgtcgcttggtttgatttgtgttggtacagttttaatcaaaaaatttctcaagagcaatcaataaaattccaagcttggattttgtttggcacaagctttggccaattaggtttggcatatgtgccccttagcatttccccacaaaatatcaataaatgcatgaattaatgagcactgattgaccttagtagctcagttgtctgggcagattaaacattttcatcttggtgaaaataaaaagatcattgttattgggtaccaatagtgtctagcatctttaagacatgtcgccttgcgattggct

SEQ ID NO: 118683 - DNA, 3188 bp, Cannabis sativa
  modified_base (48)..(70): a, c, t, g, unknown or other
ttgaacgcaatttttggcgtgttaaacttttccgaatttcttaaaatnnnnnnnnnnnnnnnnnnnnnnnataatttacatgaccatgagaaaaaaattgtctaagaaattatttcgaatactaaaatagagagagatgtatcagtgtatcttttttaagggggtgcattataaaattttccaaaaatatattatgtagttatttaggatattttataaatttttaaaaaatttaaaataattttcgatataaaaagtataatttcattttacacgtgtaaaaaaaaaaactagcatggaatgaactatttaaattttatttttggtgatttaaatatttttaatttttttttttaaaaaaaaaaaatcttaaataagtacgttgtataacattataaaaaaaataaataaaactatctatgaaaaataatgagatgcgagcaccatcaaattttccaataatcttagttgaaaattcaataaaattgattgtaaaactcttgttttttttttttttttaatttgagacaactggctgtaaaactttggaaaggaaattaatggttttattaaaatgaaataaataatttattaaaaatgaaagctatttagaatttttgtctcttaatatgtactaaatcatatttctataaattttgacatgtattaaatcatactcttaaatttttcgaggtcgttaaatttttttcttaaattattaagattatttaattcaaggactgctaactaattctgtttaatttactaatgcaatgattatttatgtactaattgtgctatcgaatttcgatatttactaaatcgcatccctaaactttgacttatattataatatttacggaattggactcaaacttagacgaccttggactcgaactcagactaggacaaaatctgagttggagtcgagtttatgacaaaaataatataattttacacaaactattaatataagtaaatattaaatatattatatattaaataatattaatacaatactatactacacaatataacaagtgaaatgttaaaaggcactcacggtgcctaacattctatgaagtgtaatatcgctattagttcaatttaatatcgtgtcccacttatgttaatttatgctaatttggaattttattttctgaacttttatatgtaccaaatcacgccccatttaacttttcaagtcgttaaaaattcccctcaaactattgagattgttgaatttaaggatttttgtccaattttactgaaaaaagtctaacgtgaatgaaaatttcaaatttcgggagcacaattcggtacacgttaaagttctgaggcatgattttagagacactattcagtatatggaaaatcgtcacattaacaaaatttaataaaattagataaaagttcttaaattcaataatttaagggaaatttttaatgacttgaaaagtccataggcataattttatacgttaaaaatttcagaaggcaaaaatcttaattaactttttaataaagagtatagagaaccgttaacctataccaatggagcattactattaggcatcaacaatcgttcaacaaaattaaataaaattagataaaagttcttattcaatagttcaacaaaatttttaacgactttaaaagttcaaagacataatttaatacatttaaaagttccatcatgcaaaaattttaattaactttttaataaagattatagagaaccgttaaccaattataaagtcgtcatatcatagaggtactagacactaggcaccttgataccctataccaatggagcattgctattaggtatttcaacgatgcctagcatttctagacatgtcgtcttgcaattggttagcgatactctttaaaaattattatattaaactatatgagactcgatacttaatttgaccaataccaatattaacatataggacaatgatagataccaatagtaatttttaacatttctcgtactaatattaatacaacacagcgtactaaacgagacaagtagtattaagtagtgcttgcccgacagttgggggagggggttggaagtagcaaaaatggggagtgtgggaaaaaagtgaaaagggaaagaaggggtgggaagcgataaaaacatcctctcttaactttcctcttttttctcttctctctttgtctttgtgcgtctatgtagggatttccttttccagagtagcagcaccaccacccactcatcttctactttcatttccacctaatggattgatttgattcattacattcatctccaaattctctatccttacacacccacctcacctcaattcatctctttcaggtaaaaaaatcctttctttattattatcatcatcaatatgatctactcttctcatttctaatctcttcctcttttacccagatcggacctctttctttaccaacaaaatgtcctcattttcctagaaaattctcgttttttccgagattattctcaccaatttctgttcaaaagtactactttgctcgttttcagtttttttttttttgggttagggttttaattactattactattaatatatgtatttttttttttaatttaatatcaggcgatctcttagtcaggtatctttattcgttgaaattcgagcttgttagttgttattatcagttgtaatttatttttttgtcgtttttagttttttcagtaagttgtttgtttgttttatgtttttgattcagcttcccatgaagtgttgttttttaatattattatttatttcttaatggtaaattttagtcgtgaagtgaaagtctttaactaaaaataaaaatgcattatttaagcccatcatcagagaaatgaagtttatgtttgtgtgtgtgtttgttagatttgttgttatatgagattctttgtttggttgggaagatttgttgctttactttcagtgtttgtgattttcaacatgtttttactacttgacattgtagtagttaaactatctgcttttatataatatttaaaaagattgagtaattggcgacgaaactcctttattatttttttcgtggcgaaattattttttctttgtaaatttgaggcgtcagtcatatatcattgttatataccaataactttaaccactgtgtatacatgaaagtaaaatttc

SEQ ID NO: 118684 - DNA, 2471 bp, Cannabis sativa
tgtagatggatcctccaatgagcaaagttctagtgttggactcatcatagttactccagagggattttgaactcacaatgcattgtaatctgagttcactgcaacaaacagcaaagcagagtatgaggcactcctagtaggactacgattagcactaacaatcaaagctgaatcacttgagatctacaatgattcacaattagttgttaatgcctaagggtgacacatgatttcatacttaagcaaagctaaagacttatgaacccagctcaagcacaactccatccaacaagtaccgcgtgaacaaaatgcaaatgcaaactcactagctaaactagctagtacaatagattctgatactcttaatgtagttcccattaaatacctaggcaaagggaacattaataaagacttggagcttattgacaacactccatcatagatgaccctaattgcacagtatgtagaacaaggtattcttccaactgacgagaacgaagctaagagtttgatgagaaaagcaacttccttcatcatcatggacagagtaatgtacaaaagaaactttccaatgccacttctgaggtgtgtcacaaaagaagaagccaaaatcctcatggtcgaagtacatgaggattttgtgacaaccatgctgggggccaaagcctctgaaagaagatattgagacaagggtacttttagccaataatgacagcaaactcaatggactatatcaaaaaatgtgactagtgccagaggttctctaaaatacctagggtttccccaaacaaactcaagaatatgcaaacaccctagccatttgctatctggggaattgacctcatgggttcaatacctaaggggaaaggtggagttcgatatgcagtagtggcggtagattacttcaccaaatgggccggggcagagcccttagccactatcatgtcaaataaagttcttgatttcgtggtcaagaatatcatttgctgctattgactcccacagaagataatgtcaaacaatggaacatagtttaacaaagatctctttactaattttttcaacaaacatggaatcatcaagatttttttagcagttgcttatccacaagcaaacagacaagtgaaagcagtcaaacaaactcttaaacatatgttaaagaaatgcctggagcaatctaacaagaattggcctgaagaactactcgaagtatactatgggcttatcacacaacaacaaaatagctataggtcatactcccttcgctctaaactacgggtaggaagccatgatactcgtagagctcacaccaccatcacatcaaagactgacatacgaccaacaagctaaccatcaatcgctagcctagtctttaaatggaattaaagagattaaagaaaggtctgagcttagaaaggaggcgtatcagtaaggagttgtaaaacaccacaactccaaggttaaagatagaaaatttaagcttagagatatggtgttacgatgagtattcctaaacacaaaagacgcatcagcaggggtactttggccaaattggaaaggacaatatgtcgtcactgaagcacttgaacctgggacatacaagttggcacgctatgactataacttgaatctagtaccagtaccaaggtattggaatggggtgcatctacagcggtactaccaataaaagcaattgtcctcaaaacagctcacttcatagtgagattcactttaccttgtgcaagtaaatcaatcgcctcttaaactgaagggaagcaataaaattgtctctaagttaagaggtccatcactaaggtatggctcctatactaaaaagttaaacatgacattagtatagcgatgatcacttaagctaagcttggatgaagaaagaagtatgcaactattactttaactgttcttttttctttcagcttagctcacagtaatgtaattatatttaatataaggagtaaaaatgttgaacaaagtttttttttttggtaatttattaaaattaatcaattacagctcacaaacctaacggtactctcaagcactgagtaaagcttgtagggttggtgttgagttaactctggttatttcattaatgagttcaatacgaccaccccatgaattcttggattagtagagagtgctcacacgtgtaacaccacccaagagcaatgatcaagaaggtccttaccttcccaccacgggccttgtctaagtttttagacttgggcatagtcaacttagctctaataaactgagccacatgaagaccatatttatcaagaaatcttctacttctcttcatcctagccatagaaactccaaaatttaaagttgcttacaactcaagaaaagttttattgagttttgaaaaggagaagtttaagcaattttaaaagaagaaattttcaattcacaaggatagtgttttggacttttggaggccttgggaaaaa

SEQ ID NO: 118685 - DNA, 1936 bp, Cannabis sativa
  modified_base (1877)..(1888): a, c, t, g, unknown or other
tacgataatctactctcactcatattgatcatcattgaagtgtaacctaccctaccttatgtggttctcacactaggtatccaacagggcaatcctttatcaaaagttgtactcacccatgataagataacctacaagtaaactcatacaagcagcacaaaaaaaaaaacatattctgcaagtgttatgctcacacaagcagcaaaaattcaaacacaaatcacatgctaataagaggctattttaagccatcaatccataatacatagttaagaacataactaacaaacccataacaaagttgtatgtttcaacatacaccctattcataaatgtccactcttcttacctcgattgctaagaacaacatttgcactacttcaagctccttaatgtagttccttgttgagaacaatatcctcaaaattagggtcactagagtgcccgtcggttctggcaccgaagagatgtaaaaactttctcttctctcttttgacacgtaattttgattggtaaagttttacagggatccaaaacctcattatgatccaaaacatcccaataacttggctcaaagacaatgtcttctttactgccggtgtaccatctttaatgtagtcaaaattgtattatctcattactgaccatttttctccatttcttcacatccaaatcactcctaaagctcccttaagcttttaactcaaaaaccttccacacacgtttacatttgaaactctccaagaacacctttcttcaacaagaagatggtgactttcgatataggtgtcattggaccatctattgacatcacaaccaatccttaaggccctttgagctcaaataaaacctcatttaatctaggaaacaactcaaacacattcagatatgggttaattttaggaacaataatcgtgacataaaactttgtcactgttatttgtgtttttagatagggacacatgtaattccaaaagcgattacagctcagatactttgggcccagcaataggcccaaataaaataatggaccagatcgattattgaagtcaaatctcctggatgacgaacgtatgaatcgactaggcaaaatagtcctctaaagcatctcacatctaaaaagactttaggcaaagcgtctggagaagtagtccataacatctggacaatccagctccgtgtcatactcattaataaccgtatctcacgatgtcaagatttaactcctaagatcttgcccacagatcgtatcttcataatatgggaaaatagtaattaagtatcaagcgtttattgtgtctttattatccatgattataggacacgaattggaaaactatcaacatgatgtggcatctacatcagcctacaatcagtgcctcataggttgggctccactaaatgggtcaaattcaatatattatttgtatttatcccattagtgggaaaagggaaacgaataagaaccttagtgccataaatataagaacaaaaatccatgaaaagagttaaaatctcactcctcaattgctcaagcaaattcgaaggttcaaacacttgtgtaaatcataaggctttctagtcgtagcataataatattaactagtggactaaggctcattaactctccaaccatgtaaaaactctggtattatttctttgttatttatctatttctttagcttccatttatattttattgattttcaaaaatttcggtaaatattttggtgctttcattgagagttcaaaaaagcagtgtgataccatcaatggctatatactgaaaccatggtactcactcgaaacaaaactagcagttgtgatggagatactcttgtagacatcatagatcctactgttgggttttatgcccnnnnnnnnnnnnatttcaatataatcagatttactcattaatatagatcagaaataacat

SEQ ID NO: 118686 - DNA, 1263 bp, Cannabis sativa
ttttagaaaataaaataaaattttaaattacaatttatccttaaaaatatatattataaaataattaatactttatattatttcttaattaagatagttaatttaagcattattttttattacatttgctgataaagtaaataaaataaaattattacgattttatttctaaataattttaatataatatgtattataaatattgatttttattaatttattttaattttaattagttgcataaaagataatatggttccccacctatatttcttcttcaactataaaataaacaataaaaattgattgtgttaccgtcagtcatgcttgtttttgggtcccactgttaggaacaagtttattgttgacacgtcatccaccctccttttcatcatttattttaatattattgttttggtttgttggtttaagattttattctagtttctatgtaggaaagggaataggatagatattgttgtaagtgatcaaaaggaatcattggatagatttagttgtaaaatatgacccctgaaatatatcgactacactaggtgaaccaattaaaatcatcatttctttccattcttcctttgctgtgaaatgagtgaatatcatatataatacaatatggattgattgattgtgtctaaaattagggtagtttagttttaggtttattttgaggttgttttaaagtcatttatttggattgaagaatattattccatatgaattaaatgtaaaagtattgagccatatataagaacacgagtcatttcactccttactaacatatataagaacacgagtcatttcactccttactaattagttttgagatggaaccacatgaatctcatcaatttataatgttttattatttgaatttacgtttgtttttgtttttatattaattttaagtttgagatgaagagagtttcacttcttggtgaaattttggtatttcttgagttttttagtgatgaaatgattaaattttacaaaaagaatattagaattgaattttttgacttggtacatttttagaggatttaaaaattcaagttttcaagattcaatatcaaaggtcgcaactcttcaaagttatagaaaataactttcggaaaaaagtcaagaattgcgactttcgaaacaattcaactattttggacaacattctggctatgtttggtgggagggagggagagtaggatggatggagaggttagagaggatggggagtaagagggatagagagga

SEQ ID NO: 118687 - DNA, 2156 bp, Cannabis sativa
atatatatatataactacatctaaagagcacaccaatgtagccgtaatagctaaaaaaaaattctgaaagatcaaaatctcaaactcatatttcaaaaattaaaaagtaaaaatacattacctaattaaaaaatttaacatacatgtattgtacttaatatcacttaattaaacctgattaaaaagaaaattaattatacgtgcactgaacgtaacatcaacctatatatatatataaatattaaatttttcataaagttttgcaataatatattgaagcataatgttaaaaattgatacaaatatattacaagtcttttttttctgccaaatatagtataattttacatatctctttaaaaatattcttgcaaattatatataataataacaaaaaataaaattctaatcgaatttaataaacatatgcaccataaaaggtaacatatcgttattgatgcattttaatataagtttctacaaattttaatttaatatgatttaaaaactactaaccaattattgtgtgtgaatcattatggtattgagcacctcaaggtgcaatataacaataatagtataaaaaaaatcatttataaaaaaattgtacaaaaatcattcataaaaaataaaaataaataagacacaaaaacaaaaaaaaaattactaactaattattgagtaccacagaatgacaataaatatcttatggtgccaatagcaagtgtaagaaattatttaccaaaaattagtatataaaaaactaaaaacagtaaaaaattgtatataaaaaaaacaaacaattgttttcatttaggttattataacatccatttacatattgacgttatatatatttaaaatttgagtaagatatttaaaaaaaaaaaaaaactaataaaaaggtcaataaaattgaaaaaaaaaacgcataacaataaaacataggtaaaaaatgcataaaagatgaaaaaaaatgatatttcttttataaaaaatgtgagattttttttttttttaaaaaagatatatatatatataattaagattaaaaaaagaaaaatttgaaatgtaaaaaaaaaaaaggaaaataaaaaatatataattttcttcaaatatatatatatataatatatataattgagattaaaaaaaggattcatatatttttttttttttttttgaaaaaattaagattaaaaaatgattgagaataatatatacaaataattgagatctttttttcattaaaaaaaagagaaaatttgtcaaatatagtctaattttatattttccgttagagatgttcttgcaaatttatgtataattaaaaaaaaatataatcaaagttaataaagatttgtacataaaaacaacaacaatgttaagggacaaattaaggtatcgagcaccacaaaagtaacataacgttattagtatattttaatatcagctcccataatttttaatttaataaattatttagaaaattactaaccaattcttgagtgctatattgatgtgacataaaacaccttaaggtgccacatatcaataatagtataaataattatttacaaaaaaatgtacaaaggccattcataaaaaaataaaaagaaaaagaaaaccacaattgaagctaataagaatatatacatgtttcattcaaaaaaaaaaaaaagagtatatacttgttaatagcgaaaatattaagaggcacattaaggtgccaagcacgacaaatgtagtatacctttactggtgtatttcaatatcagttctcaaaaattttaatttaataaataatataagaaactgctaaccaattattatgtatcacagtggtatggtattgagcactattaggtgccacaaattaataatagtaaaaaaatcatttacaacaaaaaatagtacaaaaattattcataaaaaaattaaacatataaaagacaaaaaaattgataactaattatttggtaccacatcgatatagtattgaacaccttaaagtggcaatgacaagtacaaaaaatcattttgacctcataatttggccaactgattaaggctcaaatttgtatattttaagcctttatttatgcatatataattaatatgaattaagtattccatggttttaataataaatttat

SEQ ID NO: 118688 - DNA, 1781 bp, Cannabis sativa
  modified_base (89)..(98): a, c, t, g, unknown or other
  modified_base (307)..(307): a, c, t, g, unknown or other
tgataacatgaattaaaacatacaaatgaatgcaaaatacttctgtttctttattgataattaataaaatggattacattgaaatggannnnnnnnnngggcataaaacccaacacataactgctaagaaaacattagactttgttatcaaaacatcgtgtgtcaatacggcttacctcatataatagtctcagacaatggaaagcaatttgactgcgaggaattcacaaacttctacaaccaacacggggtcgttaaaagcttctccgcggttgcaaggccgcaaacaaatggacaggcagaagcngtcaacaaaatactaaaagtcaccctaaagaagaaactgctggcctgcaagaacaactggcctgaagaactgccaagagtattatgggcctaccagaccaccccaagaaccacaatcggacactcaccattctcaatggtatacgggtgtgaagctatggtcttggtggaaaccttgttcccatcccacagaagggcgacatatgatccgacaacgaatgaagccttattacaagaagtgctggatcaaatcgacgagcttcgagatgagtcttaggtacgaatggcagcttatcaaagaaaggtggctaaatacttcaacgccaaggtcaaagatagaaaattctccattggcgaactagtcctaagacgggtcttcccagccactcaagaacccagagtgggggtacttgggccaaattgggaagagctgtacaaatttgaggatgaaatcggctccgggacctataagctaaaatgaatagacgaaaccacagtgcctagggcttggaatgctgaccacctctgaaaatactatcaatagttaaaaacaatgtttatattctataagacagcctgtgccggacaaatgtatgcaacctctaatgtaatttttaaagactaagtgacctcaaaatttattttcatgtcacttaaggggtactaaggcatatcataagaaaagtaaaaggttaaatagattcaagacacaaattgttcaaggaataagaaaatccaaaaaagaaaaaggcctaaggacgggccataaaaattctcccattgaaagaaaaaagaattgttctataagaaaggagaaggataaaataaacaagaaaatcacttagtcagctcggggaggaagacggggacccctgcgctcttctaacaccgcattaagcctcttacttttctctcgaaaatgggctagaacctcttcaggtttgggataaaaggaagacgaaggttgtagtcgttagctgtccagcacatgaaaaccccatcatcaaaacgcttcttacaatgttgacaagtgaatggggccaccagggcatccctctttgctttagctgcttctttgcgagcctgctccttgaactcacggagctcctttacttcaacagtcaggccagctgctgtttccaaataagtctggtgcagctcttccaatgatttcagcttggcagttagttcttgaacttcttccctagaattccgaagatccctcttcgtcatagcaacgacctcatccctggcctttagtgcctctcggtggttctgctccataagagactcctttttttgggcttcctcacgaattgccttcttctgctcctctgactcccggggactcttcattgcctccttcataccaccaaattcggacatagtgtatccgtgatcaattaatgtaacaccctaactagcataggcgtattacgtgattttaaaacatactgtgcaactcgttgctaatc

SEQ ID NO: 118689 - DNA, 793 bp, Cannabis sativa
tcattcacaatatacatacacacaatacatattcaatacaacataatacatatttaataatatagaaaaaccctaaaaaaaattataatacatatatatatataaaagaatcctcagagcaccgttgtcagcatcggagatggttgctccttcgtcagccacagcttcggctacggggaagaaagaagacgagcagcgccatggcttcaactccgacttcagatcttggtctttggtgctctctctttcggttctctgtagcaccaccatcatctttctcgttctccatcaccatcattctctcttttaacttcagcttcagatctcgcctttagctctgacgaagtgagagagaaagaatggaggatgttcagtacatagagtaacgcgcgcggtgctagagaattggggccggagaaacgtggctgttcagtctgtcggggtcggaggaggacgcgataaaggacataacagtgatggaggacttttttttataacagtgatggatgaattgagagaagtgaaagagagattttggtgtggtgggcggctggtagatttgagatgaagagatatgttagggttttttgttttaaatggaaaggaaaattaattatttaataaataataaataaattataattaaatagtaatggaaatgaatatgtatatgtgtatggtgttaaatttcagattctttaaaaaaaaaaaaaattgtttccaattctaaaatttaaaaggaaatatgctctaaagtttttaaaattaaggaaagacagaaaagacaggaaag

SEQ ID NO: 118690 - DNA, 585 bp, Cannabis sativa
agagagagagagagagaggtatattaatgagaacacatgtggatgtagggttaagtgaagtagaccaaatatttaaagggctttattatgtgtataatacattgaatataaactatgaatgtgaatattaatagacacatatgtatatgtataatgtatccatctttctctttttgtcttcttggtcatttcgctttcttttttttgtctaattttgatcatagaaggtcatttttaatgaatgtcgaccaccttggcctttgcaaattaattaatatacgtaaaaaaaaaattaaaaaaattgggctttaaagggaagactacaaatataatattaatatataaagaaaagataaggaaggaaatagggtttggtttggtgtagtagtcttatctttttaaagaggtaagagacgacatatatctcgatcaatccatcgataagaatgatattttcagataattaatcgaaataataaaaccaaacaaaaatcaaaaaagagttccattgtccgctgctgattgtggtcctttaatttggactctcatatatataaatataaatatattgtaaagcccgcttag

SEQ ID NO: 118691 - DNA, 1065 bp, Cannabis sativa
gttaattaaatggactgagttcagctgcaattctaaatttaccccaaatttcccaaatttattttaattatttaatgtcattgtaattggaagagattatttttataatcttgtatgggtcgaacttaaattaataaactcttatgctataattttggcataggtgaaattgtgttttgcttaacaagatcattaatatcttgtttaagcctccccgattataccgagtacaacccattggccaatgaatagagccactaacaacaacagacaccaccttataccccaaagtagtaatcagattgatggtctcatcatcatgatgttgatagatagagaataagtcaggcatgataataattttccatgaatttttttttaaactataaactgaaactggttcacctcctggacagaagttaccaaacaaccaaattggctcaactccacacatagttatagccaccactttgaaatcattggtcaatggttcgtacccaaatccatacatataggaagtttgaaatcactttgaggaagtttgttatgcttttgtattgcaggattccaaaagtaaacattattataatactcttctaccaaacaaatcacaccattatcacaacctacaaacctcaactccttcgtgttatccttgtgatcatgaatattggggatatatcagatgaaatctcatgtaagtttttcgagctacaactgagaagaataatttacaccacaataggatacgaggtactggtttttgtggagctcattcatcaaacttggatcgcttattagagagaaacaacatctgttcacatacttgagcagtaacaaggatttcacatctaatcttgacactatattttcaattatttcggtgggtaatttcgaattagagaacaccattgctatatcaactctattttttcctggagaaaatattaattgaatatctctgtttctcttataaaataaatcacacttgactcaaatgtttaaatttttaaatcaaataaattttattatttaattctctagatttttttacgggatatatat

SEQ ID NO: 118692 - DNA, 1333 bp, Cannabis sativa
  modified_base (1285)..(1291): a, c, t, g, unknown or other
aagaacaatcaaataacattaattcatagaataatctcagtcaatatccatcaaatccctaaatagagagtttagctcataatcaaatctataattaaattaagcacaaataaaatacactattgcagcaggatacaacatgttttcccctactgctgatgggccgagatggtgcaatggtttggagtagattaaacactcccaaacacagtatgattttgtggttagcaatgttaaaccgattgaaaactaaggacagcttgctcaagtttggaatgcaagttaaagagagctgctgcctttgtgaagctcatgctgaaacaactcagcatttattttttgaatgtattactgctgtggactttttgcaggaaattaaaaactggctgaagtggaatgcggtatcatcgagccttcccatattgctttgatggattgacagagccaagctttcgaagtttcaaaaaatggtatatattgctacaattgctagtctggtgtataacatatggaaactgagaaatagtgtaatatgggagggggcttccctagcttctaacccaattgtggaagatactaactggagcattaaaatgagagttgcaatgtttacaccaaggaagaccaaggctgtagataaagagtggtttaatgagctataatgtaaaaattatagaaaagaatgatgtatagattgcttaggcccggattgggtgctaataggttgtaaatactgttttgagcaatataatgtcctgatttatcaaaaaaaaaaatacaagaaatcaagagaagagatgaaaccagatggagggttgtcacggatcgcccacactcgctccaagagctttcttcttgtgtttctagggttccattctgtctctccttctataattcgcgaacccctttcattaaatagcatttttcagcccaaaaatgagaaaagattaaattatccttgacctgtacgaagtcaccgccgcggccaccaatagtctcgctggggcagctatagaaaagtaaaaaaacggtgtttttggagtccatcgttgcggccattagacccgtttttttttttttgcttcgacctctctcaataaaatatgcataactttcacatacaaaccccaaatgagctgattcaaaatgcattcgaaagctgaaaaagagatctaaaacttttatgttttgactttttctctattttatagatcactgtttttcaaaattcgaccaatttatgtattccaagtatcgaaacctgaaaccaaaaaaaaaaaaaaannnnnnntaattctattccaaaaataataattaagaagaaaaataacta

SEQ ID NO: 118693 - DNA, 2336 bp, Cannabis sativa
agctaaggccaagattagcttgaccgtgaccaactttatgacagaggcaaaagtttcagagtagtcaataccttcttgttggttgtagcccttagcaaccaccctagccttgaatctttccacagacccatcaacattatatttgattttgtaaactcacttacacccaatagcatgttgatgagctggtagactaacaataatctaagtaccattcttctcaagagcttcaatctcaatgtccatggcactgtcccactcaggaataccagcagcttcatgataatattgaggctcataatgacttgagatggagcaaataaaagccttgaaggtgggagacaacttggagtaatcaagaacctgagataagcaatgaatagtactgttagaatcatgtcatgaattcacataagaagactgattagttaagaaacaatggtaatcttgaagataagagggctttctaatctgtctaatgggttgagaggaggaattggcaggtgcataagtcgatggggaataattttcaggatctggtgcaacattatcatctggtgcagcagtggagggaattgaattttggtggaggacaaggtcacaaacctttgtaataggtggattgggaggtggatcaggttcgagaacatcagtaataagttcctaagatggaccaggagcatcaaaaatactgggaacaatatgaaaaaattgttcataatgagcaggcagcccttcattagggacaaaagggaaaatgtattcttgaaattgaacatctctagagcaaaaaatagtgttggtttcaagattgagcaatcgataagctttcattcccatggaatatcttagaaaactacatgacacagctctaggagaaaacttagatcgattttggcttaatgtagaggcataggcaagacacccaaaaggtttgagatggttatatgctggtggtttatgatttagaatttcaaatggggacttgttgcctaaatttggtgttgcaattcgattaatgagataagtggctgtactaacacactcaccccaataaatcaagggaatataggattgaaataaaagggctctagagacatttaggaggtgttgatgttttctttccacaacagaattttgttgtggtctttgcacataagcatgataatgaacaatacccaacgatctaaacaaatcaacaaattgaagttccttagcattgttagacctaaaaccttttattgtagcattgtactgagtttgcaccagtttaataaaggcaggtatgacaaatttagcttcagatttgtgcttaagtaaatgaatccaagtgtatctagaacaatcatcaactatagtgagaaaatatttgaaaccatcatgtgtcatattatgatatgggccccatatatttatatgaataagctcaaagcatgttttagctatattatgattgaaaattaatagaagtttcttttgtttagcataataacatgttgagcaatgaaaattgggagaagtaggttgagaaaaattcaactctttttttttttggatgaataaggaaatcttgtattgctcaaactatcaattacatctcaagtttttgtacataatcgactatttactgctttaaatctaagatttttacaaattacaaattcatgacccaattcttgtccacctcctttgttttgcttggccatacccctacaattcttctcttactttcctgctgtactcgattcacaattttcctgatttgccattgttttttattccacaacacatcattacgtgcaccccagatctggtataccaaggcagccagcatagctaacatcatgcttctccttgttgctgaaatccctttaagcttgctgataagttgcagcagtttctacaactctgttgctttcgtaccccattgcagcctcttcttccattctgcaagacacttgctactatattcacactgaaaaaataagtgttgaactgattcattacccttcccacaaagcaaacaagttaagtccacctgtgtgtcatatttacatattctgtccttagtcttcaacctatcccacaagactagccataagataaacttgtgtttgggaatgacaagtctatcgcacacttgtttgtaccaatccttcttctctggcctgctaaacaacaattgataggtatttgatatgttgaatttctgcataataaaggtagcccgatccatcttagccttcacctgatttttaactcctaccaattttttccaaaaccagttgcagtcggtgggggcttcataatcccaccagcacctatctttcaagtat

SEQ ID NO: 118694 - DNA, 2386 bp, Cannabis sativa
catatttatgtgcaccttaatttcatctgagaaaattatcgtaagcggaccagaataatcatatggtttaggatttgtttacttaagtagattgccacataaagtacattgtcatagaatgaatatatcgtaatacatggaagataatactcgacatataataaggacctggctatgattcatatgtttattatgtaatgatgaatgctaggtttaagagataaatctaaatgctgaccaagtgggagaattttagaatattttctattttaaaaataaaatcaatgaattaatttaagataaatgaatattttatattctttgaatttggacacaattaattggttgatattcaatatatgaggagtgctaccgtcaacctcctgttacaacctcttagtcaacctctacggtcgaaagcatatgtcggaatattttttttcaaacttttttacggggatgttcgttatgcttacaacatcatccccgtaaatttttgaaattttttgaatagtatacagtgttgaaaatacgtttgaagtttttcgaacgcgtgtggtaaactggaatatcaggaactctattttcggtattgtaaactattcaaaaaatttcaaaaatttacagggatgatactgtaactataacgaatactgctgtgaaaaaaaaaaattgaaaaaaaatatttctacatgtgatttcagacgtagagtttgattaagaggtagtaataggcggttgtaattagcactcttctcaatatatatatatagtttgatttcctaatttaattctcaaaatattttaacaattaattatgacgaaaacgttgatagaaggtctcacctatataaatatagggtctcgatcttcgagctcactactcattctgtaaagtaaatccatctaaagagagtagagagagtttgaaagtccagttactcacactaatcagtctaaaacttgtgttagattgcagctcaaaaaaatcaatggttgaagatatttcgatcatttaattatatcgtgtatatatttatttgttctatattttcatatacaattatatatgtttcatattttcattcacgttttaaaaaatgacctattacaaaaataaataaataaaaaataataatattctgcgaacttttttttttccagagcatcgtatgcatattgttctggatatatttgatcataattgatttgtcccatacatatggatttgtataaatccaatggtatacattaatttacgtgaaacggtagacggacatatgatttcatataggccatcatatacataaaatatataaactaaagcttttcttattttagaaataagaataagactttatgtaagtggtgtaataaagtaacagaagtaattcaatgaattatttattagtagtactactagtaatgttttttatttattattatatttaatttttatttatgaattatattaattgtaataagccatatacagtattttgaataattcagtttatatatagttttgatttatattatatgcttttaacctactagccttgttttgttgtgtctttcttgtgtaccgcattttaaggtgggattccaccaaccatatatattatttgttggaatccaaatacgaaagcaccaacttcattttctttagctttgtccccccaaacaccaatgcctttttattataatttttattcttttttaacttagcgataagttcacaagtatatatgatgagtacataatatgacactcttctttataaatatcataaactctcaatgttgtacatgtattctatataaaatgtaattatttgtgtaacgatattttttaattttttaagttaactttaatagaatataatattacttaacataatattttttattaattttataatattattatatatatttaaaaataaaaataatgtaaatattttatataaagaaattttaatttaaaatatttaaaatatattgtaaatatttttaactacatttttaattttgtttgtttaactttaaattaagataaaggataattctgctcgatttggtacacaacggttcaccacgatatctcacttggattttattaatgtagccgctagctaaaaaaaatcttcaaggatcaaaatctcaaactccatttcaaaaatttttttaaaaaaaaaactacattacctaattaaaaaaaattaaacagacacatattacacctaacattacctaattaaatataattaaaaaaaactaattatacatatattacggtagcgtttggtaacatttttttaatcagttttcaatttttaaaattgaaaaagagaaaatatttgtcaaaaacatgttctgtaaaactg

SEQ ID NO: 118695 - DNA, 1659 bp, Cannabis sativa
tctggattacattgaaatagagttttattcagggcataaaacccaacaatgacatcaaagactattaccttcagaccctccagctaattcctaaagaggatcttcctctttttattggcataatctggcatatttggaccaccaagaagtctattttatttagaaactactctgagcctaacaatgtggaagaatttgtttgtaattatctgcaggaatatagggaggctcaacaactccactcctaagactcccctaattcagcatcacatcaacaacctcatccagatttcatccaggaagacacccctgctttatatgttgatgccgcttttgatcaagaccgttgtgttacaggtattggctgtgttctcaaggttggttcaagtcgaattattgcttctacaaacattcagaagcttggagctcccttgcccatttttaccgaagctcaagccctatttcacggtctctcttggtgcatctctttgcagctcagaccaaggttaatcttcacaaactgcctcaacttagtttcaaaggttaatggcaagtggcaggataactcggccctttcactctttgttgctcagattagacattccttctctgatttccctgatgcttccctttcgcacttaccacgtcagttcaacacaactgctcagtttttagcgagggaggcgattaggttgcgaggggatgccattgaagattcagtttagtctcctctgtttgctgctctatctcactgtgttcatcctctttgcaacttctttcattgtcaaaaaaaaaaagacacatcctacaaaattaaaaatttaaaataaaaaactcctacaaaccttagaccaattgaaaaataggattaaaggaaacaaaataaaaattagcaataagtacatgtttccaaaataaaaacaagaaagcacacaataattaaaaatatatatataaaaaatatctcatatcatatcatccacgaaaaaatatgctctctttttatttaatttttcaatttatgctctctttcttacaaaaacaataaaactgaaaagctaaaagagcaataaaaaatactaaaaacacatggaacactaatcgacactttaaagcataaaaattatctaaaaacacaatgaaaaaagagaagaaaaacaaaaattaaacacataaaataccaatcaacacttaagagcaaaaatgttatccaagaaaataatgaaacaaaacaaacacaagaaaacaagtatttttaagaaagctcatcaacaatcgatcacgtttttttttaatattataagcacaataaaaataaaccttgatatttttgccaaaaaaatgaacaccatgtccgctttgtctttgttcctaatgaaaaattttaactcataagaatttacataaattattctaccaagctaatgaactagtgtaataaaatcacataagttttgtaggaaaaggatttaagtcagccaccaagaatattttaagcaattcaaagagtatgtaatagctttacaaatactattttctaatttataattgggtgtctacacatctggtatcctgtgttttatctaaatacaagttaatttggtaccttgtatttttaataatgcttatttaataccctgtattttaaaattatactta

SEQ ID NO: 118696 - DNA, 2363 bp, Cannabis sativa
aaaagtaggcttaactaactaatacaaagttaaatataaccaagcaagtgaagtagtaaggtttaaagctcgccttgttgctaaaggctatagtaaaaaaccaggtgttgatttctcacaaaccgaggcactggttgcaaaattgaacactctaaaagtttttttggctttagccgccatcaataattgggtaatccatcaaattgatgtcaataatgcatttctccatggggatcttcataaggaagtttacatgaaaattccccctagttataatgctccacccaatacagtttgtaaattaaataaaagcatttatggcttaaaacaagcatctcgtcaatggtatgccaaactaagctcaacattgctagaggatgggtttactcagtccttgtcagacgtttatcaaaaaaacaaattctatcttcttagctatcctcatctatgttgatgatatgattatagccagcaacaacactgttgctatctcacaatttactcaaaaacttgatgccaagttcaagttaagagacttaggcaaacttcattttttccttggacttgaagttggtagaacttccaaaggtatttcggtttcacaaaggccctttactcttcaactcctcaaagatacagactatctaggagttaaactggcctccacacctatggaactcaatcttaaactgcgcaaagacaaaggcgaactcctccccgatccctcagtttatcaaagcttaataggcaaactactctatcttaccatcactcgaccggaaatcacatatgttgttagtcatctcagccaattcctttcatgtcctcgggttccccatatgcaggccacaaatagaatcctccaatacctcaaacaaacccctggtcaagggcttttttttttccttctgatacaacaccccatctgcaggcttacactaaaatcagcttatcacgcgacaaagtttccttctttgccgatgcagattggggcagctatcaagatactcgatgctccatttcgggctattacattttcctggggaaatctctcgtctcctggaaataaaaagaaacaacaagtagtttctcgctccttggctgaagttgaatatcatgcgatggctaatgctacttcagaattgacatggctccttgctctcctcaaagattttggcatctcccacaaacaacctgccaatttgtactgcgacaacaccgttgcaattcacatcagtgaaaacccagtatatcatgagcgtacgaagcatgttgaaatagattgccactttattcgagaaaaaattcagcatggctccattcaactcctccatgtcttttctcaacaaaattgacagacatttttaccaagcctctgttaccaactcccttctctaatattgtctccaagatgggtgtaataaaatttacactccatcttgaggggggttgttaggataggattagttagttattccaactgtcttggaatctttatttttctattatttacttcttgccaagttgcataaatctgttacattatgccattgtactatggcctatatataggtctcttatttcagctcaatatcaataagaaatcgttctttctcatttctctgttttagtcttaaacttctcataaaggaggaagaagaagaaaacaaaattgagaaagataaaatgtgattgtgtgtgtgagagagatatggagagcttgctttgtgatgagattcttgtataaatatttcagaaactttccactaactttaatgtttctttaagtttctttggtctcaaagtgttggctccatctctaccgtacttttgagtccaccttctttctctaccttagatttttctgttactggtttattttgttattgtttttatgttattttactgttatttctttccttatttttttatcacattttctgaaatattattgtactgctttatttttaatagtaataaaaaaataattaaatttgtatgtaagttattttcttcgaaatcctatgctccaatatatgttcaattttcctccatgttgttccaatgttgtgttttaattctgcttcttttcatttttgatgccttcttcgatatgttctcttgttgtgcactagctccccatattttgctgcatttattatgttgtttcttttcttaaccaacttccatcctttttttttttatcttctagattttactctttcaatcggaggtaagactattactgtccttcaattttttcattctggttacctcaaataaatattcaatggttagtttaacctgtataatttgaatctaacatttgttaaacatacgaaacaatagtggaataaccaaaa

SEQ ID NO: 118697 - DNA, 1042 bp, Cannabis sativa
tataggatatatatatatatcattttttatgaaagttattttcatccacaatgccaatctcttcatcacaattacaatatgttttctatacatctaaaattttatcaagttatatatctttttgtgggagatagaaaattagtaaccaataatcattttagagtaattaataatgtatataatatgtatataaatttatataatatagaacttaaattagtatcatttatttttactaatctattgtaattattattttatggtggtaggttatttataaatttcaaaaatgtttataatgttgtaaactattgtaaccaaggactttagagttctaaaaatatgtttataatattctaaattagaggatgttaaatataatgagaatttttacacttgaaacaacaaacacgaaggcaaaaatcaagtttatgctatgttggataggacattggtgaatcttgcttgtcttgataaatattcaagtggtaaggtcacattctttactgaaggtaaagttaatcatagcccttatctactcactgtatatctagacatgagaggggaaaaattattttgatctttaatttttggagtaatcatccttgtttcttaacataggtggaaaaagtgtggctaaaatctataacaggctctcgtatgtttgtggttgtacaaaaactcaagagagttaaatctatgctcaaggtttttaacaagacagagataggtgagattgcttctggggttgttcaaaagcagcaaaggttgatgcttattcaggaagtctttcaagcatttaatggaagcttgattgatcaagagaggaatgttaaggaaattgattaatcattactctgttttattatctctgtcattagttgttaatcactgttttattaatgttttagtgttgtacggattctgttatgtttgtcccctttggctcctacactagggccacctgtccctttgtaatttgttcttgtatttcctttccagaatataaatagaaaagtttgtacctcagcctccttgagct

SEQ ID NO: 118698 - DNA, 1268 bp, Cannabis sativa
tctctctctctctctctcatggagctttccacattagtgcaggagcaacacgactattatgttcttctccgacgacaaaggccaagtaacactaccacaaatatattttttaggagcgacaaaagatgcccctaaaacagtgataaatcgcccctaatgacttttagatgcaacaagttgcccctaaaaagttgtctttaataattcgcgcctaaaagtactattaggggcgataaaaaagtaacttgaaatcaggagcgacaatgtctccgctaaaagtaatatatgaatttttatgtttacttttaggagcgacaatatcgcccctaatatccataaagtcgcccctaaaaattcatctcagaatagttgttattgacttctagaggtgacaatgttgcccttaaagatttttaaattaaaaaataataattttttttatattatttgtgtttgaacttgttttatcaggatttagatttactaacatcttaaacgtgatttcctaaaataatgaaataaacgcatataatgttctagaaaactttacattggtggcaccaaaatattatggctccttctattcatatcaccaacccttgttcttttctattatagagtatttccaagatctaaacatggatctcctttagtgatgaaattcttcacaagcttccacacaatgattgagtattgacttgatatgagtggacatgtactctatcactatggggcacgatttcaagagggaagaagagaagaagaattcaaatttctaaaaaggctctttgtttttcagttatctaacagaatagtatgatgttataataatgagagtcatcttattctttatatatgatttcatctacgattaggatttaaattatatagaattaaaaaagataaaataatttcttagaatccccttaagtggccagcctcatatgtggatcgcacaagttttaatttttccattttatttaacaacttatcttctcttttacaaatgtcatgttttaatttcaatcctataaatgtaaaatctatctatttaataattacaattaattataaaaatacttcatttgacttatttattaattacaccttacactgtctcttcattaacaaataaactctaaatcttgattttttctcaattgagcccatgcttagtgaaaatttataaataagacatagtctaatttagaattctaattgattaattaaaaccaattaattgtgtctacaagccaatattatctcaa

SEQ ID NO: 118699 - DNA, 1272 bp, Cannabis sativa
  modified_base (1225)..(1229): a, c, t, g, unknown or other
ttaataagtaaatctgaatatattgaaatgagttttattaagggcataaaacccaacaggcatatacattgcttgacattcaaagtaatcaaatattccattccagggatgtcactttctatgaaagcatttttccccttcaaaataagcttcccaacactaatattaacctgttttccgcaacaagcactaatatcagccatgattcccaacatatcacactagtagcaacaaatcccaaagaataaatacctattactgttattcccaccataattccaaaacctctaaacaccaaatctggttgacctataactaaaccaacacttggacaactatatatgtgacacgataatgacttccacgactcaccctattgcaaaccacttatcatatcacaaaatttcccctatatttcgagatgccatactcaatgcttgtcattttaaagaacctacatacttcaaacaagcttgcaaagaccccaaatggcttaaagccatgaacacagaaactgatgccttagaggcaaataaaacttggattgtcatcccactaccccctgatcaacacaccattggttgtaaatgggtatataggatcaaatataacctcgatgggttaattatagaaagaatgaaagtacgattagttgctaaaggttacaataaaaaacatggcatagattactttgacacatatgctctagtaacaaaatttaatatactaaaattgcttctatgacttgctgcgattaaaaattggcacttacatcacatggacattgataataccttcctccatggtgatttaaaagatgatatttacatgaaactctgtccaggatacactccaaaaggagtgattcccccaaatgcagtatgcaaattacaaaaaagtctctatggtttaatacaggcatctcgaaaatggtatgaaaaactaagcacaactcttctccaacaaggatttcaccattctaagtctgaccattctttattcatacatcacaaatcaagtatattcatagcactactcatatatgtcgatgatatgattattgcaactaaaaacttgcacgagttaacacaattcaaagattctcttgatgctcaattcaagctcaaggatcttggtgaaattacttttttttttctaggccttgaaattggccgctgtgacaaagggatatcagtatgccacaaatgttgggttttatgccctnnnnnaaactctttacaatctgattagatatcaatataagaaatttga

SEQ ID NO: 118700 - DNA, 1668 bp, Cannabis sativa
atggtttgatatttttaaaattaatttatagttaaatttatttagtaaccattcatgggtaatgcccattaaaaagtgtttcatatatatattagagaaacagagatatttattaataggaaattcggacaaagtccatttcaaaaagataaacctcaaagaataaatttgagtatagaaaaaataaagaatacagtagatgaatgaattagctcagctcagtgacaatgatgctaactgctttgtatttatattaatgttgagaattacaaagaatcatttagaaaagtgtacaaattatacacacattattacaagccaaaatgaatatgctatcagaaaaatgaaagtttgttagcctagggatccacacaaaatctgttatgccacctcagcagtattagaagtagtagaagaattttatttcttgacagcccttctcaaacttggtggtgtttcaggctacaccaaatttgtccactaagaaattgtaattggtgagactcttagttaggcaatcgataacttgatcactggatggtacatatctaatttccaaggacttgttaagaaccttgtctcgaacgaaatgaacatttagctctatgtgctttgtgcgtgtataatacactggatttacagccaatgcacttgctaccatgttatcacaatatgtcactggtgtgtattgcaatggaaattcaaactctttgagtaaggcttgattccaagcaatctttggtgaaacttgagtgagtgcccaatactctgactccgtactagatcttgacaccacggtttgtttcttggatgatcatgacaccagagtatccctaagatacacacaacaagtagatacacttcttcgatcatcaagagagcgtgcccaattgccatccggatactctttaattgcaaatctgtttgagttttttaaatgtaatccatggtacacagtacccttttaagtatctaaatactctctttacgacactctaataagtcgtggtaagagcttgtaggaattgactgcaaaggaaagatgaggtttggtatgtgtgagatacttaaggcctccactaatgcttttgtaatcagtaagattttgaagagggtgtctttctatttttggcaatgatttgccaacttctactagagtggagcatggtttcaaatgcatcattccagtcctgagcaagagttccttgacatgcttatctcgattgagataaagatcagttcatctctgtgtacttcaatgccaaagaaataatgcaagggacttaaatctttcaaagcaagggacttagaaaggcattgttgatgtcaagttgtctaatctcccatgacttagcaacaacaatagttaagatgatttagataatagggctataagtttccccaaaatcgattcctgatcttgattaaagctctttgcaactaatatgattttatacctctgaaatgtaccattcctcttgatcttgaacaccatttattaccaatgaaattcatccctaatttttgacaccaaaatctaagtttcattgttcttcagtgctatcattccagttggcatagacctattctaaccactggtttgttgggttttatgccctaaataaaaattcatttcaatgtaatccattttattcaacatcaataaag

SEQ ID NO: 118701 - DNA, 2026 bp, Cannabis sativa
gtacgatctttggagcatcagggctatttaatgtatagtcgcttggcgacaaaacttttgaatatgaatagcaaacttttgtaaatgtattttgtaaacgggatcccaaattttttataaatgtaatactttaagtttataattaaataagaaaattttaattaatcatatttttcattaatctcgttgattagcaacgagctgcacagtacgtttaaagtcatgctaacacgcctaatttagttagggtgttacatatttcctcgtgataatgagggaattcatggaattcaggacaagttgtcttcccccgagacaccctcaacgtccatcctgagcggatagagataatgtacacacgtacttaagtagatgacatgtgtctaatctcttctagagaagaaggccagtgcgagatgaggtaagctcaagctcgggacagtcaaggtctcgagggcatagtcgattgagtagacaaacgtgagaaggaattagatcttgacattattatgctgaccgagaaagcataagtagctcacaaagttatcaatccgagagttactcggagacaagatctataagtaactatgaacgaaggtagcctgaccttcgcgagcacctaaatcgaacaacctgaccttcgcgagcgtctaaaccgaaatgcacctaatttgcgcaatcaactcaatcaaaatacaaatcaacaacaagtggatcccatccagctatgaatagttgagctggaggataaatttagaaaatatcaagatggagaacatgaaaaattgctaggatacgactcagacgaagaaaccgagtcattccatccagatatcttaaatttagaatttcctcagggatttaagaatccaaatgtctcgcagtgcgatgggaccacaaatgcggttgctcatttaaacaactttaacactattatacgagccaacaatatatcaaataacttgtgttgcattttattttcaacttccttaacaggggcatcgagcagttggtttgataaattcacccatcattctataaaatcctgggaacagctgtcgagggactttaaaaagtaatttgaagctgcaagagaccgtcgagcttccattgactatgggagagccacccttatcaagaattcttggttgttgataccccatctgtgtataatatattgatgggtcgtccaactctaattggacgagggcagtaagttcaattaaacacttgtccctaaagcttccaacacagtcaggagtgggagtagtagaggcgaccagttatttgctcgagaatgttattgtacagaacttcaaaataggagggacagtcatcaattaatggtaatcctaattgaggaaaacgaaagggaagcagaagatttggatccaagaatccaagatgaatgccaccaactcaaaccaattgaagagttggaagaagttattttcgatccaagtaatcccataaaatgtgtttacattgggaaaaatttggaggaagaactaaaatagcaattaaatgtttttcttaaggcaaaccaggatcagttcgcctggagtcactcagatatggtaggaataaatctgaaggtaattttccatcatctgaacatcgaccccaactatccagcaaaatgacaaaagagatgaccattatattcggagagacaaggtgcactcaaataagaggttgacaagttgttaactaatgactttattggggaggccttttatctctcgtggatctcaaatctatttattgtcctaaaaccaaacgacacttggagaacttgtatagatttttcagatttgaacaaggcatgtccccaagattattttccactacctaggatcgaccagttagtggatgcaacaacatgacacgagttgataacttttatggatgcatactctggatataactagattaaaatgcatgtccctgatcaagagcatacaagctttgtaaaaaatatgggactttactcctacacttgttagtgttctcttaaaatgtcagt

SEQ ID NO: 118702 - DNA, 2050 bp, Cannabis sativa
gactaaaataccaaaaccatttttaaccaataccatcaaaatctcaaaaggccaagaatttgaagaaataactttttgcttgtaataaggtaaaatacacccatctttattgggttttgattgatccctatttatttggacattcagaaagaaatttagtttattttttttgtcatgatgcataaattgtgtgtatttagaatcaacagtaaatttttaattttttttttgaataatttgcattgctaaaataaagttcaattacttactgcacataacaaaatacttaaaccttaaacatttaaaaatttacaaataatgttaaataactataacgtatacgatcataaaaacaaaattaaactaaaaaattctgctaaataccaaaatagataaaaagtctaccaaaaacatctctttaaggaggtaaactaaagacttacccaaaaacaagaagcattttttttataagctttggagtttcattgttcctcaaagttcacaactttatgatgataatttacaatcccacattccctctactactattatcaatcatcaaacacataacacatattgaaagatcaaaaaccattcgttcaataccatcaaaatctcaaaagggcatgaaatttttctatacacatgataagtaaaaaagacaagctttttatataaccctttgtagtttcatattcaacaaaagtaaaaaaaaaaggtttggcactatgtacacaaaagcattcaattcaatttgaagaaaccttggtaaatgaacaacaaaacaaaaaagacagacttaccaaaaccattttttacccaacaccatcaaagaagcattttttataagctttgtagtttcaattattcctcatagttcacacctttatgatcatcacacacataacttaacacagattgaaagaccaaaaaccattcattcaaaataccataaaaatctcaaaaggacatgaatgtgagttaagaaacatgattgtaaaatgatcccaaaaaaaaaaaacaagctttatatataacctttgaagtttcatattcaacaagtaaaaaaggtttggcactatgtacacaaaagcattcatttcaatttgaagcaaacttagtaaaatgaacaacaaaacaacaagagaacctgaaaaaagatgtaaacttttcaactcaattctcatttgcttgaaatccatttccatttccactcccaccaccaccattactacctccatttccatttgatgatgatgaagaagaagaagaagaaaacaaattgaaaggccatgacaatgagaaccttcttccactactacttccatttcttccatctccatcattatgttcttcttcttctcctccttcttcttcttcttctccaacaacaaccacagaattatcattaccaccattcttagattcatcagaagcaatctgaaacctacaaacaggacaagagctatgaagctcaagccatggcaaaatacaatctttatgaaatttatgcttacaaggcatctctttagcttcacaaccaatctcaaaatcatctaaacagacagaacactgcaacaaactcaaactctccttaattttcacagtgggaagagcttccacagcttcctttttcgccggtggcgtcccgtaccgatttggatcattctcagccaaatgctgtagcaacatatccaatcctggtcctataaagtaatcacccaatgacccaattggattttgattattatcattaccattttgactttgaacaacaagtgtttgattaaatgggttaatcaaaataactcgttctctttcatctctttctgttaaagactcagaattttgtgattctgaagctaacccagctcgaattccttgaagcaattgaagaatattagctgagcttcttcttcttctccttataaacgattccaattcccgatccaactcagtatctccatctccaccttcatggtgagggtttgaatttaaacccatttcatcatcatcttcctcttcatcttcttcgttatcgaaatccata

SEQ ID NO: 118703 - DNA, 571 bp, Cannabis sativa
tatttataactggcccaaattgggacttaatttttttataacaaattagaggttattcttgaatagaatattcttaaatagaggttctactgtatttttataaaatcaataaactaaaaatcaattaatgattaaaaaaattatgtaaaactaaatttttaaaaaataaattaattacatgtggcgttggtgtggcactgacgtgtcaattatctaaacagacatgtcatcattttgtttgcttcgtgtgacaaaacttgacagaatgacctatttataacactcgatagtttggaaatcatttctaacgggctgagaaatttaggggtagcaaaaatccctacatagcctaaaaaaatagcttaattttagaaaagagaccaaataaatatctaaaggaatgacgctatttttttttttttggcatacagagatagcaatatacttgaaaatacaatataaacaccaacatcatattttgggtgcactcttaatggatattacccatgaatgggtaaaattagaaaaaattaagtttttatgcttcatttttctatctaattagaaaaat

SEQ ID NO: 118704 - DNA, 737 bp, Cannabis sativa
  modified_base (263)..(277): a, c, t, g, unknown or other
tatttttgaaaaaaattccgtgtaacagtatttttgtaaaaattaacctaaatttcagtatttttgtaagtttcctaattttttatttatgtatgtacgatagaaaaaaaaaaattgaatctttacaaaaatgagagtcttacacaataactcaaactacctaatattcagagggaaatttatatggtatattaacttttgttatttttttacaaaaatactgccagacagtattttttatttttttactgtgtttttttatnnnnnnnnnnnnnnngtatactgtgttaagttttcacttgtgttctactagtgatttttagttgttctactgctgttttgagttgttctgttttgtgttctactggtattttataaaaacacagtatttttgaaaactttttcgtgtgactatttttgtaaaaattaactcaaattccagtattttttataaattttcatatttaaaccgactctgtccaaaaccttttgagtcaagaggccttccggtctcttttctgtcaagaatttcttttctttttaacattagtctacaatacccaacaaaaaaattgttaatttaattttatccccataatgatattaatattttggggacttttatttgcaccccattaaattataaatgcatcccattattaagaaaatataaacttaaataatttttaaaaattactcttgatatttttttaaaatttttttctcacattatttta

SEQ ID NO: 118705 - DNA, 3703 bp, Cannabis sativa
  modified_base (396)..(397): a, c, t, g, unknown or other
tccccccctcaccactaagctagccttagtggcttgacatggggctgaactactataaatctctggtgtctattttatttactgtagttttatttagccaaattaattcatcgcaatccttttattttttacgattttcttagatcagttgataaaaaatcgcgtcaacataaatcatgaagttgatgaagaaagcaatgtcaccactttgttgagatttctcccaatcgcatgccaagaagttaaggatatcatcaagtatggcagagatgtgattgcattggaagatgttcttgccacacttaagtcaaaggattttgaattgccattggaaaatgaatccaagaaaggagaagtgtaattggaaagagggagatcacccaagaaagtaagttnnatgagtaaacaccatcactctcaataaagatcgaattccaaagtgaaagaaaatcaaaagtgttaggattcagttgcagtcgtgaaagatagtgacaactgctcaatggatggagaattgttctccatcttaaaatcttcaatgaacatggagtggattcttaactccagatgcaagtatcacatgtgtctgaatggagaatcattttttaattataaattaattgactgaggtaaagttctaatggaaaatgatcattcatgtagggtcattaaaactgaaaaggttgccatcaaacaatatgatagtggaatcaaggtgttgacaaacttaagacacattctggagttaagatgaaacctcatgtccctgggtgcacttgaagatgagtgttacagatacaagtccatgcacaaaagcttgaggatcatcaaaggtttgctgatagtgatgaaaggtgaaaagatcaatgctttgtatgttctccaaggagaaactattccagtaggagaggcaggtttggtgaaagaaataaaatcagatatgcagctgtggcatcatagagttgggcatatcaatgaacaaggtctcaaagaattacacaaataaggtatacttgaaaatttaaatccttgtgccctaccattatgtgaagcttgtgttttagagaaataacataagctgaagttcactccaccaagacatacaactaaaaagatactcgaatatgtgcatgctgatctttgggggtcatacaaagtgcctactcactctggtagacaatattttatttctatcattgatgattatagtaggtgtgtttgtacctatttgctagcaaataagaatgagtgcatggaacaatttagaatttagaaaactcaagtggaaaaccaaattgatgtaaaagttaagaaccttaggacagacaatgggttagagttgttaactctaaacttgacatgttgtgtcaagagtatgggatcactaggcatagaactgttgtaaagaccccaaagcaaaatggtgttgctaaaaggatgaaccgaactctattgaacaaagttagatgtctgttgttcaattctagattagagaaaccattttggggggaagctctggctactgcaacctaccttatgaatagaagttcgaacaaagttattggattaaaaaccccttatgaaataaggtataacaggaccccaaacctaatgcatcttagaacctttaggtgtacaacttatgtacactaatctattgataagttagaacctagatcaattaaggaaactttcctaggatatgccttaggtaccaaggggtatagaatatgcatttctaagaaggatagaacaaatgttttgattgctagaaatattattttcaatgagttagaacatcctcacttgacatccagaaaaggtagtgtgtctttgtgtgatgcattaaaaatagaaaacaagaatactacacgcatggaatggattacaaaacaaaatatccgaaagagagttcacagctagaagctactatggaaccaaaaaataatgcacaagcagaagctgatggagacccagaagataacgaaggccaaacagaggttctagagggatccggacaggtgggtgtggaaggttattagttggcatgtgatagaactagaagggagattcaccctctgaaaaggtttcctaaggcagacctaattgcatttgcacaggcggtagtataaaaaactgaaattgaagagcctgaaagctatgaagaggcaatatcaggtggaaacaagtcaaaatgactccaggccatggataaagagatggattcactccagaagaacaagacttaggtagttgtaccgaagccgaagaacaaaaagatcgtgaatgcaattggattttaaatgtgaaagagggaatcaatgagaatgaaccagttcatttcaaagctaggttagtgggtaagggttttacctaggtagaaggaatatactgcactaaatttttttgacctgtggtaaagtacaagatgacaagattgatgttgtatttgacaactcaaatggagtttgaagttgaacaacatgatgttgagactggttttctaaatagattcttggatgaagagatctacatgaagtaaccacttgggtttcaggtggaagggaaatgagctgtgttagtttgcaagcttaacatgtccttatatggtttaaaacagtccctaagacaatggaataaaaattggatacttatatgcagtaaattaggttcaaacgatccacatatgatcactgtttgtatttcgagaatctcaagcaatctacaatcgtatttttattgctctatgtggacgatatgttcatcatgagcaaagaaaaatttgtgatcaaaagtatcaaagtcaagcttaagagagaatttgagaagaaggagtttggaccagttcaaaagatacttggtattgaagtttcaaggaacatgaaggaagagacaatcaacttaaagcagtctgagtacatcaagaaagttattcagaagtttaacatggaagatgaaagagtacatccgttctgttaggcagacaatttattttgtcaaaagaacagtgtctgaatagtgcaaaagagaaagaggaatgaaggatgtaccctatgcagtggttttgggatgtttaatgtatgtgatggtgagcaccatactagacataactcatgctctaagcctcttaagcgggttcatgtccaatccgggtattgaacattggaaggccctcaaatggttattaaggtacttaaatgacacttgggattatggtttgacctatgagaaagcacaaggagaactgaaggtgaaagggtttttggatactgattatgcttcaaatagagatacgagaaaatcaacaacttcttacattttcatgacaaatcggaactgtatatgctggaaggcccaattagagtctgtggttgcactttctaccacggaagctgaatttatggctactatagaagcattcaaggaagcgttatggttttggggcattatgtttaaattgaaacaaataaaaggtggggtgactatgtacttggatagccagccatccatacatctttgcaagaatctgatttatcatgagagcaaacatatagatataagactctctattagggagaagaaagaggagggactagttgaattagagaaggtcagaacagaagataatcttgcagatggtgggactaaggtcttacagtaaacaagttcaagcattgcctggacttgatcaatctcaaaagtt

SEQ ID NO: 118706 - DNA, 1333 bp, Cannabis sativa
  modified_base (1305)..(1307): a, c, t, g, unknown or other
gcgtgtgtgttggaggtcctgggttcgagtcccaagttatgcatgatgtaatatataaacgcttaaatcaaaaaaaaaaaataattaaacagtttctttatacttttataagaaatatattaatttttttttttttaaaaaaagatatatgattaaatattctattatctttttcactatactatatatatatatatatatatatttatacgatcatacctattgaactcccatcattccacatgctataaacttatattcatatacagacttatattcttataggcttcttctagtattttaaaagtatattccccaacctacctataatataatcttggtttaataataataataatcatgtctaaggctacaatactcaactcttttattcttttgaggttagtttctttttttcttttgcaagttcgtaattacatgacaattttataaataatatttatagattaaataaaaaatattacttaattttacatataagttttttttttttggtaatgtaggcgatgttattcggttgcagtagggaatgttgtgagaggggagatagcaacaatgagaaagggtgagatgaggatggagagtagtagttgtagtgttgggaatgagactaataataagaaggaattcttttggatgagagacccaaaaacaggatattggattccagagaatcatattggtgaaattgatgtagctgacctaagaaacaaccttctttccaagaagaattaattgtcatcaaactttacaaatatatatttactaccatttttttcccattagtattagattaactattattatgggctggccaggcccaactagaagtaccttaatagtaaatgtattatgtagtatgagcattcctatatttcgaatgagtaatattctaaaaagttattgcatattaaacatattaagtgatccgatatttaattttactagtagggatatttataaataagagggtgtttggtgtcttttagcaagtattatatagatatatatcatttattctattttatttgcaatttttattagatagtttgttaataggaaattttacatagatacgaaatttgtaatttatttatttgcattgtaattatttatttattattgttccaatattcatttttatatatataataataattggttactagtatccaattaaatattttatacattaaattaatgtgttagtaattcgttggttaccactatcaattaatttttgacttagtgatatgatggtaatatctttatatattaaaagtnnntatctaacggcatttcttggtttaac

SEQ ID NO: 118707 - DNA, 2487 bp, Cannabis sativa
ttttaattttataactctccatatataaattgaatgttatacttatataaataagtcatatatttatatataaaaaaataaaaataaatgcgatgatgtgtatgactataaaaatgattttattttttgatggatctattattgatgatgatataaaataatttttcaatatacatattttatgaatgtgcacaaaccatatttttttagactaaattataaaatgattctttaagaacgtgaatagaaaactatttatatatgtattaattaaaaaatataaatataaataattataagtacaaattactggtatatattttcagttatattttaatttgttactttttttagttgtgccgtagtttgatttttagtaatgatattctttaaaaattaattaatataaaggttgctatcatggttgttgtaagagttgtttaagatgtagttgatgtgtgaaattaagttattataaaggttgctaagacggttgttgtatgagattgagttgttggaagtgttactaattaattaacacggttgttgtatgagatagtgttgtcgcattagttaccttaagggttgttgacatagttgttttttgagattaaattgagttgctataaatgttgttgtattagattggcttgctaataaagttgttgccttgtaagttattgtgttgttgttagcgttgttaacaatggttcttctgttatattggattgttgttgttaatatagttattgtataggattgaattgatataagggttgctaatatagttgttgtatgagattcaattgataacatgtttgatgtataagtgttgctagcttggtgtttatatgatattgggtttagggtttagggctaattgttttaagggatgctaacaagattaatgtggctattgtatgagattaggttgctaagaatgttgttgtaaaggttactaacatagttattatcttgtatgatattaggttgttgtaagtactgttgctaacaataaaaatgtcattctttttcttcttttttttccatcattaataaaaggtgtgcttaaatttaattaaagtatatgtgctttaatagtattcacaaatttttcattttttttatatattttcaataaatatttataatttataattttttctttattaggttaatttataccttgtatgttaaaacacaatttaaaataaaaccaaatataacatactcattatttgggtaaaatttagctcaaaatatacccacccattagtaaagatggaataatataacaatttcaaaaatccgtacactaactcattgaggttcccaatatgaaaatgataaagaagctcataaacaaagtgatcatcttcatcattgattaaagagatcacaagactgttagaaatttatctatttagggtcacaattgtatatataaaaatatgtgttgagtcatcatataaataagttaaatttatgtggtctattttagaataaagtttaagacttaaaaacatgattgtcatgattttagtatgtcgataccattgagataatttctgatttgatgaggggtcaaattagaaatagtaaataaataattaattactatttttacaattattaataaataggtattggtccccattttgcatcatatcgtatcttttcactcttgtatccccatcaccaagagactacggtttcagagaaagttttgatacaaaattggaagatcatacgattcaaaaaaattagttctatggactctggtacactttcgctaatttttaatttattgtttcattctcatgaactaattagggataaattcaaatttacagtattccaacatatgatatcagagaattcctaaattaattattgaggatttatgatagtgttgttaaatttttttattaaattacttgaattttgatatatgcatatgtatagaaaattataaagtatttcttttagtcgattacagttttttttaatgtgctgcaactacacaaagaaagagaagaaacaagaacacaggttgcagcaacacaaagaaagagagaaaaaattaatctctccagatgaagtcctcatcacaccgaagtacttccctagcattttggtgagctcctttgttatcatcaatcctgtgtatgtgctggaggagggaggcattagggaaataggatagggactgacggatcaactccacaaggctagaaaagcagagttatctttccatttgcttttgactttggttagagctgataacaatcagatacaacgagactcggctgaagactggttgtcttgcaccaagttaaaccttcaaggagggcttgagcttcagcatattggcgttgatgctcctagtttgggtatagagaatcctgtaatcacttggctatgaccatttttaacagctgctctgttgggaattattttactaggatctagatttactaccatgta

SEQ ID NO: 118708 - DNA, 1323 bp, Cannabis sativa
agtgattatttttcacatctttttgcacctactgctgttgactttgctgagatcttgcattgtacacctgccacggttactattgctcagaatgaaatgttagttgaaccggttttggatgatgaagttcgtcgcgccctctttcaaatgcatcctgataaatccccgggacctgatgggatgacccctgggttctatcaaaaatgctggagtactgttggtggtgatgttattaagttagtgaaagatttctttattgaaggctctttccctaacgaggtaaatcatactaatattgtacttatccctaagaagaagcaacctgaggtgatgactgatgttcggccaatatctttgtgtaatgtcctgtataaaagaatttctaaggtgttggcgaatagattaaaagggattctgcctttggtaatttctgatacgcagagcgcgtttctccctgggcggttgatttcagataatatcatggtttcatttgagataatgcattatctgaagcgaaaaagaagagggaaagaaggttacatggcccttaaactggatatgagcaaggcttatgattgtgttgagtggaaatttattgaaaacttgttgcttcatatgggcttctgtagtcggtttgtggctcttgtcatgagatgtgtctctactgtgtcatatcatgtgattcatggcggacattctattggacctatcacacttggtaggggtttgcgtcagggagatccattgtcaccttatttgtttttgatttgtgctgaaggtctgacggctctcttgaaaaattatgagaggcttcaacttatcactggttgtagagtggttcgtggggctcctgcggtttctcatatgctgtttgctgatgacagctatgtttattgtaaggctaatactcgagaagctcaacatgtgattcgtcttctcaatgcttatgagctcgcttctggtcaaaaaatcaattttgagaagtcttcagtgtttttcagtaggaatacggcggtggatgtcaaggataggctttgtagtctgatgagattgaatgaggctagtgcagatagtttttatcttggccttccttgtatcatgggaagaaacaagaatgctattcttggttttttgaaggaaaagatgaaaaagaagattttcagttgggaaaacaaatttctctccaaagcgggaaaagaggtgttgattaaatatgtggctcaggctcttccaagctatgctatgagtgtgtttctcttaaccaaagaaatttgctctagtctagaaggtttaatggctaaattttggtggaatactcaagct

SEQ ID NO: 118709 - DNA, 760 bp, Cannabis sativa
  modified_base (664)..(673): a, c, t, g, unknown or other
ttccctgaggtggttgatcatctcttagctcattttaagggctacatgggaaatactagcaggcattcaaacagaatcagcagtgacatcatagcacaaggagctatgcttaatcttgatcaataacctatcttgctaaagcctttctcgagtaaggagatcagaaaggctatttatggcattcctaactcaaaatctccatgccctgatggttatggagctagtttcttcaaacagatgtggcctacactatgacaagatttcactaaggcatttgaagaattctttagcacatgttacatgcctaaagagtttcatgataccatgatatccctagtccaaaaaatagagaatccttcaaaggcagtggactacagacctattgcctactgcaccactgtgtataagtgcatctccaagcttctctattctcggcttgctcaggtgcttcctgatttagttcatcaaaatcaaggagttttcattaaagggagatcaattgctcacaatgttatgattcttaaagatcttttgaaatattatagtaggaaaaatgtttcctctagatgcacaatcaaagtagacataagcaaggcctatgacacagtgaactgggaatttcttgaagctctcgacactgcttactgttggaattattttaccnnnnnnnnnnatttactaacaagtatgttatttaacaacctaaatatgaacttctaaaatgatgtgaaataagcacatataaagtataagaaacctt

SEQ ID NO: 118710 - DNA, 883 bp, Cannabis sativa
aaaatttataattatacattaaagtacaataataaaaattgatgtaaaaatagtaaaaaattactttttataccaaatatagtttaagttttgtttccttgattcgtctgactaaaaagtaatgtcaataattgaaattttaggaaaataaaaagaatccaacaaaatcattatttttttaaaaaataattaacaataaaataaaataaattattattattttatcataatccattctttgcaaaaccacaagactttttgaattttgaattctataaaatgaattgcatatgtattgtgctcttaaaaagagaagggttatactaggaagaaagtattttgccaatgtgggatttgagtatacatacatattaatgtatgttgggtcatttgacactcatatttatgccacatttctaagaagtttgaacaagcaaatttaaggttgagatgagatgtataatcataactaaatctttttaagctcatcacatacatgcacatttctttccgataaacttaccatatattattactttctttgattagtatgtttttgagtgattttttatttattcttttttaaaaaagaaaaaatatgggtgatttgtcttagactcactataatttaataataagcctcacttgtgagtgatggaagaaaattgtagtaacagaaaatttcattgaaaaaaagatagggaacaaaacaaaacttatttttttcaatttttttagagtaatttacggttaaattctctcaactgttatttcatttgcatttaatcttttaatctcaaattttggtggtaaaatccttcaaactactaaaacattaataaatttagggtaaataccattttagaccctctgttttacaaaa

SEQ ID NO: 118711 - DNA, 968 bp, Cannabis sativa
  modified_base (73)..(87): a, c, t, g, unknown or other
  modified_base (187)..(188): a, c, t, g, unknown or other
ttcttaattttttttagtaatatactgagctggtgtattttatttgttttataataaaaaacacaagaaaaannnnnnnnnnnnnnntagacacatacacataaatttaaatatataactaacttatttatttattaatgaatacacatatatatattttagtgtaaatctaaagatgagtacatanntattgacatatatgtatattggtttgatcacagccggccctaatgtgcaggctgttccattgcacagggcccaaagatagaaaggacccaattttttttcaaaaaaatcagattcataaatttaggttatagttatttcagttacaaatattaacgtacgtcttacattaagatattaaattaaataacaccgaatataaaatgaacgaagctattaaaaatgtggttaaataatataaattaatttagctttgacaattagttgatcataaaaaaactaatatgtatagctaatattcgttaattgccaaattggatagttagtggtgagaatgtgatcaactttttttttagaaagaaagtattatttcgctgaaggctctcaaattgtttgggccggccttgttagtttcatactgtgtactgtatttttttttcaaaaatattgtgtaaattttatactgtgttaagttttcacggttattttacggttgttttttagttgtttcattgttgttttaattgttctgttttgttgttttacagttgttttataaaaaaacaatatttttgaaaaaaaaaaattgtatgacaataaaattataaatttttacccaaaatccaatatttttgtaaaaatataaagggcctaatttttaaaactagaacagggcctccacaatgtttgagacgaccctgggtttgatttatatataaatggagatgataatagattattattggagattcagaaacaatagtcttttttttttttaattt

SEQ ID NO: 118712 - DNA, 1458 bp, Cannabis sativa
caatatattcattgggcggtttgattttttcgtaaagttattcggattgtatttttgtcggtttattcggtttggtttgggcggtttgttaatttttttgaacagccctagttggtcgtgctattttagtgagctcagttcttattgcaattcattcctattaggcccaagtcataattccacctaagagtagtgttttgaagaagattgatcagatgtgtaggtctttactttggggtggttttgccaatttccaagggtcgggttatatggcttggaaaaatttgggtacgtcaaagaaaaataggggcctagtcttcagaaaaattgtcatttagaatattggtgcaattggaaaacaggttttggcgattactcaaaagaaagataatctttggatgaaattagtttcatacaatgttcttaaagaatgaggatttgtgggagtaccagactactcaaaatagttgctggtattgatgcatgattattcaagtgagataagttgaagtaaagttgctctactcagaaggtcaattactctctgcctcttattccacaaagtagatttgtgatttaatttttccttctcataatgaaacatggtatgccctgattatttggaagagatttgatgtttccaaacataaatttatctcttgattggcggcttggatgatgttgaaaactagagaccacttgatatgccaagggaatattgtggattatttttgtttgatttgtgggatggctcttgaatctcatcagcatctttttctccaatgtgagtttagcaagcaattggttaaagcctaattaagatggataggtttaaactgttttaggttgattttaaggtagttttttgaatcatattcgaaggagtaaagtgagctccttgaggagggaaattaacattttgtttttcaaccattgtgtatatgaaatttgggtgaaaaggaacagagcaaattatttcgttttcaaaaattgtaattgttaatagaatagatagttttacatatgtaaatataggatgaaaagatagagattgaatggggaagctacgtattagagagtgagatcgttgagggtgtaaatgttttcaaatgaagatcattgatttatttttttttaaaaaatatattgttctatttagggtgttcatcaaaccgctcaaactgcctgcatcacaaaaaaatacggtttgaaatttttctctgtgcggttgcggtttgaatttttcttaaaccgcgtggtgcggtttgcggttttgaattgttaatatgtggttcaaatcttattgcaccgcatattataaaaatcagggaatgataccgcgcttcgcgggttttaataatttttttattgaaacaaacgtgtggttttaattatgaatagaatttaaaatttaatattttttatttttttttaattatgtaatatatataagaaaaa

SEQ ID NO: 118713 - DNA, 592 bp, Cannabis sativa
tcttaagctataaatataatcagtttccaaaaatatctgtaaataattgtaatttgttcttataactacgattgtcaatttgtcaggccgcattctatgtaccggagacagataggaatattaccctaacatatggtattttaaaattcaaagatggagctccctaacttcttgagaagccaccaaaactgtatgagtgcataattggtttgcaaaaatagagagaatttatggctacgagattgagtccatactttgtggtgaggaggaaaaaggcccaacagagcagggcaaaaaatatttaacataagttttatatccaacattccaatatataaacgtattttatatttataaatttatatatgctaactttactttttgtgtagagtattcaccatatagaattaaatgataggatagcctgttagacatatccaatggataactcctatatttcctaaataacttgacgttaaacaatgtggatactacgtcatgaaattcattgaaagtttcatgaccgtagaagatccaatacacgttttgacacaaccggtaaaacaattaatatatattataataaatatta

SEQ ID NO: 118714 - DNA, 1359 bp, Cannabis sativa
ggagggcattttggggttactaatgacaaaataggcatatttacacaatgtgtaattttttggttcaaaataacaccatgtgttattttgaagcatgaaagatcaaatttcccttttaatatcaccaatacctattcttttggttcaattaatggtaagctatttatggtatgttaaaatcctctatttctctctctaaaaaaaagttttttctaatcgtatcaataattattttttttttgaaaagactattatattaatctaaaagtaaattatataacaaccataagtggaagtggaagttcctcgactaaatacattttgaatctaccgtaagagcaaatttagccaataaatgaatcttgttattagcaaatttatagacataagagacctgtgctcatgggaaattggataatagaaaaataacatcattaagaatagtatgaaaaatagaaagacatttagttgaaggctttaaaccattaacaaccaaaagtgaatgtatttctattaaatcaacatgtaggtgaagagagaccagcagtaagactccaagccacaggtaaagcttctatttcttcatttttaatatagcctcttataggcttagccattgcagcaatgacatcaccattagagtttgggagcagagcaccaaggccaaacaccccaaaagtagaattgacagcaacatcattgtttaattgtttggacttaaaaattttacattttttaaagtgattgtattgatatatgagaagttttataaaatattatgcacgaatgtctaaataactaaattaattattagcattaatgtttggttgtgttctcctttattacattgatttagttttctattcttttagtcatatttttgtataaatatgagttcatcccattaaaataaacaactaagaaattctcattcagtttctctttctcttcatcaacttcttcttttcttcttatatatttaatattattttataacacgttatcaacacgagtttctgcccaagtcccaaggttaatattttattaaagttcttgagcatgtcgaagacaatactgtattgtttcttcaacattcgataattgttctcaatgtgtgggttagctcttatatataccactgttaggaatcaaaacactcaatgccttttttatctctttccatgtcctgagtctaacagttccattatcacatctattaccacttttcaccaaaatatcttcaagaatattaagcaacatgcattctctttaaatttactccatgtacgcttagaactcttatttttaacatttttaaggactaattttattttgttattttttacaaaaatacaaacg

SEQ ID NO: 118715 - DNA, 1512 bp, Cannabis sativa
ccgtcagatcaaataactcactcatctgacggttaccgtacatcacagattacaatccgtgaaagtacaataacaggacaaaatcatatccaaatatatatatatttacctaaagttctacgtcaaccttctattataataatttaattaatctatatgactggaaagacatattatatttatggcaatattatagttacaatattatttttataaatttttaaaaaaattcgaataactaacaacaccgaaaataaaattgaaattttttaaccacgcgtaataaattgaaatatgatcaagctaatttgtttttcaataccgtacattatttagattttttaaaaaatttacacgaaaaatattatagctataataaataacactactcaaaaaaatgaaaaaatattatccgacatataattttaaacgtaaaagttaactaaaaaattataatcaacactcaaaatataattataccatttgaaatcggaaaaaataaaagccaccattaataacatgaattacaaggacaccttgtagaaatacagaaggtaagcgcatttatgctagagattatactagaaaataaaatagtgaccatattaatcatataaacatagaagagaaataaaaaagtataaggagaaagagaaggagaagaaaaaggatttattcatttgaggacgtgggacaagctctgcctccctaaatttcgcagtggccttgagtttaggaaatcgaaggaaatgaaccaagcattcctggctaaatggggttggaagctgcttacggggggccaatccttatgttgtaggattcttgaagataaatacctaaggggtcagaatattctcaggtgtaaggccaaaacttcggactcctggttctggaagagtgtggtgaaagctaatgatatcgttaggagaggggcttgtaaagttatcactgatggtaggggcacgaacattttgaaggacccctggattgcacatggcaaagcattctacccacgattgactaatattcactcgtgtccatacacttctgtgtcggaacttttgacagattcaggtggttgggacacaattaaattgaataacttgcttactcgtgagacactggctgccatcctgaatgggggtaacccattagggcaaggaaaagaccgttggatttggacgatggaaggatctgggcatttctcgtgcaaatcagcatacttaatccaggcttttcaacggtctcctcactgtgaggttgccccttctctttggaataaattgtggaatagtaggatcttggaacgccataaagtgatgtggtggaacatcctctcaaatgccctcccggtaagggcggttttacttaaacagtttcatatagcggacaatatgtgcccaatttttggagttgaagaagaatccatcgagcacctgttccttcacttcaacttggccttccacttatggaaatcttctccttggggtattttctctcttgtaggaactg

SEQ ID NO: 118716 - DNA, 1908 bp, Cannabis sativa
aaaaaaaaaagaaaaaacttaagaggggttttgccagaaaaaataatatataaaaattaaaacataagaagtttccccgcaaattgctctactattaaagaagtaagataaaactaaactaataaagaattaatgagttaatcatattattattttttttttttggaaaaccatcatatatactaactgtatgagatatttatatgtgatattattatttttatgttatttatataaataagaaagtctagaatcatgttagtgttactatgaaattaaacaaaaacagagatgaagtcatcgaaaacttaaacacaatggctaaggacctacggtataggatattaggtgagtgaattttactttgtaactattcattcaccttatgcatcctataagtaggacataaaataggttgattagttacctatttttattttacttattaaatagataaaataaataacttaaaactcactattttgtttgtgtagtaattccatatggccaaaatccataagaaagccatttttttgtttttaaaattatctaaaatcaatattttttatttaaataattataattaattaaattattgtcaaaaattaaccaaaaaagtaagggagagttttgagtcttcaacaagtgttggttcaagaactctaaaagtgaatagtctcattctttaattttgtgcttacttttgaagattcaagtgtatagaatcaatttatgttcgtagtttgtaacataaattcttgaagataataaaattaaggttggatatttaattcaatctaacaatatttttcttctaattcgatccaatctaattagtaattagatttagaaaatcatcatctaatctaattactcattagattggatcagttttccaattggatatcaattacacccctaattttaattattaatttaaaaacatgaagaaaaatacatataaactaaatatcaccattcaaaatttaacactcggtaaagatattatccttgcaagttataatgcacgcaacaaaaagtttaaaataagtaaaacaacaacattgtagtaataaaatagaaaaaaaaatcatgaaaataaatatatagaacaatcaagtattacaaattaacaaaaagaaacccaataaaaatataattaataaatattttttattatataaaaataaatatgaatatttttttttaaagtatattaattgcaattagatttgatcagtttttaattgaattttgagattgacatccaataatcgatccaattcaattagaatccaacttttaacattcaaatgaatctaattgtaattggataaagaagagttttctctcgcttttgctcttgcagctcctgagttggtgccatggcaaaaacaagattaaaagtgcaaggaaaactcaaatctgtagcaaataaatcaaagaagaaaggtctgaattcatctactaatattatcagaatgaagtccatggttgcagtgcgtagcattgagccaatgaaattttccgaagatgatgaaactgctatcagagatttataagggagaagagtctctaatttaaatccaactattcgtgatgtgtttcagccgcctctttctccaagatcctaactacgcagcaccagaaagtgtgaagacatttaacaggactttgtgtaatttttgatagaaaataatcaatgtaacaatgaaattgctcaaggtaaaacttcgaaacccgcaatcttacgatctggatcagttgttcacaacttagagaattcttttaagagttctgaatagactagcaaaagttaggatcactatggaggatattgaggatagggttgtacgtcggtcggtttgagcggtttatcctatatattttctaacccaatctaaagtt

SEQ ID NO: 118717 - DNA, 759 bp, Cannabis sativa
  modified_base (66)..(70): a, c, t, g, unknown or other
gtgtttatttacattgttttaaaaattcatatttaggatgttaaattacatacatggtagtaaatnnnnntcctggtaaaacatatttcaacaggaagcaaagccaaaaggaaacgagaagggggccaaggtgtcaaaatgtaatgtcttactgatttaggcatgctacattgcttttcttaactaatgtgcaagcctttattcatcaaaggttttattacaaaacatgattaacgaaaacttttataataaacataactttactatataaatgaaatagaagttacaaacaccgagatctcaaatttattttagaaatgttctacaaaatgaaaccaaacaaaagatgtcgcccagcgactaatataatcgagcacacgatgtcccaacgatttgaactctataggtctaacggtcctgttatgtacaatgtttatggagctccaaactcaccacttattcagttttgaccttgcatttacctttacatgaagcacatatttatgactcgacaaactcagtaagaaaatcataagacataatatacaacctgcccttgtaacttaggcgcccacacactcaataaaaagtaattataatgcgtccaacgtgtacgagtcttgaacatttttgacaagagtacaaatactttgtactccttgaagctccattaacctctataccacatacacttagtacctctaacgtactagtgttggtagggttagctcgaacctcataactgttgggttttatgcc

SEQ ID NO: 118718 - DNA, 1048 bp, Cannabis sativa
acatagtatgtgactagactctgtcaaggtcgcatcatctcgcaaatttagatcaagtgaggctctttgagagtcattaattaataggtcatcattttctcggggattagatccatgtgtcaaatttataagagcctgctctcgtatttctagggaaaaaaatttgcaatataacacatgcccctagttttgtgattgataggtgtgtcatatagggaaactattaaagagaggcagacaagttattgtcacgagatatagacctttggttatcttgttgagggttttgaaaagatggttgtattatttgttttttattttcccaagatgccatgtcatcaaaacccttcagggtgtgtgtaggcatgctcgttggtgaccgttggattgggtgacccttggtattttttctaccacgtgtctatttcccaatggatagggattgtttgtatttaaccccctcaaatacaaatcgatcacacttcatttccctcccattcctaatttctcatttttggagttcttctctaaaaatttcaaccttcaaaaacctttcaacagtttggattttcatttcgaaggcttaagaacttccaaagtgatttctcgaattcaggagaacaaatcttcatacaaaaaggttggtatttctttctcaactcttttgtaaattaattctttctaaatgttcgcatacattatgggtatttagatagaaattgcatgagatcaataggactagagaatcaatatttagaataaagtaaggcaaagctcggaattttcgctagaaaattcttgcctgtaacttgaatgcttacatatttcatgatgaatctttgaatatttgcatctttatattagatcctttttgcatattcgcatatttaggctcatctgcctccaaattgaaaattggcagtgattgggtgtttcacagagattaaatgcttatttcttttggtaacccttaggtcactattaaactgttagaatatgttttaccaggatctagattgactactatgtatgttatttaacatcctaa

SEQ ID NO: 118719 - DNA, 6223 bp, Cannabis sativa
gagacgaactcgaaatcttcatcatcgacgttgtggtggcggttgtcgtgttcgctgccgccgtcggagctttcgaggcctaaatcagcgaattctcgtgagaccttggcggctatatggacgagtctatcagaggagtagctgttaaagctgggacaaaagggttgttctgagctctggtcctgcatttgtaacactcgtaaaagatgcttcgtttcgattttttctattctctatgtttcgtttgggctgtattatagtattgtagtagtattctttcctctctctatatatagacaccaacttaatgcatataatataatataaataaataatatgttattaattaataataaataggggctgtttagggttaaataaattcttggggagaaaccgagaaaaaggtaaccaagaaggtgcaaagtgcttatttatttaagttttattaattaattaattagggcgtgtagtaaaaatgggaataattctattaattttcttaattaattaattaatttattttggttatgggataatttcactccgcgatacacgtttgggagaggctcattccacacgtgctctgtgaacacaaaaaaggaaagtgacacttacacgtgtggggcttaagtgtagaatcgttttgttttattagaaaaaggagattaaaaatgaaaaagaaatagcaaaagtttacttgtctgaaagttacacggcgtaattattaggttgtatttgtataggtataattacactataaaatgagcgagcattactatatgtcatacatcaccagcactatattttgattgcttcaatagaccatttattagctatatattaatacggggcacgctaaaaggtggtagacagtagacatagacactattactatctttttaatatttctctttttattaggggtaactacaaatgttgcccaaatatattaatttattttttcttttttcatttacttggtaatttttattacaataaaaatgcatagtggtcttatttggggtcagcaacggttagtttttatggttatatttaaaaattgactgattattatataaatgtaaaaaaaattgaccagtttaataaacggaccgaatcgagtttattttttattttttttttaaaaaataaaaagtctttaaaatttttataattatttgaaaattaaaaaaattagagtattgtattaaatatcatttaatttaagaacaaaaactttttttagttaaataaataatgtaaaattattattttttttattttgctcaaactatttgtactaatagtatgataatgaattatattaaaaaaacttgtattattttatgaatgtgtgtatataatacataaatacattaaattataaaagtaatttgtggctaaactccttatacttttatatttgttgcggtttaacccccttactcgaaaaattatggctaaactccctggactcgacaatcgttttgctctgtagtccttccatctattttggtatgttaagtgtcaaagtggactgtcacaatatacataaatatacacgtgacaaaattcattagtccacctagctaatattaataatataaataataaaaaaaaatttaaaatataaaaaaaaaattaaaattaattaaaattagaaaaaaaaaaatacttttttttcttttttcttttttctttctttctttttctttttttctttctttccttttttatttttttttttaattctgctaggtactatagaaaaaaccagagagtgtcatagataaaaagcataaaaaaaaaccaaaaaaacatgtttgtttgagggagtggtctagaagatctttttcatcttggaccacatgaggacactctacacacacttataaagatactggctcttgtgtagttattctcattggagtttggtgtgcttatgtgttacaaaaatttatttgctcatgttgtgcatttcttattcttgctcagttgtttaattcactgcattaatcagatgttaattgtcttgttatcatcgtaagatattgagtatctctaagcttctaactttttatctctgttagtaaggtctgggcaattattaaattttgtggacatatttgtagtcattagatctccatgatctcattgactcatgtcaatatgtttgtttcgatatacgtgccaaaacttgcgatgaaaacagttcaatttgggcgtgtatatttcattttgcaaagtctagttcaaaataataataataataatcattgctttttatctttgcatggtaaaatattgttagggtatccattacttaaagccaaaggagagtaaatcgttttctcactttactcttttctccaagcaatcctaaagtatgaagctctcaatacactttgtccatccaaaagactctctttctcagtctataatggagaatgttgtttccatgtcgatttccactaaagccatcaaccttccaacatctgtgtctcctgtcgcatcagaagtcgtgactagtccagctgaagaagtgttcagcgacgcccatccattttatctattgtaccttatcagtcgacggtcgatgatcctcctagctccccaaggtttgcatctcctcagtctccgtcgtcgccactgatcagtcagaagcctcgaacctttcaaggtaaggctcattctctttcaaaaaaagcttctacttcttcttctctcactgagccattttcaaaaaggggcaagcctacttgtctgtctaaatctaagctgataggaccaactcgtcctccctctaaggtctctataactcttcaaagcaaagacaaagatcagtcaaaatccaatgcttcaaaaagaaaatcatctagtgatcccacttataaaccatctcccaaaaagactaagaccaaatctattcctgtcccatcggcagactcgtctccaaaacactccacaaaaagatccaaaaaaaaattcctccaaaagcccctatctcaaatgttgacccattgactattcaatgctttgttgatgcctttaaagcgtttgtatatcaacgttggtttggtagtcgtgagttatggtttgaacaactagtagtttttgatgactttcttgaacttcatccattcttaaaaattaggaaatgggttcacactgtctctaagttgtctgcagctcatcccattttaattcatgaattttatgcaaatctagataggatagttattgctgaaggacatccaggttgtgtaagtgaatttgtcaggggtactcgtattctttttggtccttctactattgcatgcatcttaaaagtttagtcggtcaaaaatccaacctatgggaaatagtttaatccatatcaaactatgatgagtagagtgctaactggcagggatgactatctttgggaaaagcaaaaaattttagctactcatttaaccccattctatagggctcttcattaggttactttgtacaattgatttcctaactcccatttgtcctcggtcactcttgatatcggaaagtttctgtatgttgtgggaactcatgtatccattgatctgccccttctaatttttgaaaggattctcgaagcctcaaaaaccactggtactcaaaacaaacttccgtttccaagtctcatccaataagtgctcatggccgctcaacctcctttatcaacccatgattatcaagttctaaatcttgttctcagtaagagttttttatcagttgttcacagacaacccacttcaactactccttcagcctcaaagatgaacaaaggcaagtcccctatgttcagagggttatcagactcgagctggcaggtacaaatattttctaaatttaaatcatttgtcaaaaggtataagaaggatcaaaagcgtcagcttgcatttgaggcctctatatacaaaatggttcgaatcatcaagtccactgttctgcaaaatcactatggagaacctttaactccatccattgatatatctcttccatagtttcatatagattcgtttggtggatcctcatatgggtctggtagtgccgcacatgctcagggggagccgtctatttcttccctagcctcaaatacagtgcctcggcatccttcaactgcaattgaaccgtatccagtatccattgctcctcacatggtttcttttagcagcactatcccaggcggagtctgacaaagatgaggtgccatctgctcatgttcaatgaagggggagatatatgtcctcaagtttttttatgaggttatggattgttatatttctttgcaaagacaatttatgtttctatagtttcattttgttggataacttttgggtctttgcctttattttgattagtaactattacaatttttgtgtgttcattgaacataatgtgtcaaggggaagattgtaagatccatgtttttgacatattatattaaaagtgattccagtcttatctgttatgttcgcctgccgtaactagatgagaatatgctgttagtgtccacgataatctgttaagtattaatagttgtcatgaaaatactgttaggtctagtcagaactataagtctatatatagctagttctgttctgagattaaatgaacttgctaatcgtattcttggatagttcggtgtaattgcgtagtatcgagtgtggtgtattgtattgttctttgttttataggtctgattgaataacttggaggtggtcatccataatagagagatcagagcctgtttgagctgagttcagactaaagggagttcagtgtcatcttcatcatcagatctgaagggatttcagattggagaaaagtgttgaagagaaactttgcttgtgcacaaggggatcttgtgtattcaaacaaggatcttggttggtgtcggtaatattgcactagatgttgtaaagattgtattcaatacctaactgtgaactggtgtttgtaatatgaatctttgaatatagtggatgttattaccctggttcagggaacccaagcactagtcggctgagatttgttctcagtgcagatgaagcttgtaaattactgtctttattattgattgctcatatacttgtttcttgaatggtaaagttacaattcataattgatttcttaaaaaactcggtaatctgaatctagtaattaagttaagttgttctttgaaattgcattctccatttttctttaagtgattttgcttttataactctgacatggacaataaaaactaataccgagcgcctaagttgacatattgtcaacttggactgtttccaatcaagttcttgtaaaagtgtcctgggccattttcctctcataagaaatcaagaagattaaaggaaactcggggagaaagccacaatcccaaaaccttagaaataggacccagcgcccaagttgacagtcaacctggtgtgctagttttaatcactcaaatgccaaatctgatttgaccatagaatctggcatggtctaaaacagggtagtagacctctttctcaagtttaagaaccttagaagtatcaaaaagacatcccggaagctccaaaatgagcacccaacgctcaggttgttaaatggcatggtgcgctggattctacttattcaatgctgattttgtttcgaccgtccgcctaggtttttacaataattaagatccatgaaatcagagaaggcaaattcacaacttcacatttctcatttttgacatgggaaactcactcagaaatgaagagttttgagtctctcattttcgcaaaacaacaacatctctgaaaattggggaccagcttctccagaacacaaaaatggagtaagtgatgtcaaaatatcacttaggcatcataaagtatatcacttagacgtttttcacttacccggcgtccaggttcatgtcatatgtcaacctgggctctggaatgtcaacttgggcgctgggtcatgaactgccttcaataaaacagccataactaactcaatattcaatctgattgaacgtaaattcaacttgtattttgaagatatttcaatgttctatcaagtcatccctcacacttcaatctcatttctaaagttatcgaccttaaattacccaatggagttatgaaaataaactccgagttaccagcaatgggtcccgccgggctccaaaaaatgactatcaacctcagaagttaat

SEQ ID NO: 118720 - DNA, 3402 bp, Cannabis sativa
  modified_base (651)..(651): a, c, t, g, unknown or other
tattccaaagaacctgaaaacatagaaaacaagcgtaattccgtcccaacacagctagaaatgcacataaattggatccaaaacataggctaaaaatagcctaacaagcgtaggtacgagctcatttgattaggtgatgcaatattcctggcaacgtatcgagcgtaggtacgggcgtcagtgatataaaaatgcctagttatgacataaatcaaaattattgttgggttttttcctgatgatgtatcgggcgtaggtacaggcgtcaatgacatatgataactaccgggcatcgggctcgtctgattagacgatgcgatatattaatgtcaagttgtgcacgagcttacatgattaggtggtgcaatgatattatatatgatattacatgatgatacgggcttgcctggttaggcaatacaaatatatgagcatatctatttctatgcatatgactggttatattacatactgttgaatgttatggtttaatcattttatgataatgagatgtataattagctatttaatgtatccttctttattacttttcttgctagtctatgtgactcacgtgtgctctgtggtgcaggtaagggcaaggaaaagttagaacaaccatgagatgatagtcttctccagcaatgtacntattgacctcaccggcctgcgtgttggattgccaggagttgttttggactaattgtatctgttgtattttgaattgtatttcgaatttctattgtatatagtcttttgggtaaatattttataataggtatctctggaacacctttttactgtcattataatgtcagtttttagtgttttattttagtcaaatttttattatcctcacagtttttaataattaattaatatattagtattaaattaatttataaaatcacacacgtgacgtccctatgaaatagagcgttacagcagtacgtccatttaataattgtcattgcattcatagtcattgttatcattgtatcttacttataaccgtcattattcaataggtttgaataaataaaataaagggggctattatgataaggattaaatattttaccaattaataggaatagtaatttatagtctttaattaatttaatgactcaaattacttttaaaacctagactataattaatatatttttttaatttataattaatcataaagattattaattaaagaaatttgctttgattttggtcactataatcattcattcaattaaagaaagcattattgagaacaaatatgctttaattttggtcattgtgatcactcattcaatcgaagaagctgttgttgattctcttgaaggcttctttaatttatttatttattttagaaagaaaggcttctttaatttgttagggtttgaataaaatcatataaatttatacatagatagattttttatatgtctatttaaagttacggtagaagcattttttattatgaaaatagaatggttttttttttttttttgaattgcatataaatatttttcttaattaattaatcaactaatagttataaacataataaaaaattataaaattagaaaattaagaaaaaataagtagtgctattttgaaaaatcttaaagtgaagtcatatttataaagagttttgtaagtgataaaaaaatgatcattttttaaatattttaattgtaaaaaaaaaaagccaaaaagccaaattttggctaaaaaggtgaaatgagagatcttaattaaaaaaaaaaaaaaaaaagcttaaataatgctaataaaaaattaaatactaaataatgctaattaaatactttttttgaatataaattttggaattattatttatgaagctaataaaaataaaaaatgagagaataaaagagaaaacaaataatgctaattagataaactttatagtttcatgtcaccgactcatatctttcctttataataaaaaaaataaaaaaaaaaaatgagatagaattaatgagagaataaataatgctaattggagagatcttagagtgtcatgttaccatctcatatctctcatttatatatatatatattaggaaacaaaccgcgcttcacgtgcggttatattttgtttattgataattaagttataaaaatatattaaatttaatatatttttttaatagtatgagtaactattctactaaattttttcataatttttatacaaaaaaataaaataatattgtagaaaaattcatcattcaatttcttatctaaaaaagaaagcaagaaagagatattttcaaacgttattgtaaaataaaaaaaatagaggttggaaaatcctcacacaaaatagagatctaaaaacaattaataaatctatagaaaactcatcatacgattttaaaactattatcatttaaagcctatgtcatcaccgtattatcacacttgtagttaccactacattcaaaatcgttgtcatcatcgtatcttatcttatttgtgattgtcgctattgatcaaaataagtttgttttgtacataaaacaaattatatacttgagttaattaactactaactttttatacattagtgtatgattttgttataaattccttgcatatttctaaatgttttggtatgatgatgattactgaacatatctcgattctcaaaggtaatctttgagaataattaaatacaactataataaataaacgaacgttagaattaaaaataataaataaattattagtttttgttaaaagtaaacaccaaattatagtaaatatatcaaattttgtaatataccaatatattataatcaaattttaaatgagaaaaaaaaaatcaaacacgaagaagtcgaataagagaacaccataaatagggcataatagcacaacaatattacattagttcaatatggtatatatgactctctataatagcttaataatattacaaataaattttttcttttaaaatgtattaatttacacactaaaatctaaaaaaaaaatatatatgttaacctttaatatatatatatattttgtatgagcctttaatatatatattaatatatatattcataattttttattattttttataagacatttgaccatatataatatattattaaaaactaaatgatatatattttcttaaaaaaatcaagttttgttataaaaaaatgtttggtagtagatttttttttaaaattaattaaaactgaaaaagaaatttgaatggaatatttggaagaataattatatgtgtataaaaaaattagtatattgttacgtacgatacacgtatgctatgttttatattaagtattatattaaaagttcggaaggaaataaatgaatcaaaaataaataatatttaattta

SEQ ID NO: 118721 - DNA, 2117 bp, Cannabis sativa
agggcataaaacccaacatactaacctttggaaaggcacacaatactacgaaatgacccattagctttagtttttaggcattgagcttcggttttgacaaaattcacattcaaaggttttctaggtgaagcgaaaggggtcgaaaagaaccgaaggcaaagcgccccctatggccttggttagttggctaataatcaaagccatattatatttttttttatttactttcaggtactgtttatagaaattttcgaaaaacaaattatttaatgttagagctaaagagaatatgactaagagagtaacatatgaaaaaggcactcaaaatttttacgtggttggaatgttaatgagcttcactccatgagtcactaatattatgaaattggctagaaaagcctaaggtattacaatgaatatgagcaccctatattctcttcttgagtagataagtcaagaatttccaaccatttgaacgaaggattcaatgtatattaatagaataatagaggtcgtacttagtaactctttctctataatggggagtttacaaattatacatagatttgggcttacccgacgaagccgaacccatgagacaatacgtgtatgctgatgtggaaatctgatcacggtgatagctgctcatattgtgtcttttgatcgtgggtaattaatgtaatttaattatttgatcttcaatttgtttagttttattttttaggcatgatattattctctgtccacgatcttagtgaaatattccttattctatgcagagcaatgaatgagaaactaggattggcttccagatacacgttgtgaacttcatctaggtacacggaatggacactcttccatatgttgactagacgtgaaaataattgggataataattgggcttggcccaatttatgttatttgggtccacttttgggctttaagcttcttttttgaatccatgtatcccttgctataaacacgaataatatttaccccctaagctttcgaaatgttgtggattgcagaggcttcagtctatacaggaggacatgtggaggtttaaggtgaaacctttacatattctaaatatttttggtaaatggaagacatcttttcaatgttttaattcaagtacacgtggcattatgtcaccggttcgagaagcatctgttcacttgacaaagcgtgtgtagaaaaaataattgaattggtaggcatttacttcagcacgagtcttgaggggaatatcatcatttgatttatctcgattcaagatatggcattaaatgcctgaatgataggcttcctagatgtttgcttcatgatttttgaagatcaaattggaccattgatcttggcttcgtgcggataattccttgaaggtataaatacctcttaacgccacctttcaccactttaacccaaaatttcaattttttttttttttgctttaagattataatctttgagggaaaaaattagtgagaatatcgatcgtcaagaaattccggagcgagacatcgattattgcatccacctttttctttaaattagggatcaagaatatcaagatgctccacccccagtgattacaactccattatcaaaggaaattacgaacctggatataaattctgagattgattctcttatcgaccattttgatcattggtcacaatatcaagaaaatcattggtaacaatatcaagaaaatgactaacattaaggaatggcttaacactcaattcgaaatgaaatatttgggtgaagccaactatgttgttggtattaaatcatttgaaatctgaagaatagatcacttgctctctcgcaagcagcttacattaataaggtgctagatggatttttcatgagcaacaccaaaggggcagtcatgccttctagacatggtgtgcatctatctataaaacagtgtcccactaatccccaagacattgaagatatgaaaagggttctttatgctttagcagttcgaagtctaatgtatgttatgctatgcactagaccagacatttgctatgcagtaggaattgtgagcaggtattagtcgaacccaagaggggaacatcggactgcagttaagcatattctaa

SEQ ID NO: 118722 - DNA, 3001 bp, Cannabis sativa
taggcgattcagaagatccaaatgagttgaccagtcgccacaaggatcaacatggtaaataaaaaaattatgacaatcctatatttgaagatgatgaatcaggagaaaatagtttcgatgatgcttgagatgatccccaagacatgtctacatgtggtggtgttaaaaagaaggacaatctaggcaagtcagaccccgtggtcattatggccaagaagttagaagtaattgaaaacaaattaacttggtaagaagaattctctttgcaattgtttgaaaaagtatttagaatggaggctgcattaatagcactaacttttggaaatagagccaaacaaacaattttagaggataataacaccgaaaaagatgatcctaaaaatcctggaatcaatgatccacataaggacaaaaggaaaggaaaagtgtgaaaaaccgcaaagaagccttctcaggttgaacaacagaagaaatctaaattaggcagccaaccttaactgaaaaagaaagaaaaccatgctttaggagaggatgcacaaattaattctagaggtagagctgcactgaaagataagtctgatacaagagccaagaagcctactatttggaaggataagaatcactgcaatgattctagcaatcgaagtgatgatgtcaaagaggtgcatccaattttagacaatgatagtggaagtctctccacaaatgatcttcgaagaagtttaaaagaaaagaaagagaaggacataacaaaataagccagacctagtgggaatgatttgaggaatcatatcaatgattgagtttgcggaagggaattttcaaatgataaaacttagcgcttggaatgcaaagttgaagagttaatgaagctcacggagactatctcctgaagatagaatggaactatgtccaatttagaagaagaagatacaaaaccatgcgtgaagaaaataatagaggcatcactatcagagcacttcaaaatgcctcaaacagaattatatgaaggaagaatagaccccagggaccacttacccaaatacaatcacatgatgcaagttgctaacgctagtgatgaaaagtgtctttgcttttcattaactctgacaaaatccgtggaagactattggaggaggttatctccagtatcaatccacaactagagggatctccaagtagtgttgaaaaagcaattcatagcagcaaaggatgttgatctggaagctagttccttgactaccgtcaattgacaacacaggaaaagccttaagaagtacatccaagatatgatggatgtcgctgcaaaaacaaaggttactaatgatatgaagatattggctttgacatcaagattaaccactggatcttttgtatggggagaactataatgaaggagagcagaatctttatctgactttctatcaagagcccaaggattcatcaatctagaagatgcttacacttaagtttacggagtacttccagcaccttccaccaacatagtaactgcccagacttcacaaatgacaactccgtcaattttccctccgtcaatttttatacaaacaaatcaaaaagcgaaacctgtagagcccaatgtaagccaatcacggagcaaaagaagttctaaaggtccaagcaagagtgactctgcaaagaaaggaaaaacttaggaatcaagatactccgagtacaccaaccttgttgatactcgtgagaatttctataaagaaactgataacatggtccattataagaagcctccaccagtgtacaaggatggaagacagaatagagacccaaacaagatgtgcagataccatggtgatattgggcacaccactaatgaatgtgactatctaagggatgagatcgaaagattgatttgaaatggtcatatatccaattgggtaaatatacaagtcatctatcctaaacaaggggtagcacatggccaacttttcaatcgtgggcaacatggagctattaaccctcctcaaggaacataccatccacaagttcttagaattcaagctctaaacacacaactccctcaagggtatagaatgctctagctgcaagacctgttattgctcccagtcctagaaatccataccctcctggagctacttcaccaatgttagatggcagggcgacaaccatttttggaggcccacacattgccaaaagcacccaaaatccacaaaaaagataactggatgaattggatcaagatgaaacttgtaacttggtacaatcacctgctcaatgccctcagatgatgaatcttctgataacctttacggaagatgatgtgaagcatgtacattttcctcataattaccctttgctgatagaagcacaaattgaaaacaaaagagtttcctaagttcttatggataatagaagctctatcagcatcatttctaaagacgcttttaaagatatcggtctagtggaaatgaatctatcatcttctccaattcaactataaggctttaatggagacaccctgataccaataggaatgatccaacttacagtgacaataagcagaggtgcgtttggaaacaacgcaatgtcctccttcaagtattgcacctttgtagtggttgattgcccaataacttataatgtcattccagaacgaccttttctacccaactttagggaactaacatccatccgccatctatgtttgaaattcccaagcaatactgtaagtgttagaacaatcgtaggcaactaaaaatagttcaagaagctgctacaatgtttcaacttaaactgtcctcatggtccagcaaggaaacatagcagaatctggaacatcttcatagtcagcactgggggtggtctgagaagaagatgagctagattcacgggtaggtgtggaatgaataattgaacctatagaagaggtagaggaagtatgcatcaacgatgaagatcctactaaagtcatcaaggtgggaaagaatctacctctagttgtaaa

SEQ ID NO: 118723 - DNA, 837 bp, Cannabis sativa
gttcttcatatagatttctttctgttattaataatattatacaaaattggtgttgcgaaattcactcgacaacagctgtatgattcatttttttcccccgtaattcttcttgtgcatgctctttacttcttcatgcttttatgtagttcatttttattccacacatatgatttatagtctcctttaatgtctagtggcgtttcaattgtttttatgttggtgaactatgacttgatgtagcttccaatcaactttgttttagcttgtcacttgtttgcaaatcttatgttgagatcacaagtgtgtacgacctttatttcatatttatgattttgaatgatttggttggtccattttttgatgccattagtgttgcttgcattttggatccaagcaacaaattttgtaagtttttgcgcaagaatttttcactttttattagaaattatttttaattgcatagaagttgaacatgctttgtagagtttctttgtccatggttatctatgcttcttcaatttcaggatgttaaggatctgtgattagaagttcttcataattagttatttatggcactttggtcttgttgttttgtagttgctctactattttctcagctaccaattttgcatagtcaatgaagttaaacattgtttcgccatcttccaacattgtctctttaaaggtttgttgcttagtagttgattcttctgttggtagtgcattatcaatcattagtattgttataagtacttgtgtaactaatgagttgctcattgcaaagaatgaggggttattgttgttgtattgctgaccatgttcacacacaatggatac

SEQ ID NO: 118724 - DNA, 4916 bp, Cannabis sativa
  modified_base (42)..(67): a, c, t, g, unknown or other
actcttatgtgtttattttcattgttttagagatattcatannnnnnnnnnnnnnnnnnnnnnnnnntagtaaatctagatcctggtaaagtattccgaacatgagcatcttaagattctacataacaataatagtacaaaaaattatttttaaaagaaatagtacaaagatcatttataaaaaataaaacacaaaagacaaaaaaaattactaactaattattaggtagcacatcggtatagcattgaacaccttaagtgcccataacaagtaccaaatagtatataaatgtttttttagaaaattgctaaccaattattgtgtatgtgaatcggtatagtattgagtaccttaaggtgctacatagcaataatagtacaaaaaattattttaaaaaaataatacaaagattatttataaaaaataaaacacgaaagacaaaaaaaaaaattacgaactaattattatgtaccacattggtatgacattgaacacctgtcaataacaagtaccaaatagtatataaaaaaattattaaaaaaaaatagtacaaacattttacataaaaaattaaacacaaaagacaaaaaaaaattactaactaattattaagtatcatatcggtatggcattgaacactttaagtgtcaataacaagtatgaaattgtatttaaaaaaaaattaaaaaattgctaaccaaatattatctttgtaaattggtatggtattgagcacgttaaagtgccccataacaatagtaattaataactaattattaggtacctataacattaaacacccactaataataagtaccaaatagtatatatatatatataaaaaaaccacaaacaataaagacaaatcctttcactttatttaattcaaacgtccctttatatatatatatatatatattctcatcagtcaagaacggaggcgccatacatatacatactcctaagttaactgagcaaaaatactatatattttcaaagcaatgtctatctgctcttcccaaaatcatatatatcatggattttcctgtctcactctctgtctctctctatatataattttgcgttggtgaaagaaagaatatatatgttttagacaatatgtacttgtaaataatattggtgtcttttgtggtcgatgtttgaatcaactttcaccgccataattgagttcaacatgcacataatatataatatgcgtaccattcccatccatattttatttaaatatgtataaaatatgttttaaatgaaatgatattaaactcatttatgtaattttttctcaatttttttcatcttgtcggcgaaacagataaattaatctccgtaactatatagcagtcgcatgcatagatgtattgttttcattctttcttccctaccataattttggattttaaaagcgatttttatgtcctctcatcgttaattttggcaaattttattatcaacgcttattcaagcaatgctataagatcaaacacaaccgatgccataaaagaccctataacgtcggtattaaataaccaatgccatagtgtatattatagcgtaagttatttaataataactgacaccatatgtaataagagccgatgccatatccaaaaaactgacgctatagtgtgtaaaaatcaatttattttttcaggtataaaacctattataaattcacaaatttaatttatttaagttaaatatttattatttaattaattattatttaattaaattaaaaattattaatttaaatctaatattatttaaattaatttcataactaaccaatatacttaaattaatttcataaaaacaattaaaaaattacaattacattataaaaatattttaaaattagtcgaattgttaacaagttaatatatctaattaaacatacaaaaattacaaagtaacataaaaaaataagctaggaaaaaaaattcttatacatttcatcagcatcaattgtccaagccttcgtgaatcactgccagcaattgttctatccactgtcgctgtaacggtaacaattcaattttttcatcgtatgttttcttttctccaaactgtaaaaagaagtaaatatttatattagtatatatatatatattattgtttgttaatataataaataagataattaataactaaaacttataactttttgatcgtttaaataatggttagagtttgcacgtgcgatgatgtcactcatgtatttcaatacataaaaccacattcttagtttttaggttgttttggacaatttgctagtgaaatttccagccacgcccccaataaacgcatttgatccccctaaagtctcgtatgcactgttttcaaaaattatattaatattttaataattaacatatatatatacataacttagttaattaaaagatttattacataaagagtattaaattattacttttttaacattgcaagaatttattggagaactttgtggccatccataggatctaaatggataatttttgctggcgcaacgacttctagcatctagtggacactaaaaaatatctatacatgtatataagatagtgtaaaaataattgcaagttataataaagaaaataatttcaaattatctcttatgtagtgttcacccaatattctagggaataaagaatatttggtgttggctattcatcaatgataacaaatgagctaatccttttgacacaaccttaaagattcttccttttctaaatcattgttaccgtgtactgcgagaagctctgggtcataaaagttgaaaattcgtctcaaatcatgtagcccctcccaaatgtgcctgcattaaattgttagatattaaaatttttataataatttcagtaaaaattgatatacaaagtcaattaggttaaagaagagtatacattattcaaaaaagtattatttccctagtttctgatgaacacaacgccacctattgtaaatcttctccagatttggtgatctgggtacgaggcgctatgaattcatacccaaattgagatttttcgccttgattctcagaaattctacaattatccaaatgattgccctagggattagcgccatgatctctggagtgaataatagatcagcttgatcactactgccttttcgacaaggcatgggaccttttccctttgacacatcacgtcttgatggtggttgagctagtagaccatatacaaaccaccatataatatatcaaaatttattttaattctaccgaaattttgacagcataacaattgtaatcgaacgtctccaaaaattttaaacatgcctaataacaaacaaaatagataaaacaatttaaaataaacaaaataacattaacactacaaaaattatccacccatccaaccactaacatgtattcgcagaacctatttcactatggttgaatatttaagatattcaaactccaataagcattgataattaattaataaaaaaagttacctcgaatgttaaaatttggtatataggctaaggaaggaacatgtttgctacttccctaacatatctacacccctcaattgatattgtgatttcagcatcctcttgtcgcatttctgaaataagaactcgggcatgtgaatcatcatagggcaaagtgtgaactgtgattggaccctcatgttcgtatagataagcttgggccactatgttgtcaatactatttgagcagagaaatattgtcttattagttgccctctgttcagtgaaattgtacatgataggtggctcatataggagaacaaactccaaagcataattttgtgaaccctcatcctcattagcgtgttcttgtggaacatacgactgatgagccacttgtccttcttcctcatcctcatccttattctactcttgtttggcaatatttttcttctgtttaagggatttgatttctacttttaatttctcaatctccctctaattttgagccacaacatcaaaaaatttccttttcttcctgtcaaatagtttagacgctttggcaaggaacctacaaattaataaataaagttaacaaatatttatttgtctaactaataaaatgatatttttcaagtactagcatacccagcaatccttacacgtccacgatgctttggtgtcccgagcgcctgcgtcagaatgtcattttggcaatggacttgaacttgtctctgactaacttgctcctccagttgagcctagtgcacgtattcaagcaattaatatatgatttatatatatatatatatattaactcattattactttatcagggattaatatatacttactatcttatcgataatttctatgtcgtaattagtgacaagttttgttttcttggtctaagatttgatccaaacacggtggcgtggcggatcctgaatctcaaggtcctttttctgcattgttttacaaaacttaaatgagtactattacattttgatgcacattgctaaaaattcattatattaattacttaccacatcttcttttacattcaccattctgctccgaccacttcgatgtctagattagttttttgccgatctttccctttgtactttactcaattcctaccatgcaaaaaaaaatacattagctaccagtttttgtatttaaaagtttatcatagtacgaatataattagtacctgaaattcaggagttaggcgacttgtaacaaatttaaaccagtcatttttgtcgatttcaagatgcttttcaaggatgtctgccaaccgttgcagatcattttcttctaatgttggcataatgatgtccttggtcattcttgttggaatatatgttaccaggatctagatatactaacaagtatgttggattatattctataatctaacacc

SEQ ID NO: 118725 - DNA, 2282 bp, Cannabis sativa
ttttcacttttccaattttaaagacaaaaaactaattaaaaaaatttaccaaacgacacctagtttacataacattatttttgtagagaatgaaaataaaaactcactgcaagacaagatcacaaaccataaaaatggacggttttttattttattttttttcaattttatttattaaatggaaaaaagaaaacgaaagagtaggaattgacatttttcgtggtagttgtaaacttacttagacgggaaatctaaaacggtaaaaacggtaaagtgaaaggaacaataacgattgcggccttttcgtaatatttatcctctctaacactttccgtacaatccatataaaaatatttatttatgaacatcttgaaatatagacagagagagatatacattcaaatcaatctcaattctttttttgttttgtgtatgtcatatgttaatcatagcttgtgttgagagctaatacaatattattaatagcttgtgaattgagttcccataaacaagaggacactcaatctctttgcttttctccacaacagagggatttcccttaaatacaagacttttcttggcttcaagaatatactaacccctttctgtaagtctcctcttctttctttatatatattttccctcttttaaatgacctttttcttatctgggttctgttttcttttgttcctttttttatctgggtacttttcttttgctggttcttgatcctttttattctttttcgtatgccaaaatcaaattgtcacgtttgagatattttctttattgggtttccttcaaaattttatctttggtatttccactttcaatcataaacctttttgttgtttcataaaggagaaaatcttctttcctctccaaaatagaaaattaaatctcctttaatactatttcatcctttttattagtaccctttatttattttaattggttgacatatgacatgtacttcattatcattaatactttcatgcacttaaaattatcattaggtaactatctttcccttttgtattattccatatcaaatagttctatcatatacaaaatgaataatcagctatagtattttggctcaacaggttttgacagctgaattagagaaagggagttttgagtttatattggtgtgaagatatgggagatcattttgtattgttggtggatcgattactcactgaatcaacattagaagctgcaattgagagcagaaaccgatcaatccaagcagccaagtctgcggcaaccgatgattcctctaagaaagtggactttggagacatatcatctccaagaaaattagtagaatgcaaaatatgccatgatgaagatagagattcaaacatggagacaccctgctcttgttctggcagcttgaaggtttgttaagctttttatattttatttatatatttacataaatatacatgtgtgtttgtgtttataatgtttggctagttaattttatcatttctacatctgggttctttttcaaaatgtgattatcatatatttttaatgagttttagaaaaacaattttgatttgccagttttgttgtgtaatctttttcttaatgaaagaaccagtcagtcaacaaaaatcaaacaatgaattaatgtagaaaaaggaaaaatgtaccttcaatcatgactagagcctgtcaaacatggctgcaaatattaatataagcttaagttaataaattaatgggaattgaaaactcttctgctgtgggactacataaattatccatgtcactagttaatcgtccttttatgaaattttctagtgtttaattttcgctacagtttcactcgtgattctccaaatgagttaaaagccaaagtaaagaaaacatatcatatgtccattgacctattaaaatcactctctcacatcccaaaatcaattattcaactacttttcgcatccaacagcttatttattactcttctcactgtttgttggtccaaccaattaccaatttttcattctctaaataatgcattctttgaatctactagtagttttctctagatagatatggacacaggacattgaaccaagacaatggaccttggaccacaaactcaaaaaatttaacagggcttttgtggattgaaataacaccacttacattaaaatggaagtaaatgttaaactttctacagattatgagctaacaaaacacattaaatgctaatctttattactcataatcatcaaccaagattaatatttatttagagcatcaaa

SEQ ID NO: 118726 - DNA, 1503 bp, Cannabis sativa
gagacatattcatgttgcactcttttttccttagctcagaatttttctcattgggttttcctgacaaggtttttaacgagacaacttgcaaatgattatgaatatgaaatatatattgcgctctttttttcttagctcaggttttgtcctactgggtttttctaaaaaggtttctaacgaggcaactttaaatcatgctaacatacttacactttatgaaacagtagaaaatatgtgagagtgagatcattgacataacatattcggaaagcatatggattacactcaataaagaagtatcaacacaaacagtactctatggagataatattgcttgcatcgttcaactaaaaggaggatacattgaaagagataaaactaaaacacatttcactaaatttttctttatatattttaagagaatgcatattggtgtccaacatattcaatcaagtgtcaatcttgcagatttattcacaaagttattaccaacatcaatatttgaaaagacgacatataagattgaaattcaatgagtaaaagatctctacgaatgcctaaatgagggggagctaattcatatatattgcactctttttttatcaagtttttttagcaagatttttaacgagatagtctttatagacatctaatagagagtgttatgaaatattatacatggatgtctaaatcaccaaattacttatcgccattagtgcttgattatattttcctttagtacattgatttagttttctattcttttagttatatttttgtataaatagcagttcaccccattagaataaatcattgagaaaatttttcattcattctctaattctcttattctctttctcttgtttttctctctattctatattattttataacattattataattatacttattttcttgtattttttatgactattgatttattttttatgaaatatttttataaatgaattaaagttcattcatgaagaaaaaaataaacatattgagatgattattaataaaacatgtgaagaattatatgaaattaatattaaaaaaaaataaaaatctaataataagaatttaaaattattttttttgaaaaataaatttcaataaatcttgataaaagtaataattttatcaaaaatgtctaatttaatttttttctaaggttttgttcaggcttcgcctaaggccttgtatgagacaaccctggtgattactaatttattgattgtattggcgaggtagccacccatgtggtttccatgtttattcgattctagttttaatctaaaatttatttcaaaaaagtaaaagataaaaaaaatcttgaaatttttacatgaaaaatcacttttgcacaatttattacctaaatactcctacacgtctatatctacttttttacttacaaagtttgttttattacacaaataccacttagtcatcattccatccatcatcaatcaaatcctactctcttccctctctttt

SEQ ID NO: 118727 - DNA, 755 bp, Cannabis sativa
  modified_base (676)..(684): a, c, t, g, unknown or other
ataaaaccaataaaatttaatgtatgcccaaataaaagtctaacagtgttatctatttgtttcaagtatacagttaatttattttattagtgactctttataaaagtagtatattcaattatataaatatatatttatataactatgtctccaaaaggtgaacaaatttaattcaaaaccatttcaattattaatatttttaatttcttcttaactttttaatttcttctaccttgcatattaatttctttttatattgtgtcaaaattaagagttttaattagaagataatagagcacagttatctcattttatttgaattatttagaatatcagtttttttttttttttttttagattttttgaaaattatatgaattacattcttaaataatataatgtatttttctatacatgtattatttattgttagtttatcattgttatatattattataatatattttattagtgaattagtatatatagctattataagtggtttaaaatgatcattgagagacacgagagatacaagaatatcattgaatctaatgaggatgaaggtgagtgatttattacacttgaaaatatcaatttacatattataacgagacaaagatcaagatttcctactaccaatttttcattctcttattcaaaaaaaaaaaaaaannnnnnnnnaaaaaaaaaaaaaagtatttttaaaaaaaaaaaaaaaaaaaaaaaaaaaaaaacgggtcgggcctaacccg

SEQ ID NO: 118728 - DNA, 2158 bp, Cannabis sativa
ttctcaagagaatatttgctcatgcacagaaactcatttgtctacatcttcaagcttatacaagtaggctttttcatcaacttctttaaagaaaatctttcctttggttatattatatgaataatactctcatacttgttattatttccttgcttctagcttacattcatggctctggttgctacaactcttttcttaagaactgagatgcatcgtaatacagtggatgatggttcaatttaccttggttcattgttcttcactgctgttatgattatgttcaatggaatgtcagagcttccaatgaccattgctaaacttccagtgttttacaaacaaagggacttgcaattctatcctgcttgggcatatgctcttccatcttggattctcaagatcccaataacttttctagaagtaggagtatgggtggccataacatactattccattggattagacccaaatgttggaaggtactcaagagaagaaaaaaagaaaaaactgattgaatgcttaatttttcttctcaacacttaaatcttttttggttttgtacatggtttcagattgtttcgacaatatcttgtgttgatattcattaatcagatggcctcagcgttattccgagctactgcagctaccggtaggaacatgatcatagctaacacatttgggtcatttgtgttggttatgcttgtgactttgggtggttttgttctgtctagaggtatagttgacttaaatttcaaatttcaaacactttgttttttgtaattgaaatgcatattgtttatgtgtttaaatcttattattgtatatgacaacagatgacattaagggttggtggatatggggttactggatctcacctctaatgtatggccaaactgctgttcttgttaatgagttccttgggcaaaaatggagacatgtaagtttctttcttgcgacttattggtttcaaagttttggaattttgctttgtcaaacagttgattgaattgtttgttcttaatagactggaccaaactcaacacaacctcttggaattcaagtcttggaatcaagagggttctttactagaggatattggtattggcttggtttgggagcattgattggattcattattatactgaatattttatacactttggctctcacttacctcaaccgtgagtattttattttgggatatacaaataatattaatgaaattctcaagaagattttgaactaatgccatataattcatcgtgcagcttttgagaaatcacagtctgttaaagctgaagatactgagaatgatatccaagatgggcagcaaaatagttcaaacattggtgaaaatcaagttgcaaagaaaggaatgattcttccatttgagccgcattccatttctttcgacgatgttgtttactcagtggatatgccacaggtatgcaataagcaaataatagttcttagtagttttaaaaaatgagtatgatcacaatgaataaaggcttaaattttttgaacttgaactcttgcaggaaatgaagaatcaaggtgtggttgatgataaacttgttctgctaaaaggtgttagtggtagttttaggcctggtgtgctgacagcactgatgggagttagtggagctggtaagaccactttgatggatgttcttgctggtagaaaaaccggtggatacattgagggcgatgttaggatctccggttaccctaagaaccaacaaacatttgcccgaatttctggatattgtgagcaaaatgacatccattcacctcatgttacaatttatgagtcattggtctactcagcatggcttcgtttaccagctgaagttgattctgaaaaaagaaaggtcagttccctttaatatatcaagccaagtgaaaaaacaaaaataatagaagcataacagattttaatgatcttattatgtattgtgcagatgtttattgaggaagtaatggagcttgtggaactcactccacttagacaagcactagttggattgcctggggtgaatggtctgtcaactgagcaaagaaaaaggttgacaattgcagttgagttagtggcaaatccttctataatattcatggatgaaccaacttcagggctggatgccagagctgctgctattgt

SEQ ID NO: 118729 - DNA, 1451 bp, Cannabis sativa
  modified_base (67)..(70): a, c, t, g, unknown or other
  modified_base (1139)..(1149): a, c, t, g, unknown or other
ccataaaaagattattggattattaccttattaattttttttagttcccatcaatgggtattacccnnnnagaagtgttccatatatatatgtgtatatgtattggtaaaatccaaaaatatggttgaattaatccatcaaatagtggttattatctattattgttcgatcttaatataaattattgaccaataatatttttttgcttgaaattattgaccaataattgaacaaaaaacatagtataattgaaatgtctctagctattagatattagaaatagtgttataattaacattttttagaaaaatagttttttgctaaattttgtgtaaaatttaacatatatataaatatagttttttttaggagtttttaaatgatatactgtatttttggcattttattatactatcacgcgacagatattacaaaaatattgtacggtttatactgtcttttttaaataatatgaaattttcattgtgcccataacgctacatgttattttgcatgcctttctctatttttttttattaattaatttttttaaaaaaattctaatgtgatgttcatagtcaaatcatggccgctcactttttttaaaaaaaaaagtaataaataaaataaaaaaaaacttaatatattatatttgttttgtaatcacacgtaaccccctcatttgtatttcatcatttcatattttttttatcatcacttttattcttaagctattcatttctctgtcatgttcatcttcttcttcatgttctttttttttttattacaaattcatacagttgtttggactttttagccctcatgatgtgcttcaggggtgtgcataaatcgattcgatccaatgagagccgaccgatctaattacaaccgaccgacatacatcagatattcaattgtgatcagattagattggatgttattttcaaatatgcaattggatcggatcagatggtggatggggtgtccaaaaatctaatatatccaacatccaatcaaattaattagtatttttatatattttggatgagtaattagattttatattgttatacgtaaattctatatgtatttataaaaattaacattaaaattttacttttttttcttggattggatgnnnnnnnnnnnatccaatacatactggacctaaaatattagatggatccgattcattttgaaatattagataaactcaaattaaaccaataaatatatacgaaatacatccaatggatagaaccgatccaatccaccaatccaacatccaatggatgttggatcgattggatgactaaaattaagtggatcggatcggatggtaaaatttatcatccaatatataattggatcgaatctagataggcctaaaaacattggatgtgctccaataaacacccctaaattgtgcttgatgagagagagagagagag

SEQ ID NO: 118730 - DNA, 1080 bp, Cannabis sativa
  modified_base (91)..(91): a, c, t, g, unknown or other
atgaaccaaaatatacaaatgaatgaaaaatactcctgtttctttattgatattgaataaaatggattacattaaaatggagttttatttngggcataaaacccaacacatgattactcacgattcaggccgatctactattgatcatccttatgatatgaattaggtctttatagtaaacaacatgtttgataaagaaaacataattacatatcggcccatgtcatatatagtctctattatatatacaatatcttcacttagatctcaaactacatcagtaagattgcttgcaccgagtaacggacatcagtaaactgtactaattaccattgattaaagattttataactttaatatgttgatgaatattttattcatggctaagtgatattaattctctgtacaataaaaaatacgacctcatatatgaataaggaattttttatatttatacataaattattcaatataaaatattaataatataacaatcaagcatatataaaaaaatgtttaacttttatttatatacagaaatgtctttacatgattttcacagcataaattctaacaaataaaccacattatctgtgactagttttcttagttagtatttagatgaatctctaattatgattttaattttatgatttaatggaaaatttagtttcatccaatatttttcatgtgattccaccttgtttaattgttgtcatgattatgatttatgtattgttttggtttatgtgattataattagggtagattgtataatttattacttacttacacattctttattcggcactcgggagggtatattgttctaggttcttgaaaatattagaataaactagacacactaatgattaaaatcataattatattaggatgaaatcaaaatattgacaattatttttatctaattaatattggtatgaaaagcttggtaagttaaaaaaaaaaaacgagtgacgtttaaaaaaaaagagtgggagtgtgagatgaagtatatatctattttatataaagtgtgcctatataactgaattttcggtttatgagaaatttatgggt

SEQ ID NO: 118731 - DNA, 747 bp, Cannabis sativa
tctcaagagagtggataggaagggaaatggtgggatggcggtggattcagggacgacttttacgatgttaccggcgagtttgtatgactcagtggttgccgagtttgaccggcgagtcgggcgggcccacgagcgagcggcggaggtggaggagacgacggggctttcgccgtgttattattatgatgagaaggtgtttgaggttccggtggtggcattgcattttgttgggaacaacaataatagtaaattgaaatctagtgttgtgttgcctaagagaaactatttgtatgagtttttggacggtggtgatgagggtttgagaaagaagaggagagttgggtgtttgatgttgatgaacggtggagatgagaaggagcttagaggtgggcctgctgcgacacttggcaactatcaacagcaagggttcgaggttgtctatgatttggacaatcgtagggtcggatttgctccgaggcaatgctccttactttgggaacgtttgagcaaaagtaatcgataatttttcgattaaacttacatttcgagtcacgtggcagaatgagattggtcaaaactgttataaaattattgtttgattgatttataatagtttcttcgatcagtctcatcttttattataggacttgaaatgtaagtggagggactcgaaatataaggggagggaatgtatagttgttttttttttttttaagaacaatgtcactgttagagatattattacaa

SEQ ID NO: 118732 - DNA, 1252 bp, Cannabis sativa
tttcattttgtgattaaaaaattgaaaaacaaaagtgttaccaaacagcaccttaaagtattgaaaatagagttattgacattcaagtttacgatgagtgttgaaaaaaaaacttaaaatctattttcgacactatagactacttgaattttttcaaaaatttacagaaataatattgcacctataatgaactgttatggaaaaaacaaatttgaaaaaatattcacagtcctcaaccccttttatgttcattatctacaccttactatattgcccaaaatcatcaagtactttatcattacatacgaactacgaacgaaaatactgaaacaaacccatcaaaggtgggataagtacctgcaatttgtcgaggtactgaggttgacccttgcctcgtttaatggtcccagtgagctccaaaagcctgtcagcgagcgtagacttgccatgatcgatgtgggcaataatagaaaagttcctaaccctttcaagagggtactggttcaaatctatcacattttctgtgctgttttggcgagaattagaacaaaatgtttgactcaatccaacacggtggtgagaattcaatcttccgagaaatgggttacctccaaataatgaggaattgtgcaaaagagacaagtacttagatgatttcagagactttgaagctcttctgaaagaacccatttggggtttaacgagctgtgggacagaagaaactcccagcggcgaggaagccgaacgcagaagtttgtacttgcttttaccgaatcacgctgatttcagctcttgcgaaattacgggcctggggtgaatcttattgggccacaggcccagggtctgaaaatgccgggcccatacaaaaatctgaagaaatttacacaaaactgagttttgtagaaggaaaataacattatttttatactattgcaacattataaaatataacgtgaaaacaatatcttttataaaacaacttaaaaacaacagtcaataaaaaatataaaaaagtttaaaaaaatattccataaattttctttcaggttgattgtaggtattttgaaaataatctcaaaatcttgagttggagtatcttaaacccaagatgaaatcaaactaagtactagtttcctataacatttctcaaatcaaatgtgctaattacaaaagaaaaatgaataattacataagacactattttttgtaaaatatttacatttttacgttcaaataattttttttttatatt

SEQ ID NO: 118733 - DNA, 782 bp, Cannabis sativa
attatattggttagacataatatgggatataatatttggacaggtgatcttgattcttgagattgaattgtaaacatactaatataataaagacttaaagcgtgtgatcagtcccaagttaagggaaaagcctatatatatgggggttgcttattctgagggtaaacggcggagtctcttgcctgcttcttctacagccatgttaatttcattcttaacttatgtgtattgttacacactgaacatataatatggaatattagagaaagaaaaaaaaaaacctttatagtgttacaaaatctctgtacaactgttcaaatgcagcatggaaaagcacactcgttatgatttgaggtataaaaattgtgaagcaaaagttggatcagccatttgaggtatagaaaagcactcgttatgatttgggttttcaatatgaataaaatattaagtaaatattatattaaaatattatttgaagaatgaatagtgcttagagaaagcacaggattctttaaaaaattgaggtaaaataactcatggagctacttttttgtcattttttcatatttctcttctctattttgaaaaatatagcattatagctcatctaatgtgagtgctattaggttttgttttggactttacatttaagtgtacacattacatatttttattagtctacccaatttttaattatttaaatattataaaataatttaaaattataaataataaataaaatagtttttttttcatttttacacttcaaaaatagttttttt

SEQ ID NO: 118734 - DNA, 1767 bp, Cannabis sativa
  modified_base (1712)..(1742): a, c, t, g, unknown or other
gtaattaattattttataataaattattagaaataatattaaaaaataattttataaatatcctatcattttaggtagacataatattaaaagaaatttaatttagagagctctatttcttatatccatattataatgcatacaaatatatttttatatatttatatatatatatatggaaataagtgttttgtaatattaattcaactaagataatacaaacttaaaactaagttatttaaattttttttttctaatattaaatagtaaaaaaaaattataacataattataaagtaggatacatatttttcttttgaatatttttgtggagtttcttcaaatttattttctttttcttttttttttttttgaaaaattattcaaattatagtaaatatttctaatggcttccttagttgtatttcattatattttatatagttttctaataatgtagaactaatttggtacaatttgaaagttcttgcaaaaaatatatgtataaaatttcaattaattttagctaattaaataaatatttgtaagacaactatacattcttatcataaactatatcaataaattattttttaaaaaaaataaagagagtgcaactgaagatgcacatttacaatgctatacaatcttctgataaatattgaataatttcttatactaaaatataaattaattttatatatttataaaataactatcactaattaaaatattaatgtaatttttttttatttttaggtgcactacaaaattcttctatatataattagggtctatgtaggtgcaccacataattttccaatatatataattggattttatgtatatatttatacagagtgatatatagggtataatggtcaaaaaataagtgcactcccgtctctattatatttatatagttacggttttatttttatgaattttgatttatattgtatactcatttaaaatattaagtaactagttttttaaaaagaaatttagagtaatttatattttaataataatatttaaataacttgttttacaagaatattaaaaacaagtatgactgcaacaatactatattttaatgctaaaattattcaaaatgaaatatatatatatatataagctaataattaatatgtgaattatcttataaaaataatagaataataattatttatctgctgaaaatacaatacagatgtatattgtagtattattttttaaggttcattcttaatttttttatatttatatatttttttgagtagagatagtcttcaccttacaaatagtttacagtaaaagttaatacttaattataataatagcgatataatatcttatagttgtgttgagtatgagtaatattttttctcaatatttatatataaagtcatggatattttgctccacgtgcgtagcacgtataaagattcactagtagaaactagaagttagaatgtgacgattgacagtagcttaatagatttaaatgtatcctaattctatgttgaaaatgtatgagataagattggtaactatgtggatactattagggtttatgtttgttgacgcagaaatcttgacacagatatttgaccacacccgtttactatattagtgagaataaattgaatgttaagtataagtaagagagatacaacaaatttatagttgttcatgttggaaattattttnnnnnnnnnnnnnnnnnnnnnnnnnnnnnnnttattaacatcctaaataagaactt

SEQ ID NO: 118735 - DNA, 1458 bp, Cannabis sativa
caggacctccaatacacacgcacctcctatggtcacttgaactagcctcaagtggttaaagttaatgaaattgaaatagtttacttgtttagtatatatatataaaagtagaaaattaatcaaagaatatgcaaattgtaccttaaaagtttcaagatggtgaatttctcctttagatcttgttataatctcctaaaattcacttttattgtttttatctgtaatcatgaagaagaaatattatattagaaaatgatcaatatatcaatataatatatatatatatataatgatgacagaaaagtagtaaaaaattgataattttcttacattcaagaatttcatcatttttcttattaaaatactcaaaagaggtacaaaaacaaaacaacatgaaacatgggaaaaatattattttcagcatcacattatcactttttcatttattttttttctcaattattgatcaaacataaatgtattaataatgatcaacaaaaagacattattaattagtacattattttcaattacatgtcaattcttatttctttgcagacatttcttacaaatactcatctaacataataatattacacaaaaaagaaaaaaaattaggaagaaagcaaaaaacttgctaagcaaaattacaaaagaaattaaggaaaagcatagaaactcaaaagaaaataataaaaatactttatttatagatgaagagaagtatcaatttctgaattttcaaaactttttgatgaagatgagctagcattactttggatgatgatgatgatgatttggtatttggccatagacttgtaaaggcacaaatatcatcatcattataagattgcttggaatgcaagtcaagtccaagtgagagtgattgatgattatgatgatcaagatgagaagatgatgatgatgatgatgatcttttttcattagttgactcaatcaacttcttcttcttctttaattgttctttctcttctcttctctccttcactttttgcaattgtctaaacctttcttgtaatagaacaattgaggagctaatgactttggtgttggcatcactactactactactacttctactattgctatgccttcccatttttgtgattgaaatcgaaattgaattcgaagaagtgattcgggttgtatttttttcttgatggggttgtttttgaagggccaaaaatgaaaattgatctacataatatatagagaagagaaagaaagatgtttaattgtgttgtaatatgacttttggtgtgttgtaaatgatttttttgggggtgtgatgatgtattcatcatgcttgagaatcagcttcttggtaacaaaatccaaagggaaagagtctaagtggtggatgagtgaggaaaatgacttccattttttttttcttttaatttctttttcatattttggagagagagagagagagag

SEQ ID NO: 118736 - DNA, 1412 bp, Cannabis sativa
acgtttaaagaatttttttttacatttttacaattttttatagaaacaacacgaaaacagcaaaaaaaaaaaactaaataaaaataacatttaatttacatcaaaataacattttctgtaaataaaataaaaaaaaaatcataaaaaatatttaaaattccgtaaaactgtaattttgtaattttttgttatttttgtatatttgtgaaataatcactttatttatttggctaattgaaaaatatttttatattattattatttttttcgggtaaaactgaaaaaaaatcctaaaatttaaacctcttctttcccttcttactttatttgtttgtttttcttaataaaaaaaaataatatatatatatagtccctgtctttgttatagataaatatctaaattattagcctcatattttttgtgggatcatcacaaatgcacgtccaaatcttaatttattttgtgggatcatcatagtttgtggagatggccgaactcttttctgatttcttttgttcgtatttttatttattattatttttaaaattctaatgtcacattgataattactcttctctataaataatacaagggttaatataataggaattaatggtaacttggctggcaaatttaggtcaatgtcatttgtttaatcgttattagttatgattaattaatacttttattattaattaattaatacattgtcgttgtacatcatttacaaattcagatccgattcactaaaaattaaatatttgacatgtgcactagtcgtgccattaattccaagtagcactaatataatggatttgtgttataatttaacttatattaatagactattatcaaattaaaatgttctatatatatggtaatggtaatgtacacacacaacaaactcctaccaaactcggttgtcgtcacgtggtgagcatgtgttttttagttaatttgataagtgctataagaatttgaaaacaacaatgaatctcgttcttaagtagaagtacatttcctataattatatataggtcctatatatacatatttattagattttaattaagggaattattttatatattatttttttttaagacatcaatcctgttaaaatatacaaatcattcatagattaactctaaataaattacaaaatatccaacaaaaaaatatatatatatatatatatattacttttattaatcatttaaaagatagaaaaatataaaacgagtaccttaatttttttgtaagaggaaaaaaagagtgttaaaaaaataaaatataaaaatgtacacttattatatatatctatataaaaaatgtttatagtaagcaccttaattttgtctctataatatacttatttttatagctatagatatttaatgtaattataata

SEQ ID NO: 118737 - DNA, 843 bp, Cannabis sativa
ttcatatctaaaccgcaacattaattttacctatgtgcatgctcaagtacaccgtaaaaagaccggatgagatattcaactgaatgtatatacttttactgtgagaattcaattcaatgatcttaattgaataataaaccacagttattatatgcaataaaagaagaagacaggacatgatttaattcatagaaacttccaggaaagttcttaaataattttgtgaatccaagtacatagaaaagaaatacagtggaagatctagtagtaataataataataataatcataataataatagaagagttaacatctggaagccacttgagcaatggacggtgcttcattaacgaattttaaaccataatatttgactctgtaacactctgaaatacctttgctttaatttagacgagttacaaaatgtattttactccttttatttacccacccctttctttaatttctcctttttcctatttatatattcactttggccaatcattactctccaatttgctacttttcttttgttaataccgctctaattaattataattaataccacttccatgatttaaggaatggtgaaaatggtatcatttgattattaattgaagcagccacatgtacaaatactacgttgcatctatcactatttatttttcttttaaaaatttgaatcctttatctaacactggagattgtctcctctaatttgtgagattcgatctcacaaataagagtgttcatccgatccaatccccactaagtgcggatttcatattttagatccaattcaatccgcataagagtttaaattcaatccaatccaatccgcaa

SEQ ID NO: 118738 - DNA, 2827 bp, Cannabis sativa
ttaagacagcccatgtaattaaaagtattgacatttaattacatttttcacatgttattaaatagcatattataacattattttagtgttatatattataatattcaacattaatttagtgttatagttcattatgttacatttattaataacattttgaaaatataatcgtataggttttaattacattattattatattatatatgaggaaatattacattttaatattgttataatttcttaataataactattttttaatgttatcatttctcttatgttatattcatttaataacattttaaaaatgtaatcatataattttaaattatattactattatgttatatattaaaaaatattacattttaatataaaattattaaattttataatgcctccaaataatgtaattacaatttaataaaatctaatatattttgtatattatcaaaatatccaatacatgtattccaaatacaaaataacatggtcaaagctcatgtaatgtctaatgagttaaaagtctattttgtaacattgattatcaatttattatttgcaccgactcatttctcttcatcctctctccatcccgtcattatcttgatcacttatagcaaaaaaaatatatataataagtttaatttaacactgaataaattaaataataataataaagagactaaaaagaaaactaacacattctaattaacatcaacttgcactcagactgaccaacagtcaagagcataagtacattttgtacaatccacacaagaaaagtaaatatcccgaggtaacttgaaaaataatagatctcaactgcatgtgtaaagggtaaatcaaaaaacatatgtaaagtaggtaagcagaacatccatgacaagaacctatcaagggaaaaagagagcagcatacagtaatatttcgttgaatggcctgtatcatgcttgtgatgaggtctgaattatagaatgtcttttgtggtggttctatccgtgggtgtggaagattgaggctatatatacattttttcttccttctctatggttatttttagattttttttattttttttttattttggttctcctataaatacatttgacgagctcactagaaaaaaagttttgagatctgtggttcttttatgtttttctaagtagtaatatatgtttattgttttacatttgttaatttgtgttattttagtagtttttttattctgattttttaagattgggcttgcaaatatagctgtttgcatatagtattgaggatgtgcagaacattgttagttttttttaattattttttcttttctttttgtttgattcgttttagtgttgttttacagttgttttgctatgattatttatttgacgtcgatttcaatattttttctcaatctcaccggaattaatggttgttttccgattattctaattttcttgtggtggttctgtccgtgggtgtggaaaatagagacctcatttttttttggtgtttacaatataaaagaaaaaaaaataggccaagacagtataaaagttatttttgccgcgtgatagtatatttgtaaagattgagtcaaaaatcagtatttttgtaagtttcccttttagaattgccaattaatttttcatgttttggactttatttttatctctcggaactgttttattcttttcgtaattttctcaactcaaacaacaaccatataaatcttaataatattttcaacacaaaaatatattacaataattttaataaaaatatttatttaaaatctaattaatttgtaataaaaataatgtattttttttgttttttttctcaattatgtcataaatactaattattatttatataaataaagataaaattaaatctaaataaaatatcttcaacatacaaatatataacattaatttcataaaaatattatttaaaatttaatttactttgaactttacatattttggcatttaacaatgatagtatctccttaatcaatgttccatatagatgaagctcctctagatacttcaacttacaaatattggtcggaataaacacaagatttttgcatttatccaagtaaagcctttgaagaacaacaaatttctctattgatgatggtatctccttaataaatattccatctagatgaagctcctctagattctccataggctctatgattttcggaaagctttccaatcgcaaaacaatatgtaaaagataatctaataagagacttcaagtgacaaatgttgggtgaattgaacacaagatattcgcagtagtccaagtacaacgtttgaagcataggtagtttctctattgaagatggtatcttttcaatccctgttccagttaaattaatctccattggttcccgaaattcaggaaagcttttcaattgcgagcaattttcaggaaacaatttcgtaagatcaactcacaaaagttggatgagattttttcgagcctcttgcaatgcctcatgtatagaatttcaagagatggcaaattctcaaaggatgatgaatcaatttgttgtattgatgttctactcagatctaatccttttatactttccggaagctttggaaacttgtcaatggatatgcatcgatacatatctacatattccaatgactttgagttacaaatactgctcagaagattctcaagaaatttacaattataatgagttacatatctgaataacatgacctgggaagccttccgggccttgttttatgagaagtattataataagtctattcgggcggcaaaggcagaagagtttatac

SEQ ID NO: 118739 - DNA, 1517 bp, Cannabis sativa
atgtgcacttaaatgatattcacattataaatttatatgtaatacactaataaactaaacttgatatggtgggcaagaaagccattgataggagggtaagggattaaggagcaaaagtgaagcacggtgtttattttgtgggaatgatttaaggagaaacgggattgggtaatggatttaaaaccttatttggatattccaaatcactctataattggatagattctcttcttcctctcatactaagcacaacagagaagattaatctgcttactctcccactctccttccctaagttatgtacctctccttccttcccaccaaacatagcctacaaaaaaatttcccaagcatattatggtcctgcaaaacatttcagctgcagataatctctaataacatttataaacatttcaattcgaatattaaaagaaaaatactatatcctgtttaaatttggctacatgaccattaaagcaggttgacccgcatcactgaattatgataatctaaatgtacagataacatgaactaagttgtgcaatacctgcctcctctttctatttcacgaaattggtcttaaattcgaatcaatagttttcatatcagagttcctaaaccactcgcagttatgttgaataaaagtaaagggaatgcacgtttttgcctacagaaagttaaaaaatgtaaaatttcttaacctcgtttccattcttttgcaaaatatctaagcaaaagcgaaaagcaatcaactttctttttgctaagaaaccgaacatcaataaaaacccacgaagaaccccaaatatttaagcaaaaccctaaattcgaattaccccccgaaaccctaatccattcacagaaaaccaaagggctaaattaaaatcatcaacaaaacctaattctccccaaatacactcgatacaccaagataacactctactacatttaacataaataacccaaggaccgaaatcaagcccaaaaaataacaaaataataaaattaacccgtaaacgaggaagaccccaattccttcacttgcctgtaattgtaatggaagaggaaagaatagagaataagttaagcattgaaactgaccagtaccactgctgtcggagttatgatagttcatttgcaattcaaacgacaataaagcttaaacgacaacaagtcgaattgcgaatccacggctctgatgcggaggaacgagagtcgttaattaactttattaagaaagagaaaagaggtgtactccaccacagaaacctctctaatttttcttcttcttttttcaattctggcaccgtatctataacgacaactaacccagcttctatatatatatatttcttttctatcttataaataacgacagctagttgtaccctcaaaataaaattaaagaaaggaaatctatatcaatcaaaataatataaaatataaatactatatggtctttctaaagtgcctgtttgtttttacttcatctatctatttaagttattctcatccat

SEQ ID NO: 118740 - DNA, 1151 bp, Cannabis sativa
  modified_base (30)..(53): a, c, t, g, unknown or other
tccattattaaataaattcacaaataatannnnnnnnnnnnnnnnnnnnnnnnattgcctttactaatccaaattattagagcgatcattacagtgcagattaaattggatccaaaagttatttataatttttttcccccagaactaccccatgaactttttagctcattaaaaatggtccctcaactcttcacaatgttgcaaattggtacttttcaagtttggtcacacatggcaaataaaatgatgacatgactgcttagccagttgccacgtcagtgccatgtcaacgccaatgtgtaattaatttaaaaaatataatttaattttataattagttttacgtaattttcttaatcattaattatttttttaaaaatgtatattttttattttttaatgttaaattatacctatagcgttgatgtggcaattggctaagcagccatatcatcattttatttgccacgtgtgaaaaacttgacaaaaggaccaatttataatattatgaataatttagagaccatttataacagactaaaaagttcagggggcacaatattatatatgccatagttcaaggggtaaaaattctaaataatcagatccaaaatatgaaatctgagtttagtatagatcgaatgtactatgagcaaaataatacgtattagattgtataaatactcctagctaaaaagcattaacaatgcttagcattatttaaggtgttatattgtataattatgtatagaatctgcgtaatttaatttaaatagtatcatagaatatggataaccaacaagatggggtgtttggcgcttaagtaatgctcagaatataatctaggattgggcatctcattcaatttaatattttttacctcatccgatccaatccaattattaaagaattttcatccaatctaatctaattatgccttaaaatttattccaatctaatccaattactaattggagttgatcgattttttaattggatatataattatacacctaattttttatattgacataaaaatatgatgaaaaatacataaaaattaaatatcactatacatttaagtttaatactttataaaaatatgggatattggcggctaaaccacttgaactttacggtttgtaacactt

SEQ ID NO: 118741 - DNA, 1027 bp, Cannabis sativa
atactgcatgttcatattttaaaatgactttatataacagtaaatacataatacaaaaaaagttaaaataacaattataaaacacataaaaatttcatatttagtaatcaattctataatcgataacgataaaactaactataaataattacataataccaaaattgttaatagaaacaatcctaaaacttatattccacgtatcattaaaactaactatagattaattaaataatacataagagttaataacaataatcataaaatttatatcccatgtatcataataataagtgataaccttgtactcaatcaataatcaaaagcttgactgcattaatctcttcgttactgtagggagcgtcgagtcgaggtatgcaacactttgagtatcgacatggatcaaaactgttatcaagtgtttactacacataataaaaaatattagtttaatcaactcactaatcgatctattcataaatgcttatatacatataataagaaaggagatatggatttttaatttttttaccactatatagtaaagtaccgcgaatatttatgaatttatacttttagatcaataaaaaaaggacaaaagagcattcatttcaagaaaaaaaaaaaagaaaggcgtatgtatatttctaagaaataaaacctaaatcgactaattctacatacatatggtttagatttttttcttcgcaacaattgtgtttttaataaaaaaatttcaaatgttcacttcacatactataaaataatctcatatatttgcaatgaaacaaaaactgaagtcattccaagtttgaattatactatacaaagatgtaaactttgatattttaaaacaaaatctaacatacgtaatctgtactctacaaaagcctagctccattttcaaaagtattattaaactagacatttggtagtgaaacttataaacaatattgcaatgacagctaccccaaacatcatccaaaataatattgataattacttgtgtcagctcagtaataatatt

SEQ ID NO: 118742 - DNA, 523 bp, Cannabis sativa
aactaataaatctccttttagttagttaaaattttaaattattttagtttgtctattaaatatatttttttttaacattttttttataattcttagctaaaattttaccttcatattttacattagttaggagtgctcctatatattttaatttaataattattttaaaaaatcaattgtttattaaagagcattaggcatcttaaggtactcaacactatactaatgtgacaccttgtaagtagttaacaattttttatattatttatataataaaaatgtgtggaactcgatattaaattacacgaataaaagtatgtcacatcttgttatgtttgaccttaagttacctatagcatttctcgtcattaaagtatcacttggaaccaaatgcactttcacttagggggcgtttggtatgaggtattcaaaataatttgattatagggaatattatgaaggagaatatgattatagagaaatgtgtaaactgtgttttgttgtgtagggtaatatgtaatca

SEQ ID NO: 118743 - DNA, 1137 bp, Cannabis sativa
agttctcggggcttatcaattggttttgctacgttcttctcaatcgacgacactagcttttgcttcttcgccgactccgacaacacctccaactgctggtttttccccagcgacgccaccaatggagccttggtctcgacggattccatcaacgaatgcacacccagatctcgtgaccagagtcctcttcggttctccttctccggcaatgttgcaagctgtgggttcttctccgttgaaaatttcatttcagagtcttggtcactaaatactgaatttgtttgctgatctactgagatctcaacttttttccgtgagagttcctcaacaacaatcgatggttctgcttgaacagatctcacatcatttgtaacctcaatatccatggaactctccgattttagaacctccacatcagcaacattcatcacttccaacacacgtgaattccactccgtcgctccgggaaacggtggtgctactccctgaaggcgttggctataagtttgagaaccagtgacagtttctctgaagctgtcgagtctagcaaaggctcgtttgtgttctctgattgccatttccgtctcttcatcaccttcaatatccatctctagtgttgaaggagatccagaagttaagttcagcacattgcgactccagattccctcttggttgcgaacccatactgattgcacagcttggtggatccactcattgagattgttatccttcggtattgttgcgacatgacttcggagaccgcgagcgaggcggagtaaccttacttgaccaagaattacttgatccaacagcgaagcaaggtcctccagtgtattaaattcagtaggataataataagactccgatttccattgttcctctaatttctccattcttattatcggcatccaaagaatcggtgctctgataccaattgataagtcccgagaactacacactcaagaacacaataaaacagtagcaaaacagtaacaaaacagtaggaattgtaggaattgtatattaaatgtattgagaaacccaattataaaagataggagcccttaggcccctttggtgcaaatagagatttactcaaaacattgcatacccccaatcctcctaagtattctatat

SEQ ID NO: 118744 - DNA, 2960 bp, Cannabis sativa
  modified_base (1980)..(1982): a, c, t, g, unknown or other
tttcaaaattttattaaacaatttatatatatatatatatatatatatcaatattttagactcccaccccaacctagaccttgaaacctgtatttggaccccaacccgacttaaataaaatcaataaatgaaaatgaaatttacaaaacacacttttgttttttatttttaaaattgaaaaataaaagtggttataaaacacatttttattttttaaaaacaaatttttaaaaataaaaattttacttttatttttcttattaaaaaatttagaaataaaagtgttaccaaatatcacctaaaaaaagactaattattttcttaaaagtatttctatacttcaaccaacacaatttaaattttatttaattaataattaaagaacaaaatattacttaaatatttataaccataaaccgtttatcttagcaaccttagttttttcatatatttttttaaaacacgattccaataatttggtacattttcaaattttaatatatttattgtgctttggtatttaattttaattaaaaaaagtaatttatttatttaattttctattttagttgtatatgctttgaaatttatttgagatccggaatctattgattaattcatgtgctaaagtattttggaatacacaagtgatgaatttataacaaaatgattaattgtaaaaagtgagtagttaataactaattaacttatctaatttatgtacagagcaaacttattagtaaggttatttgcaactaaaagtagatttgacgaccataattgaaatacggtaatgacaacgaatttaaatgttgtagccaatataaactagtgaaatatggtgataataacaattttgaaattatatcataaattttctatagatttattaatagtttttttttcaagattttattttgtacgagcatatgaatttatttttctaagtaaaaaatattgtaaaatagttaattttactaataaaaaaatatatcaaaaatattaaaatattaaaatttaatttattttatgatataattatcgctaaataaaaatataaccgcacgcgaataatgatttgtttgctaattactaataatttaaatcttaagttcgaatccatctctttccccgtccctcttaagctagcctcattggctctatgagactatgagcatggcttatactgttaggtattttctttgttaaattttgaacagttttgcagaagggtcttttcttttctctatatgtctagtaaccatctctcgaacttgaagcaacgttgggccaattgggattggtgggttgttgacacgtggtgtgatgggtaattttcattttctaaaatatacaattttttatttgtgtgttttgatcatcaaaattaggttggatgttgataagctaaatcatagcaaataattcaaacttttaaagtgttgggtttgcttgtggaacaatatatggttttgcaagttttcgtagtagctagctgtcttttatgaatgtcatcaattctagtggaggaggagacaaaataagctacattaatttagcgttttggtttaacccatttcaattgtatcgtaaacacaattgattttgtgagcatattttaaatctatattgttattgatatttttttcttttctctacctccacatattttatattacatgtgattatatatgatattttttttttaaatattacaatttaaatttaaagtatttttttagcattgtaatttatatttattgtgtctaacaatatatttctattattgttttttaaaaaaatatatatttttattattagtttttaacaataaaacaaaaaaaaaaaatatgacatttaaaaaaaaaataaaaggtattaccgttaatatctaccgagagataactctataatagagtttcagtaattagataaatgatatctatagtatgattttatcaaataataataataataatnnnaataataataataataaacttgtctgtatttgtcacattgcttactaatgtgttttggtaattggataaatatttggtgtgatttttttttaaaaaataattaatgagataaaaaacttgtgtgttttttgtaattttaagtattataattacactaaaattataacacatttttttgaatattaattattatattttttataaataacatttaaattaaatatctttttataaaaaatatattgtttattgaacaatgaaaaaagttaattacacaattataaatataaataattaaaataaaaattaaaaatataattaaatattagcacatggcacttagtattcatataaataaatataaattgtttgggcttgcaagtctattcaagaatgtcatctgtcattggagtgaaaagctttcttgaatcttaaggattggaacttaatgcattaatttaatattttttcaaagatttatgacactataaactatatcatccgcaaagatacaaacgtccaactgtatcattggttgcgtttttggatacatataaaaatcataaataaaactagctagttactgttagtgttaggaccatttctttttttttttttttggttttggctttcttccatatcttgtctcccatattaaacttgctcttctatctttctaaccaaaattggtaactagctatattgggaagaaaagccagctttcttcttcatcaatatctcacattgacttttcctttttaatttttcaatcctaaatcctaatcccttcgctttaactgtaactactaaccccgatatctcgacttctattttactggtgaatctattgtatataaaatatgactataacataatttttagtttaactatatctttttagttttttacgttaattttaatagaatattctttattaattttataatatcattatatataaatttaaaaataaaaatt

SEQ ID NO: 118745 - DNA, 991 bp, Cannabis sativa
  modified_base (675)..(683): a, c, t, g, unknown or other
  modified_base (960)..(965): a, c, t, g, unknown or other
tgagatggggtatataagtgtggatgaataattttattaatatatatgtgtgcatggaagaaacgaatcgttttggttgaccattttatgaatagtagtaattattgactcttttaatatatataagatatgtaagatgtaagatttttgttgcatttgatagttgtaagcgttaaatgacaagtcatatataatagactcacgtaattggtctacgtgtcatacacgtatattattattgatgacgtgtattattttgatgatatgtattatttaaaaaaattgagcaatttaatttattacataaataaaattaaaattaaaataaataagtaaataattagaaaccaaaactaaatataatcatctgaataaaagaaaggaaaaaaacctaatattccatcttctcctatcccaaaacttgcaaccttcgaacactattgctaactaagaactagaagcatttcacatttcatctccaacccaattcttgcaatggaagcatttcgagctccatttaaagttgtaaaaatgtcgattcgtcgtcctcctgatagagaggagcttgaatatatttgtcgtcctccattacgatagttgatttgaactttaaattcaatatatatatatatatatatatttttctcattattacaattaactaaaatataacannnnnnnnnaaaaataaaaaaaaaaaatattagtggtcgatttggattgattaacccgaccaaactgaccaattttattgggcaggttactattttctttttttataattgggcaggttgcacttatatttttataacccgatctttatattgaggtgaataaaatatagcataaatccaccaaacaagctgacgtacactcttactgggccccatctccagtttggactggaccttcgtataccgaaaggcctaggccgggtacagggccggccctaggcatagnnnnnntaggcccgtgcctagggcccacactt

SEQ ID NO: 118746 - DNA, 626 bp, Cannabis sativa
tctctctctctctctctcgtgccttcaagaaaccaactagggttgagaagttttctgtgtaattcaagttttccagcaaatttctaagtgttccaacccaagtaacctctctagctctttgttctatggatttcttaagctttaagttaaggttttgcttgatttttgtaagtttaagtgttgtagcttctagggttgcttgtttttgctttctggagttagattaaggttgtttatgttgatttgagttggttttatggttgcttgtgttgtttgagcaaggtttgagttttaaaactcaagctttgctctctattggtgttttgtgattttgagcatgctaggttgttttattgccttgtttatgttctttggggtatattgagcaagtctggaaggtttggttaagtttggggttgatttgagagagtagtgaaattttgaagttttcctccactgaaccggtcgaccgattcaggggggcctataggaaccgaaattacggttggtccccagaaaaccccactgaactggaattctggttggagaaccggtctaccggttggggcagttttgggaaccctagtttttctcgtttttgtaatatttagggtattgtcatgtta

SEQ ID NO: 118747 - DNA, 652 bp, Cannabis sativa
tcatttatcgcttataaaatagactcgttgtcgttggctataagcgaggtcaacattttggtttaaatattaaaaattatattttatttagatatttaaggattgaaattcaaaaaaaaaattgaattggtggaaaaatcacataaatttagatttttcggtgaaaatacccaactgcccacaaagaggctgctagcagccctctacacgcacggagcaaggagtttgtagggtcccattgtcaagaaacctcggcgcctgcagggtgttcgtgggcgagatgtagcatcctggcagaggggtcatgtccgaagtggtgtgcacgccaagctttagacaagaaattgtttgagatccgcgcgcgtcccaacatcttgttcgagtgtgtgtgcatgcaatgcaccccctctcgacatgatatgcactcgaaacttcaaaacaccatatatcctttaatttttaacggaatcgatttctgtaaaaaccaaaattgcttattcaaggaatccaaataaatttttttttagaaagaaaataaaattattttttatggaataatttgtaattcacaaatattcatcaattcacacataaactaatatgaacacatccaagtcaacaaattcatcattttaaattcatatttcatgaa

SEQ ID NO: 118748 - DNA, 2030 bp, Cannabis sativa
  modified_base (316)..(327): a, c, t, g, unknown or other
  modified_base (547)..(568): a, c, t, g, unknown or other
ttttgagaaaataagatgggaaaatgagaaaaaggcaaaattgcaaagtggggcccaataccaatccatgggcggccactttgtatggcttttacaactttattttttccattattttaatgctaattaaatataacctaaccctaagtggtttcttataaataggcaatgatggcttaagggaaaagaggatgcatctcattccttcagttaaaatttgagcctctcttcctatacctagccgaaaccactctctctctctctcttcctctcttctaaatcgtagcccatagttaaagagtgagtgcccacacannnnnnnnnnnnctcaatcatagtgtgtaaggctgaagaatccagtttcaagagaaggagattcggactcaaatcttcgtgatcctctgcttcagaaaggatacaagggttagagatctgattggaaggagacattatattgcgctgcaaccactgtaaggtttctaatactttatatgtgtttattacatttcgttttagaagttgatatttaggatgttaataacatacnnnnnnnnnnnnnnnnnnnnnngtaaaataattccaacaataggctgcatttttcaaatgaccctgatcttacttttcctccagaaaatcgagttgatgcaaatcattttttgtaatgctgttgatattgaagacgtctcttctcaaagatcctgctccaactttgactggtaccatggcttcgcacccataaaaaagtgagaatggggtttcaccagtcgttgagcgaggagttgtattatatgaccatataacttgtggaagtttctctggccacgtacctttcttttcttcaagctaaccttttatggtatgcttgatgattttgttgacttcttcagtttgtccattactctgaggatatgcgactgctgaaaaagctttttgaatccccaagtcatgacacagttgtcgcatctccttaagatcaaattgcttaccattttcagaaattagtttataagggatgccaaacctgcagatgatagcactatagaaaaactcgtgtaacttataggtcgttatggttgcaagaggcttagcttcaacccattttgtgaaatagtccacagcgactccagcatactttactcctccttttccttttggcaattcaccaattaaatctatggcccaaaccgcaaatggccaaggactagtgatagagtttaattagctaggtggcctatttacataagtcgctattcgctggcacttgtctcatttcttggcgaagctaattgcgtctcctcgcaatgtcggccaataataaccttgcctcataatttttaaagtaagaaattaccttcggcgtggttgccgcaaatcccaccatgtacttcttgaagtatatagtcgcattcatttttgtcgatgcacttaagcaacggctgactaaaacttttgcgatagagcttgtcatcataaatgacatatcgggcggctcgatatcacagtttttttagtttctatcttatcctcaaggagcactcctgttgttaagtagttaacgattagggtcatccaggtgaccttcttgatcgtatcgacctccatcatctcatctcgatgaatagtcagatgggttaagacatcaacaagaattacattgagtaattctgcttctgttgttaaggccaatcgggccaaagcataatagtaggaaaggtatttgaccaaacgctctcctctggccagatattctccattgacttggcaaaccacgatttgcgagtcgctaatgcttggaggtattcaactttcatttctagagcaagctttaaccctacaattaaagcttcatattcggctttgttattcgatgcaggaaattcaaacctcaaggcagcgtgcaccttgactttgttggggcttatgtgtaacgccctaatctatagggacgccacgtgtgtgattttataaactagtttaatactaatagaataattaattattaaaaaccgtgataatattaaaaacttaac

SEQ ID NO: 118749 - DNA, 1066 bp, Cannabis sativa
ccgctaataccctatagcggccaatttgtggggtattagtggcggagtggtccgccgctaatggagttaaatgttgtagtgttttttttctcgttcaacagtctcaatttagtggtaataattcccaaggtcacgatttatgtaagtctattattcgctccttctaattgatccatcaaacctaaataacatgtcatgtttcaattttttattgattcaaataataatttaattaaaaaaattaaaataatataaaaaaactaaaattttattttaaaagcattaaataacttttttttcttttctttttcctcttcgtcttcttcacacgatttccatccatgaccctcaccccaccgccatccccagccacgaccctcacccacccccattcccagtcacggtcaccatttagcatcgagtcgaagacaaccaaaaaacaaaacaaaaccctgtttgctacacccacgaaccaaatctctgataaaaacttaaatataattttttttgactcaaagcaccaccaccattttgacccaaaaaaaaaaaggaaaaatcaaatatgtgtatacacaaatgagaataactaagagagggaaccaattagatctaattggagcactaccaccaaaccttggttctctgttacacttaaaagaaaaaggacaaataaaaaattagaaaaagagatacttgaaagtggagctctttcgcagtcatccattgcccagatctctagcctccgtcgatcacaaactgtcgagaaccaccagtcgtcggaggagggtagggcaccgatgtttgaaggaaaaggagagagagagagagagagagagagagagagagaggaccattgcccgactatggaggcgtttcaagttgagatctgaagctctttccaagtcacccactgcctagagtaccagcctgtcgtcgtccccatatttgttcatcccagtgtcattgatctgttcgacccaatcagtgccaagagagagagatgaaaaaatatgaaaaaagaaattacagatttgatgctgaggaagagagagagagaaagagagag

SEQ ID NO: 118750 - DNA, 1901 bp, Cannabis sativa
aggactttctaaaccatctcgaaatcgccccattccagttggttcctatttcatatagaatccttgcaagtttaaaggttcagtacaagattttaggatggtagtgccccactcccctagaaaaattatatttgtattcggtgctcgccgttcttgggaggaagaatatagcaggaagtttttattatctagggactcacataggagagcataagatcattcttgggttgccaaataaaactccttttcaagaagacttcttttttacaaccagcctctccccaatcaatacaaccacctttcgcataatacgtaagtgactatttttccttgaacttggttttaaattattccatgtttttagctttagccttaccgacttgcattctccttatttcgacaccgttctcgaaaagaccaagtcctactcccgagatggctgagcaatgcaagctcctgctgggtctcccatacgttctccgatttgctgagttcctcttgaatgaggttaacctgaggtccgtggacctcctcactaagaatgagtatactagtgattataaagatcccaagtatacatcgtggcaataggtttctgtcccagctgatgaggaaactcaggactatgtggctcgagtacactacctcaagaacacagtccctcaggaagttgaagaaggagcatcgcgaggtaatcaatgtggttcatcacccatagtgcttagggtcgagcataccactttactgtctttttgagatagccgttataatttctacatctgaaatcccctcctcatagattgcattgtacataggtttgatagttggtacctagatttccacgtccacattaattgtagtgactcctactatgggatagccaagcaatatggaaccatgctggataggttaggacttatagattcgagctgggatttagaactaattaattcatacgacatattcaggatcacaggatgtagagactttagccaatattatagtcctccttcttcgtcttcttatgattacggtaaatcctttagggggaaattatttcccaacttcccctttttcttattttctaacagatgttaacacattattttatctcgcagaaatggatctcaaagaccttcttccttcctcaagcaagaaggggaagaagagattaatcgcctcggagacatcttctgatgtcaacgtggagcctctcaaaaggcccaggaagaaaaatgccaacaagaagcgagcctcccagtccattgaccttgatgaccctgagaaccaggttcagactcatcctctggcccccacgcatactaaagagcccattcctaaggcaaatcaggttgtcgcctcatcgagccaagcaattaagattatgcccatcgagtctgggaacgctggctcaaaatatattgcgcattatgctggggcttgttagagtcatttccgatccttccttcccaacgactggacttaatcaataatggccacctggacgacgagatgcttgaaaagagtgtctcctttggcctctcggtaagcttccatactcttctcattttacttccctttttaacaacttttaaaaatatttatgcatttttttatttgtttctagcaaactttcatctccttcgtcgcccagagtcagggtttggaaaggatgaagtacctagagagcgagatctagaaggtgatttgtcaaggcgaggttgtgtccaaggaatggaatgacgctaaggaagagatcactcgcttaagcaaggaagccaaagagctaaaaagggttaacaaagatgaacttgaagctgctcagaaggaggcaaaggacaagtccgagctatgctagaaactccaagaggaactcgatgcagctaatgtagcgcctaagg

SEQ ID NO: 118751 - DNA, 820 bp, Cannabis sativa
tttcaatccaatccaattcgcgcatgtgcggatatccgtattttgcgaattggattgaattagatcatgcgaattggatcggatcggatcggatacttagtgaacatattgataaatgtaagttttttataaattataataaacaaggagatacaaacctgttactctcacattcatttttcatatacaaaaaattgtagtttgtccctgcacatgtcacatcctcacatgacaagtcacattaacctatctaccacccctattgggttggctcattgggcaagttcatttgcttatttatcattaactagatgtaattgcctcattagaaggcctaattctgtttagtttctatttggagctagctaatctagccccatttgcatagctatttgcctacaaatagagtcatacccttattgtaaaaatgattcaattttagttctaaagcaaaacattgttgaaattttgagagaccaccattgttgtaagccttaacaatacaataatagtgatttgtggactaagacttgttaacgtcccatccacgtaaagaccttggtgtttagtgtttttttaagctctctaaaatatttttttctatttaatttagttgttggaaatctcagttattgtactttcattgagagctaaaaaaaactaaatgtcacacatttttcgtatacaacaatggtgatgacaagaaccacttagaataatcaaaggcgtgtaggccaaactcaaccgaacagcgtgttgatctcagatttagccaacaaacagcagagtcttatttatgatcagaatcaccacatgtaaa

SEQ ID NO: 118752 - DNA, 1257 bp, Cannabis sativa
ctgcttcctcgaaggtctgaaagtgtagccaaattttagacaaccctcgtaaatgtaaaaaaaaaatgataaggctcagatcagagccatcaacagttcaagtaggaatgtgtttgcgactagaagtccccaagacatgttacagtttgtttaattgaagagaaatgatgaagctagattataattgaaatgtaaaacttttgtggccatacaagaaaaagcatatttgtaatacattaagtccttatactaatgataaatttctgcaattgttcacaatcttgtactaatgtcattcagtcaggaagagagacgcagaaaaattcaggtggattgacaacaaagttgaagtacaaatatacatacattgtgataactacttggttgccaaaatgaaataagaatatcatgtcgctacatatccagagtgctaaccactttggtttgtcccgtattagatggaggaactcaccttgtcaataatactctcaataacatcatctgacagattcatgccagattcagcaagcgtagccactaccatttgctttacctgcacattaaatgaaacgatgaaatctaagaagagcataaatgaagatataaagaaactttaaaacttaggagtatgagtcggttaacaatgcaataaacaaaatcaagagttagaaacagtttaacccagtgaggctggaagtagttgcccacttgtactaactagttgctattttgatgtatatgtatggcctaacatatgaatgaactcctatgcgtaaaagtgacaagtagattaaacagtattcagaaataatactgaaagaaatcatgacatgatcttgcaaagttagaaaaacaaaactggccgacaaatattaagaaatatgcaagacaaagaatagtaagtacctcttgtctctcaatgaaaccctgctgtttgaggtcatacaattggaaggaaactgtaacaaagcataacctcaggcatccacataaatcaacacactagcgaatagataaacaaatatacaaatgaactacataataaaattaaagaagtcatcataaagtcttggaaaaactgctaaacttacattcaattttatcatcaattggtgcgttagggtgaaagacagagagagcacgagcaaactcatcaaaatctagtatcccattatgctttgtatcaaacaagtcaaatacctacaatttggaaaacagattggaataaatgttactatttaacaaaaaaaaaaaaaa

SEQ ID NO: 118753 - DNA, 3388 bp, Cannabis sativa
ctgcaaaaataaaagataacaagcgtaaaaatactccaaacacgattaaaacttaattaaaatatactaaacttaatcttaaaaataacctaacattccctcactagttgagataatactgtttgacgactcagttaattggttttaattaatcaattataattctaaaaaagtggtcttgacatccatttgccatatctcataatcatatgtggcatctatgaaaagaagaatgcgaatagatttaagcattgccagaggagagaaggtttcgtcatagtcaatgccttctcgctgtgtctagcctttggccacaagcctagctttaaaggtttgtaccttccctttagcatttttcttcttcatgaaaatccacttacaccctatggacgtaatatcctcaggtggagttccatattcccaaagtttgttggtgcacatggaatccatttctaaatccatgctattgttccacttgtctaaatcatggtcattcattgcttctttgtaagtcaatggatcatccttgtttgtgtcagagataagaacatgttcatagtggacaggttttctcacaatcctcccactacgacgatgtactggggttttcttttcaggaactgtggtaatctttgtcgttcgttcaagtaatggtgctaaaatcattggtacagaaatttgactatttttgattttcttgataaccacttgactacgtggcttgtgacttttcatatagtcatgttcaagaaaagtagcatttgtagatacaaatactttgttatcttgatgactatagaaatagacacctcaagtctcatctaaatatcctacaaacatacacacttcagtcttaaaagcaagtttcccatacttgggtttaagaacatgagcatgacaaccctaaatacagaaatgtttaaattgggttttgtcccattccataattctattggagtattgcttatgctctttgagagtactattttcaaaatgtaggtagcctctagaattgcatatccccaaaaattcagtggcagtgataagtaacacatcatcgatctgaccatgtctaacaaggttcggtttcttctctctacaacatcgtcgtgctgaggtgttccaagtgttgtaagttgggataagatatccttttccaataaatagtctatgcatttagaatccaaatacttaccaccacgatctgattgaagtgtctttaatgatttacctagttactttttagccatagccttgattgaactttccaaaagtttcagacttcttggccatcaggtaactatgatcgtatctagaataatcatcaataaagtgacaaagtattcataacctcctcgaacttgaatattgataggtccgcacacatcagtgtgtattagctcaagtagttctttggctctattgcttttttgcagaaaaagttttttttgccatcttgccttctacacaagattcacatactggaagagttctaacctttagttctcccaaaggaccatcctttgttaacgagtttattctgtctagaccaatatggcctaaacatagatgtcatagatatgtttcatcatcatcagaaaccttttacttcttatttgattcaggcaatgctactctacataattcattatttaaaattaatttctcacttggcttgagcacataaagtctgttactttatttttctaaacaaatttggcattcaaaacttggaaataataatatcatttttaataaacttaaacggactttgccaacacacttgacagatacttatgctccattgcccactctaatggccacctttctataggctagtttctttgacaaatcaagtatttactttgaaggacaaatattattagtggctctaaatcaacaatccataaggattcatcatcttccactaaatagcttgaagaacaaataaatcgaattttactttcttaagctcggagagatacttgttacagtttctcttccactgctccatcacgccacaatgaaaacacttgcctttcgcctttcttttcattggacttagggttggctttgttcttcttagctttaggtgccttcttgcctttcaccttgagctttccactgttgtcctcatagtcccatttccttttcttattcgaataagaaggaaagttggactttgcttcaacttgtttgaatcacctttcttggacttatccttgttaaggttttcaaacatattcaactcgtttagcagttgattcatattgaactatatcttgttcatcacacagtttgtagtgaacactttgaagcaatgagtaagcgacttaggtataatacatacttgagtcctcttgtctacaatagatatgtgtcttcgcctcatgtatttgcttgcaatacatgagtttctacatagacactacttagtaagaaaaaatttcgtggttttcacaaactaacatcacattcagattagatttccacttaaggaaatattcaccattcaatttttcaatcgctagtaaagcaataagagaattcggcataatagatattttgaaataaataaagtaacataatgattatgcatgaataataaataatattttagaattattgtaaacatgatgcatgagcgcatgcaagtaaaattaatacataaaatcttgtgttattctacgataaaactctttgacaattgattattgccttgagcttatcagacaattctcatctttattattttgaaacttaaatatctcatattttctttttaaaatataaagtactgctatttgaccaagttaacaactaaccactatgaagcttagttgtactttgtgagtgtaacccattattttcagatttcatgactcaacttagtgcgccgccttaagggtcgatgtcacactaaaatacatcacttcgtcttatcttagtcaagagattaaccttgagcaacagtatagacacataccttccttagggggacgaaaactaagccgtctcgaggcaagtctatactccctagtgttgaccaataatggaggtcgtaagttacattgacatgtactccttctcccactcactattttaggttaatgtgtttattttattaattctcataattaatacataataaccactttaataattatgattaatttatttataataaaagtctcaaattataaataaatttcccgttgtaatcattgaatctgaagtaactctttaattcatattctaaaaccattttaaattgataagttaattttaaattaccaagtttattctaaattaatcttagtcagtttacatgctttgtgttttcaaaaatgacaaatacataaacacataggacaatcctaatatatca

SEQ ID NO: 118754 - DNA, 4923 bp, Cannabis sativa
  modified_base (263)..(266): a, c, t, g, unknown or other
  modified_base (2582)..(2583): a, c, t, g, unknown or other
tgaatttaaagacaaagtaaactgattgttttcaaatgaacaacaatatccaaatttgtccaacaaagaaacagaaactaaattccatctaaaagatggcataacaaaagtgtcgcgtacgttgttgtagttagtgaattaggccgaaattgttcttcatttgtatttacgttctaattgatttaaatttttatattcaatgtacaaacggattgagaattaaatcaatctctgtgtaatcaaaggacacttgctttgtatannnnggagtgatccaacatgaaatgaacaagacttgcaatagtttactaagcaaactgtgatctgactgaaccactatattctctttgtgttatttatattttcaatacgtctgtgtgtccatagtttgaatactcgccattctgggtagagtaatcgtataatcttatccatatttaaatcatactattttatttggtgttctctaaattcctccaacaatatttggcgccgtctatgggaagaattttactgttgatttcggaggaaaatcataatggctggaaactagacaaatggagatagcaacacaggttctttcaatgttagaataatgaatgttccactcctaggtaatgggacaacacctgtcgacacaatcaacggaggagtgggatgtaccactgttactcccccgcaacttatttcctgagaccaccgatcatgttagagaaacttcaacgtcggcagccactgtgggacaattcccgcctatcacaccagctgtggtatctgaaggaatcattcaactgaccacggcccaatatacggccctacaagagcaaattcaggctttgtaggctgaggttaatggaagggtcaggattcgacatcctcctcgagtaccaaacacgcgttcagataatcctcaggtaataaatactaggcgacaaactaataatcgcactcacagagaatgacgaactggacaggagggactcgacttgaaccaacttacgcaaagggaacaagtcgcatgaaacgctaaccgtgaggtgccataagaagaggatcccgagcagcgcaaccctcaaagtagagcccaactgcgaaatgaggtaaatgatgttgaaacttattcttcgtcctcacaaagtcgttcttctagtgtttatattaggtctggctttgtggagacaccacgaggagggagataccatgtccacaggggtgaccttcgcgatcacctcaatgcagtttttagggcacgatctcaaatgcctcgaaatcgcaatgagcctcgtgatccccaagtgagcgatcaaggcacaaataatggtaataacccagcaaatgttatcaactcgcctaacgcaccagctgcgaataccgaggtagtgatcccaactaacataactgcgattgctactgcgctaacaagaactcaaaacaacattgtcatgtcagggggtgttgatcagagtatcctgctacgagcattgaaaataatggagcagcagagaaagcccatttacaagctccatgggacttatcctttcattgaagaagtgcgacaggctcgacttcctaagggattctggttatctgaatcgctaaaatataaagctactaataatataatagattatttagaaaaattcaatataattatggaagtagaccaggtacctcaattaacgaaatgtcacatcctggcggcaaccttggaagataacgctcatgattggtttagccagttgcttgaggagtccatatcgacttggagacttttgtagatctattcttgacgcacttccaaccaatgatgacgtacaaaccgccttatacaaccctggctaacatcaagcaagaagtcggtgagtccctacaggattattttaagcgttttaatgctgaagtaaccaaggtcgagaaggcccccgagtcttcattggtgtgtatgttaattataggtgtcttgctaagaaccgatttctggaaggagttgcaagctcgaagaccagaatcgttggtagaattcttctccatggctaagccgcataagagaatcgagaattctttgggtgaatcggaaagggtgaaggagaaacacgagtcacctataccacgatcatgctctcgaagtcctagaggaaagaaccccagaggtagaagcccgagaagatgcagcctcagaggcagcgaagtccaaagcttgccaagtccccttccaagaaggaaacatctccaaagagaaaaggaggaccacgctttgtcaattacactgaattggtggtccctcgcgatcatatttatgcgattgaagaaaaaaatagtcttcagaaagcttctcccaatcagagggaatcgtgacaaaagggatccgaagaagttttttgaagtaccataaggacatcggccataccactctagaatgctggttcttacaagatgaaatcgaagaattgatcagacaaggaaaattcagtaagtacaagaagaacaaagaaactcatccctaagcggatgagaatgacgacacaaataatgcgagtggttcacgaactcctcgcaatatcttaactattattggaggaccnnatattggtggagattccaaaaagtcgcaagagcgatatgccaaagaagcaaaagaaaaatcactcaccaatgtaaacaatctaagtgagcgacttgagaagtttttcaagaagtaatgcgatgacataaccttcatggagagtgacgccaggtgggttcatcatccacacgctgacgcactcgtgatagtcgcaaatattggagggataatgtccaccgaatttttgtggacaatgggagttcaattcatcttctcaatttccaagcgtttaagcaaatgaggttgcaggagaaggatttacgacctgtaacatcgagtatctatgggtttactggagatacaattgcactgaaaggaatgatcaagctaccaattactctgggaactgcccctgtcactgccaagtcaatggtcgattttgcagtaatcgaccagtattctgcacacaacgcagtgataggtcgccccatcttgagagatttgaagatagtaacctcaatctatcatcttaagatgaaattccccaccccgcgggtgtgggatccgtgcgaggcgtccaatcggattcaagcaagtgctacaacacggcactgaagctcgcagaaaaaggaaatcggtaaatgtgatatatttacttgaaacaccacctcctggacaggaaattcttagaattaaggagatatcgcatgttgaaaaaccaatttggatccgagaatccttgattacactaatactgcacaagctgcagaagaaataattgaggtaccaatcgatccttttgatcatgataaagttttaaaaattggttctaaactaacctttcaacagcgagaaaagcttgtcacttttctcaaacaaaatctagatattttcgcgtggaaacattcagacatggtcggaatatcaccgcaggtcatgtgtcatcgattgaacattgacccagaagtgcaaggtgttcgacaaaagccccagaaaatggacctagaggtaccaagcgcttaaaaaagaagttgatcgccttttggcatgtggcttcataagggagtcattttacccaaactggttagcgaatcccgtacttgtgccaaagtcaaatggctcatggcgcacatgcgtcgatttcatagattttaataaagcatgtcttaaggacaatttccctttaccaagcattgaccaacttgttgatgctaccgcatgtcatgagctccttagtttcatggatgcatacttgggatacaaccagattccgatgtatgaaccagaccaggagcatacttctttcattacaaatcaaggtttatactgttataaggtaatgccctttggtttgataaacgcaagagcaacgtaccagaggctagttaacatgatgttcgcagatctgatatgtgagacgatagaagtgtatgttgacgatatgctcgtaaaatctcaacatgcgaaaaaccatgtcacccaccttgaggccatgttcagaatgtgtctttagagtgggttcaggaaaattcctcggctttggagtgggttcaggaaaattcctcagctttatggtgaatcagcgaggaatcgaagccaatcttgcaaaaataaaagctttggtggagatgcgatctcccaccaaaccaaaagaagtccaaagccttacaggtaaagttgttcaactaaatcgctttatatcacgttcctctgataaagtgtaaataattttttcagattctaaagggaaataaaaagtttcagtggactgataagtgtgaagaggcttttcaagccctaaaagtgcacttggggcaaccctttatactatccaagtcgatgcttggagaagttttgtcaatttacctagcactgtccgaatacgcaattagttcagtactaattcgcaaagaccaaggtagacaacatctagtatactatgtgagcaagcgccttttggatgcaaaaacccgttatccacaaatggaatgactggcattcgcactagtactcgcttcaaggaagttgcgaccttatctttaagcacacatcattgaggttttaacaactatcccttgcgacaagttttagccaaactagaggcatcatgaagattactcaaatggtcagtagaactgagccagttcgacattaggtacaagccaagatcgacaatcaagggacaggcccttgttgatttcatactcgagtttccaaacgacgaggtagcgataattatagaagagcgggttgaccccgatgtaccaatgttaaatgccaaaatattacatattttatagtataaaaatacaaaataaaattaattctttataatattttcaagaaattaatgcaatata

SEQ ID NO: 118755 - DNA, 1118 bp, Cannabis sativa
acaacacaatctaacacaatacaatacaatacattaaaatacggcgtaccaaacgagcccttagtgatagtccaaaccacataaactacaccgcaacgcactatattttgcggtgggtgcgggggcagtttgagaaattgaacaaaccgcatgtgcgggttaatttaaaaaaatagtcaaaaaccgcaccacccgcaccgcaaacacccctacataacatcacattaatcgattattaattatataagagatatgttatattcttaggtagtgtatgtcttttagtagtttatatttatttacatattttatattaaatttataatacgtaatatatttttgagaaattattttatatattattttttaatttttttttaaatttacgttttaggttgttccgatagtttttatgtggattgctatataaattttagttgagctttaaattgtttcattaattgctataaaaatttctatatagactttcataaaaatgcaagaaaaaaaaattgttttgaagtaaaaatatataaaaaaaaatcctatagtttttattgtataattatttgccaacagtaaacatagttaatgacatgaaatccattagacatgaatctaatccaattctttgaataaaaggattttgattaaattttgtgtatctttagtggatggagtgtcctttgtaaatacaaattattacaatatttcacaatttcttttatgaatatttttttttcttttatggatatttaatcatactaaatacattattttttcaattaccaaaattcaatccttaatttaaaatttcgcaaatttttaattttcattttcaaagttattccaggatatgtattgttttttattttattatgaacttcccttccaacctttgatgttttattctcaattttctttttaattaatctcatcatcaattcacaatgttcttattcttgacaaaattatggtaataactaaaaatttataatatttatataatatatacatggttaattagcaattttttcccccgaactttaacatataccaaatcatgccccttgaacttttttggccattaaaaattccccctgaactattgagattgt

SEQ ID NO: 118756 - DNA, 747 bp, Cannabis sativa
aatctcatattaatatataatattccacattttaatcttcattatatatttgttaaataacaaatatataacaatattttggataattatactatcttaaataatcgattatttatatttttgggtaaccacttatattttaggtaactaggtaattatatttcagataataatatacttatattttgggtaactataatatcttaagtaattgattacttatattttgggtaaccaactgtttaaattagatgatgaagctcttatgataagtggatcttcacttcagaataactacaaaggcaacctaattaaattgaccaactataaggaaaaaaaatacaataataaaaacaaatattaacatgattatgtattattaagaaattaataaaagaaaaataaataagaaaaactagagagggtgaaagatcaacaaaaaaaaatgaaaaacataaagaaaagaaaaagcaaaatgaaaagaataaaaatgatgaaaacaaaaagaaaataaatgaaaattgagaaagcaaatgagaggaaaaaaaaaataacaaagcaaataaaatagaaatttttacaccaaaaatacaaaatgcattctttattactaaaataccctcacacgcttattgttacttttttactcattaagtttattttattacacttttaccacttgcacacacatttcatgcatcacacttgttgcttacacgtcaggggtctaggattgacttctatcaa

SEQ ID NO: 118757 - DNA, 3335 bp, Cannabis sativa
  modified_base (1925)..(1952): a, c, t, g, unknown or other
  modified_base (3305)..(3308): a, c, t, g, unknown or other
agatgaaaaggaaagccacgagtgcttatatcacatgacgataaggaacaaccacaatgtttatgtatctatcaaagaaaagaaaaacaccacaatgtttatgttaaagatattttataattatgctattaaatattgtcaatacttaacattttcaacatatatagtgctaaatttatgatccaatgttatattgggatcacctcttaatcttttttttctaaagatcatctctcgaaactcatctgaccttatattcctcaaaatgataggtgttggttgtaatttataaatctaggatatagattctaaactcggtagctacatgtgctaagttgttaaattagttacgacttaataaacttaacaatctactcgttatagaatctccacgtcaacttaagttatagtgctcctgaatgaagcgaacgctttcaagactataaactaaagcacacgatgaagggtcttcccagatagaaagagagacaattggagtactatccaagactccattctaggagaaaataactagccatccgcaactcctttccagaggaagactagctttcttgaacattcctagtggatggacacaaaggccttccgagaaagccctttcgagagacaactagctttctaggaagacgaaaaacctacggagaccttttcatttagaggaactataccacaaattctacctagttttttcaaattaaaatattgactaggatgaagaaagaatgcatctatcatgattggtgtttcaaatatctcagtatactaacttctaagattgatcaagcgtccaagcaatgcttgaacttatttactgttaagaccttattctcaacattaactatgattatcttctgttctgacattctttaattcaatcaatccctcctctatcttctctctaatccagtagagtcttatgtctatatgtttgctctttttatgataaatcgggttcttgcaaagatggatggatgacgggctccgagtacacattcactcctcctctcagttgtttcaatttgaacaaaattccccgaagccataacgcttccttaaatgctttcgtgataaccataaattttgctttcatggtggaaaagacaactactgactgtaactgggccttccagcatatacaattttggtttgtcatgaaaacgtaagaagtggttaattttctggtatctctattcgaggcatagttagcatccacaaaccctttcaattccaattctccttttgcttttcataggtcagactataatcccaagtgccctttaagtaccttaataatcatttgaggaccttctaatgttcaatgcttggattagacatgaatcgacttaagatccttagagcatgagctatgtttggtctggtgctcaccatcacgtacattaaacatcctaaaattactgcatagggtaaatccttcattttccctttctctttcacactatttggatactgttccttcgataaaacaaattgtccgcctaacggaaaggatctactctttgcatcttccatgttgaacgtctgaataactttcttgatgtacccagattgctttaagttgattgtcccttccttcatgttccttgaaacttcaataccaatgatcttttgaattggtccaagatccttcatctcgaattatctcttgagcttgactttgacacttttgatcacagatttgtctttgttcatgatgagtatgtcatccacatagagcaataagaacatagttgtagattactccagattcttgaaatataaacattgatcatatgcagatcgtttgagcccaatttgttacatataagtgttaacgtagattttcgttaattaaatatataacattttacgtaataaatttattatagaatttaataataataatnnnnnnnnnnnnnnnnnnnnnnnnnnnnataataataataatgataaataaatatataaactctaaatattttacgaggttttacagttaaaatttacatatttcgcgagtttttttttatttgggatatttatttgaatacacagtataaatctcaataaaggtaaataatagtattttctctcaatggttggtagttatttttattgagatctattcacttacaactgctcatgaaacgtagacatttcccacgttttatttatatgtacatgagatatttaataactacccaactgttttttgtatttatcatttaaacgactatgctgattaagaaggttgtttctcgctgaatgtgagttattcttcttatccatctttttgaaagaaaaaatactaagtataaatattcttcttctcgcaatgttcttcatattgtaaagttatttacgaagtagcgagatggataaatagtaattggattaacataaagaaattttagtaaaatttaaattaaaagatactggttaattttagaattatttgatatttaatgtgttttgattttgagcagtttttgaattaatggggtgttagtaaattgctagtagctaaagggtaatactttggttagttataataatataaataggtttttagttttgtatagtaatcttgtatgagtgattttatttttggatttcgtgttgtaatgtttcaggtggaaattgagttgtgtgtgctttttgaagatattatagttttattatctaaatttctatgagtagttttatcccatgtggttcgttataagttttcaacaatctatagtttggcaaaatatactcattagttagacaatgagctatcttggtttaaaaaagttcatacgctatatgcgatttttgtattataaataaataataaataattgtattagaatgacaaacattaaaataataagttagtttttattattgaagtgaatgataatgtacaaggaagtatattactttctcaaaataaaaactaagtaaattactttttttgtgagaagatctgcgtaaatattggataggctcctttccttttttaatttaaataacgagtcccacacccttccctactcatcataaatataattcaccatatataatagacaaaccacagagaaataatgattgtgccgtctcgattcttttaccattaattttaaatttagaattagaaccatcaataaataaatcgaacaaactacagatataattaattgcacatgtccatccattaaaaaaaattgaaattaacatactatggtgctgtttggtaagatttttgttttttaattttttaatcaaaaaatgaaagtaaaattttnnnntttaaaaaatttatttttgaaaaacaa

SEQ ID NO: 118758 - DNA, 4435 bp, Cannabis sativa
tttatttatttattttgagaaaacaaccctaaaaagcccccaactagagcaaataactctagagaaaaggaagaggggcaatcatcattcattgatcaatgacctcgttcgtaataagtagggatattaataaggttgttttttattttttaatgatagaaacgttcttaaattacatttttgagttacatacattgttgggattcgatctcatcgctcttccacttacacacttcaataccttttatatggtcacttaagctaccctaactcaagtggttggataacccgatcactaagcaatactaataattttcaaactaattggcattccattactgtcattttatatgtatatggttacaattatctacgttcccaatgtgcctatgatgtagcaccgggcggactgttagctagtgtatatcatcttacgagaatagagtatgctatagatcaaccggaagaagtatgcataaaagtatttgttccaaggcggaatcctagaattccgtctgtgttctgggtttggaaaagcgcggattttcaagaaagagaatcttatgatatgttgggaatctattatgataatcatccacgtctgaaacgtatcttaatgcccgaaagttggataggatggcctttacgtaaggattatattgcccctaatttttatgaaatacaagatgctcattgaataatcagaaactaaccttcacttttccaacaactccaactctagtctagatattcgaagagatgaagtctcattcacatagtatggataagctaaataaaacaaaaagacaattagagagattcattacgaatttcctattttgaagatcctttattggggatgaatcgagtcaataggatgaaactaaacgagttcataatgccgaactatgtaccgcgcacatcatttaggtggactccggaaagtcacataggacgaaatgaagaattagaatagtaaaaaaaaatagaaataaatgaaaggggattaaattctatttagactatttctgagatgaatcttggctattcccacccttcaactcccctagaccagacttttaagtctttcaacccaaaaatttaccttttttggtctatgaagtattaacattttcttttcgtttacatattatactttatataccatacattttatatattataaaatatactttttactcatcttttactattctaaaaaaaaggtacatctcccgatacttaagatggataaatatgtatcatgatctatactatgtatagaatctgtatgtggattcatattaattaataatttctagaatagataatcatacaaatttttcatgtgccaggaaccagatttgaactggtgacacgaggattttcagtcctctgctctaccaactgagctaccccgaccattcatgatacatcatcatcattttactagaggacttggactatgtcaattaaaaagacgaaagggggattacattgttaattattccaattgcacattgggattccttatgttcatttgtaggtctttcatatatatcacaaggcttgtgataataaaaaaaagggtcattcaggtccggttgtaaagttagaatgaacgagaaacataacaaattagaaaccactaacggaatgagaggataaataattagggaatcatttggcctttttggggatagagggacttgaaccctcacgatttttaaagtcgacggattttcctcttactataaatttcattgttgtcgatattgacatgtggaatgggactctatctttattctcgtccgatttatcaagtcttcaaaaaatctatcagattttgatggagtaaatgatttgattaatgaatattcaattcatttttcaacttagaattgattcacaacaattctttgatttttcatgaaaaatcaaagaaatccggattaacgcagccaactccatttgttagaacagcttccattgagtctctgcacctatcctattcttttttattattgctttctgaatccttgtttgttttcagaaaaccggatttggctcaggattgccctttttttgaattcctgggtttctctgaatttgaaagttatcacttggtaggtttccataccaaggctcaatccaattaagtccgtagcgtctaccaatttcgccatatcccctttttggtttgtgattcgtatctaattacgataccgttttcctttttctttcatttagattatgaaagaacgcttgaattcattagatagtggttcgtatagtgaaaactgttttcttgtctatcttctttcatctctcttgtaacctcagatttgattcaataagaaaagattctattctgtctgtatccataccacatatatacacatatatatagtatatataatactatcttatacattatattatacatataatagtattttatataagatagtattattacacctatattatacttagacacatatttcactatttctagcatttttgtcatgcaattttgaatacttgaacggtcgagtctttattcttttgttttcgtattagctcttatctttattattatgtattaataatatgtattaatattcaattattctattaagaaaattagaatttaataagttatacttaggaaaatcaactagtacaaaaaaagaagtttgaatttcaaatgtcatttgaataaaaaaaatcactatctaaatattatattagaagagttaagaatgaacagttaatagctaagatcccaggagtttactaaagtcctatgtgtattccaattatgttatgcgagcccgcttagctcagaggttagagcatcgcatttgtaatgcgatggtcatcggttcgactccgatagctggcttttctccatatctttgatttttcttttttacatactttttactttacatagttggtaatgtgaaatcaaagaaattgaaaaggcttattccccttttcaaaaaaggtactcatctattaatttaaaataataggaggagtgcgatttatgtagaccaaatcaatcaagaaaagaactttcattttttatttttatagattttctaaattctattttttaaattctatattatatatagataataatatagaatattaagttacggccgggatattgattacaattcatccaattattctttcgaattattctttgtagtacatataggtttatgaaattttataaggagtctttatgtcgcgttacagagggcctcgtttcaaaaaaatacgtcgtctgggggctttaccgggactaactagtaaaaagcctagagctgggagcgatcttcgaaaccaattacgccccggtaaaaaatctcaatatcgtattcgtttggaagaaaaacaaaaattgcgctttcattatggtcttacagaagaacaattacttaaatacgtccgtatcgccggaaaagcaaaagggtcaacaggtcaggttttactacaattacttgaaatgcggttagataacatcctttttagattaggtatggcttcgactattcctcaagcccgccaattggttaaccatagacatattttagttaataatcgtatggtagatataccaagttatcgctgcaaaccccgagatattattacagtgagagatgaacaaaaaaaatctaagtctttggttcaaaattatcttgattcatcgatccgtgaggaattgccaaaacatttgactcttaacccattccaatatcaaggatcagtcaatcaaataatagatagtaaatgggtcggtttgaaaataaatgaattgctagttgtcgaatattattctcgtcagacttaaacctaactaaactaactagggggattttcattccttgtccattactttccagtattttccatatcacagaaatttggattaggactcgagaatccatatcaacgaacggtctaactgttggtgttggaatagtggcgtccattggtatttgatttgatatattgcggtcaataacatcggtgaattgggtgaaggatacggaaagagagggattcgaaccctcggtaaacaaaagcctacatagcagttccaatgctacgccttgaaccactcggccatctctcctacataatgattatggtttataaatcgagtaaatagtgattcattcttattattgggtaggtgtatacactccatttttactataaaaagagataaactttgccaaaactttagtcgaggttgggggggatcatttttttgtgaaaaactgttcaaaacaataaataaaggtatctattcatgtctacgaaaacggcattcccgacttttttttgaatatttatatcgaattaaatcactttttatacaattttagatctttcaacaagaaacacttac

SEQ ID NO: 118759 - DNA, 955 bp, Cannabis sativa
taataataataatagaaaactttggcaaaattaatattcattttttaaaatttaatttgtattttgacaattggatttactatgtaaaattgaattaaattagagtgtatattatgaataaagattatatttgattggattatttaaatactatactgtatttagtatagtatatgactaaatctagtataaatagttttttcaatataattataatattttaacaattaatgatatcaaataatcctttatattcataaaaaaaaaataaaaaaaaataagttttactaatatttaataaaaaaatacatattgtgaaaattcgtgtacattataaaaaaatgaatggaatataatgtatatttaataaatatataatttttttaaaaaaatttgttaatagaaaataatactaaataatctttaataaaactaaataatgagaaataagtaaactaagtaatttataataaaaaaataatagtaatagaattacataaaattatgatatatatataattttatattctaaaattttcaattgatattataaaaaataacaaataaaagaataaatagaaaatattaaataaaacataaatttgacataatttataatttgaaataataaaaaaccttttttttattattttaatgtaaatacaatacatacaattttttagaaaaaatctagttattagaaaaaaaaaaaaaaaaaaaagcgccagtcacgggttaaaatagtcgcagtcaacatgaagtaaataagacattgggataagtagaaattacacaatatattggaaaattataagagtttatttttaattgcataaatagataatactaaagggttatgagttttttttttattttttttagggctattttcaaaaatatagaaaaaattattaaggttatgataaatatggcataaaaagtaaatgccactaaa

SEQ ID NO: 118760 - DNA, 2524 bp, Cannabis sativa
gtgaactccaagccaagagctcacttctttttgcacctgcttagtgaagacgcagctgtagaaaatgtgctcgtgagtttcagcctcactttcgcacaccgggcacaagatgttttgcagcggtaaaatcctactaagaaaatctcgagtaagcacttgggtgtgatgatttgccaataaacaaatctatgtttaggcagcaacaagttgtctcaaatgcctcttgagtactggactttcggcttctctacaagaaggttgtagaaaaccttcgctgtgagtttggtacctgtcaccgcaagcctcaacatagcctcatttgtaaaatcccgaagcttcaacaatttcttaaaataccagctagtatcttgagtctttgggaagctccatatgtctctacccttcaaatatatggagttgatccatttaacccataagcaatcttgtttgttagaaagagcccaatgaaattttgccatgagagccttatttcaatatttaccgctaggaagccaactccaccaagacccttagggaggcaaactttttcccaagaggcacggtgaagcctgctcctattgccattagaaccccacagaaaatctcgacaactcttatcaatggcacccgttaccttagagggaataatgaatatgctcatctagaagttccttattccaagcaagacagagtgaataaattgggccctacccgcaaaggacaagtttctactagcccaacaattaagattcttgtcgatcttgtcaagaattataccacaatcagcaaacttccatttggtaggacgaaggttgactcccaagtatttaagagggaagccaccttcttcgaacttgactagatcaagaatctgctacctagtctcattattaacccctccaaaaaagatttgagacttgtaagtattaggcgctaaacctatagctttgcaaaagcacaagaaagcttcatggataagctttaccaagctgaaattctctttgcaaaagatcacaagatcgtcagcaaaacaaaggtttgttaatcttaattgttttcacatcgggtggtaaccgaaccctttcttcccagcaaattgactacaaagtctagtgagatactaataacaacgaaaagaagaggggacataggatcaccttgacgaaggcctttcttgcctttaaagttgccttgaattctaccattcaccagtaaatgatagtgagtgccttctaaacaagtcataatccagctaataaagcgcgaggggaagcaaagagacctcaaaagctcttcaacaaattgccaatcaacggtgttgttggccttgcttaagtcaatcttcatgatacatctagctgaaatatttttccttgtgtagcctttaagaagatcttgaaaaatcatgatgttatgagcaagtaatctatttttgataaacgcaccttgattaatgactacaaaaagtactttttgcgtcggtcaacacgtccctccaaaatggttgaccgaggcaaaaagtaaggggagattttatgcttcagtgtgtgactgaagctaaaagataataattagcgtcgggtcgtaccctgaggcaaaaagtataaccgaagtaaaatgtggcaatctaaaaaattgccttttgcattttgcatcagtgcaaaattgaagccaatctcttttgcttcggttgaaaactgaggttaatatatttgctacggttgtgcaccgaagcaaatacgataatgcatttgtaaaacttaaattttacaaactgttgcttcattatttcacgtgtcgtccccccattcaaaaccctagcacacccatttcgaaacccagccgaaagtcttgagcaaatcattttcgaaatacacttatatgtgttacaacaagctatcggtctgtagtcctttgctgaagtcgggtttgtaattttagggatgagggagataactgttttattgaagtgctttgggagcctaccattagggaagaaacccaacacaacattagaaacatcatcttctatcttactccacatgtctctgtagaaacctgaaccaaatccatcaagccccgggcttttgcaggggtgaatactaaacaaagcttttttgacatctcccttattaaagggtctaatcatatggacttgttgttccaagttgagacacttttcttgtttggcactttcaagatcaatcttcgaagaaccattgctcttgcatcccataaaagtcttaaagtgcttcacaaagtgtttgacaatgcaacttccttaaagttgtccataatcttatcatctttaacaaaggtggtgattctattctccatagccatatgaaagaaattagagttttcatcattaaatttgatccactgaattttgctttgctgcctaagccacttcgagtacttgtctttgctgactaaatgtgacttttagtcacaacaaaatgctacttgtgactaaaacataatatttatttacaagttgtcacgaatttagttttagtcacaa

SEQ ID NO: 118761 - DNA, 818 bp, Cannabis sativa
tctaataggatttggattaaaggtgggttttctctaaaaaactgtctgttagtttaaagtattttctttgaataatcgcgtgccttctggattttttgggtaggaattatatgaaaatggtaggctaggttctgggtaataaatctctaggaagaaacaaactaaaaaaaggatttttctagaaaacttttacctttaatttgaaaattcccatcttctttcatctgaccttcaaatgctcgaaccttttgggaagaacacttcgaatgcctgcacatgtctaccgatttttcacttagaacatgaaaaatagcatcaatactctcgttattcctagaactttatttttacttgctttattattttcaatttatgcgtgtgaggacacttttcttgaaatttcatgcataacacgctaaaaagacaatctatctttcagatgagcaatctctcagttagccagatcttcgagtttgacaaaggagcatacgtggatgaacctcaaaaagatgatagctttattccaacatcgctgttagaagacgaggttctagtgagaccgaattcacaagcttcatgatctattggcgagatagctcacatggttaaagaactaagaatcagtagttattgaagtgcgaggaagttaatccactgtatccgctcaaggaagctttatccatccaagggctgctccagatgaggaagtcgggaaatggggcgagactttgaatttcctgctcgcggggatgaaggtgatgttggaaatattttatcaggatctagatttactaccatgtatgtttcattaacatcct

SEQ ID NO: 118762 - DNA, 1856 bp, Cannabis sativa
tcaagacttgaacattttttactataccacaatatatgaagcactcacacttttgcgacactttatttttagacacactttggaatacttagagcacgttcacgagtgcacacacaatgtagagcacatctagcaattgtgacttgcttccttcggttgcacacaccacaaaggacctaaggtccatacatatatagatggtgtttgttggtggtgaccaactaaaagtttgttagaaatttctagcaatttcattgggcttttagtctaaagctcaattgttgtagagcacttattttatctcaatattatatattttctagaatgttgaaagtagggtgttgactttcaacactcacccgcaacaccgagttttcatatttagttgttctttaagtttctgaaatcttattgtgttgagccttttagtaaataagtctgttacttgatcttacactttatttggtgcatctctagatcttcttgaagtaatttttctcttcaaaaatgataatgcacctccacatgcttcgttcgtgcatgaaacactaaattttctgccaaacaaatagcaaactgattaccacaatgaacaggcaccacataatctgtaaagtggtgtatatccttcattagttgcattaaccatgtcctttctttagccattgtcgctgctctatactctacttttgtgattgacaatgacattgttggttgtcttttgatataccaagatactactctagatccaagtttgaatacataccttgtagttgatcgtcgtatatcatgatctcaagcataatcaacatcacacttgccaatgatcttaacctcgccacctttttcttagaaaaaaacatagctaatggtatcttcgacgtacctcaacattcatcgaaccgcttccaaaagtggcttctttggatgttgcatatatccgcttactattttgactgcgtaagaaatatctagtcaagtcaatgtaaggtagattagactccccatccattaccgatacattgctccatattgcaagtccttcccaacataagcacataatttcatcttagcttccatacgtgttgagatgggcttatactcgagcattctaaaccttcctcatttttaccaaagatctcccataagtcttggcagtggagatttacattgaccatatactgcaattttaattgttaagttttttaattctactaatctcttgaaggtcacccatcatgcaagctttgtaatattaaaccacacacgaatactttaagaaactcaacaaagcattgatttggaatgaacctgatccggctttgataccatttgctgcacactacaacatgtgaaaacgtaattaatttattatcagaaaagtaattatactaagccttgaatactctttactatatcacaatacaccaagtactcacacttttattttcatactagacacctttacaacactcacactttggggatactttatttttaaaaactctttagaatacttagaacacattcactactacacaacacacctaagacttgtgacttgcttcctttggatatacaaaccataacggacctacggtccatagatatagatggtgttggttggtggtgaccaactaaaagtttgctagagattactgcgcaatttctttaggcgttttttttttttttttctaaaaccttattgctagagaacactttatttatctcaataattttagaatgttctaagtatgtattgagtttcaacaaaagtcactattataaaactttccacatatatatatcaagccaacaaacacaagtcacccacccttcatcaaacacaagtcacc

SEQ ID NO: 118763 - DNA, 899 bp, Cannabis sativa
atatggattaaatttacatcacatttaatgttaattacattttttatttactcatttgacactaattaaaagcttttttaatattttatttattcattttaataattttttatatacttttaataaaaaattaatgactatgttgactttggggtaatatacaccttgtgtattggggtataattgtaaaaattgaatcaaatataatattgaaccatgttataagctaaatttgctataaaatttgtaccatgcattagagatggtcaaacataaagatattacattgagtgaaaaaactatttccttaagggctataaaatatactattattattgttaatattacgaaaaaacaaattccaaacgtctgtaaagaatgtttcttggattcagagatattggtacttgtggaacacttgtgctattgacaagtatgtgtgggctattgccatgaaagaaaataagttgtaggtaaaggagtacataatgtatacttacgagaagatgattggtggagttccaaagctccaacaagtagttggtattgaactaagatagttcaaaccaaggaagaattaaaggctccttattccaacaatgaccatcaatcgcaaaggtacagtattaacaaaatgtaagtatttgatgaagaataatgaaggaagctagaaatactcttaccatggctagctcttaaaaaacacttacaaactagaatagacatattcactttggtattaattctgaccctctttgcttgttatgtggtcaaattactgagcctcataaacacatattttttcaatgccaattcaataagatgtgtatgcatgcatattctgagttggttgggtattggttccagcttatgggtattgtttcagcttatgggtattg

SEQ ID NO: 118764 - DNA, 687 bp, Cannabis sativa
gtaggttattgatcaaacttggaacatgaatcatgtcctatcaaaactaaatataggatattataacaagatcctatcaaatctatagaaatccaatcttttttactttatatataagcgtgtaaatccaatctagatattattatcatatatttgttatcatctgttatattatttatacataaagtgttcttgtatttttgttttaacctacaaattataataatctaagccaacaaatcagactgtagcaaaggaaaaatatatctagacttaatatataaaaatgggattaggacttcaaaagtttcttatgatttttgtcattgctatggctttcgtttcccttgagtttcgttgctctagtaagtagtaatctctctctctctgcttggtaattttgtgtaattttttgtcattaattagtatattaatataatatatatgtagatgcaggtggtgatgttgtagagatagcaccaaaaccagttaacccagattgctttgtgaaatgctcaagcacatttgggaatcatgagtgcatagctgactgcaactcaaggatgttcagttatggctcctgtcagccagataattcttgttgctgtgttacagtattgaattaattacataattattatgttataatacatataacttataatttaccaataataatttctatta

SEQ ID NO: 118765 - DNA, 565 bp, Cannabis sativa
ggtcccttccgatgcatactcataaattttgtgtcgtttcatcatggaagaacctactttgccacccttactttatatgtataatggagataaaacaatatctatcatatcaattaaattaatttaatgtatcttttcatgttggcttaagttgaataatgggtgtatacatcatgagggatgagggtttgtgcttataataatgaatcaaaaagaaattaaattgttctttttaagtaaaacgaaattaaattaataattgcttaaacaatcatgtataaacaatttgttgaagaaaaaaacaattatgttatgattagtaatgattaagcatttaagtattcgcatttttgaaaagaagtcatatatagcttactactacgactctttcaaagttgaaaatttccatctctcaattaaaaaaaagaaaaatcaaaacactgaagactgaagctaggtctagaggcctctctcatttttattttattttatttagaatgttattttatgagaaaccgtgtttttgcaaatgtcagttatatataggaaaatataagactgtatg

SEQ ID NO: 118766 - DNA, 1395 bp, Cannabis sativa
tttgaaagttaaattttaagtgaggaaaaaaaaagtgaaaactgtgaacacaaataaataaataaatttttcaattttttaagtttccatactaaatatgattcatatttttttattttccattttttttttttatatttttcttttctcaccaaaattaagtttcaaacataaccgaagtgtttgaaaagagaggaattcatattactgttttttctggtaactatttagtacaacaatggtatcactagtaactatttagttattattatactatatatatatattatacctctcgtgtcagtgtctcatgatcagaagaagaatcaggtttacgaatgacaactttggaaacttgtccactagcagtgagaacacaaattcctctgggacccttcgcagcaaaagacataattttttgtacaacattctgcatgtttaaaaaaaataaaaaaatcaaactttattactattaatacaaaacccaaatgatatttttcaaagatttgatctttaagtacatgaaaatgttcacttatttaatattacctacctctccagaatcaatagtgatctcatgtgatttgaagtctctacaggctgtttctctaagcaatccaccttcatggatcaaatcaaagtatttggtcaaaaaatgttaaatttggaagaagaaagaaaaaaatcataattttccaatcatttttcttggtaagcaaacagatattttacacaaaaaagagacatacacaaaacaaagacaacctgtgtttcaaaacaattcaccttcatggatctaatcaaagtattttgtcatatgagaattaaaaaaaaaaaaaaaaaaagagctctgttttaaagatatgattttgaagctttgtgatgtaacaaaaatgaatcttgggatcaaagtttgtgacattagaaagaagagaaagaaactcagaattttcccatcattttcttggtacacaaacagagctttcacaccccaaaaaaaaaacagagataacctagttgaactgagtatttgttcaaatgttaaatttagaagaaaaagaaagaaaaaaaaaaggatgaaaccctgttttgaagatatgattttgaagctttgtgttgcgaaaaaaagaatcttgggatcgaagtttttgactttagaaagaaactgaaaattttcccatcattttcttggtaaacaaacagaacttttacaccaaaaaagaaaaacagagacaaccgatttgagcagagtttaaccgagttgggtttcttgaactcacctatagcagcaagctgttggcggttaccagacccaggaggccttcctctccctcttttaggcgatggcagcagcagcggcggaggcggtgatggcggtggtgacggcggcggtga

SEQ ID NO: 118767 - DNA, 544 bp, Cannabis sativa
gcactagctttgttaatcaaagcttcattggctaatacatgagcaacttgatttgcttccctataaacaaaagagatcccatgaacccttacgtcttgcaaaagacttctaatatgagtaatgagtccatcagcatctctacagcctccttcatctttcaacaccagattgacagcctgcaaacagtcggtttccaccgtaaaggatggcagcttcctctgcaaaccggtttgaatcccaactgaaatagcagtgacttcagcatgaagaggagttaattctttcctcattacctgtacaatagccccacacacccgcccatcacggtctctaacaaccgagctaacactcgccaatcctttccccactttgaccccagcatcaacattaattttaaaggaacccctcacaggtgcagtccaacgggcagcttctgtaacgccctaaataattaggcacgctacccaagatatttacgaaaccctaatcccctaaacgagattactaatcaaaatagcgcagaatttaaacttttgcaataaac

SEQ ID NO: 118768 - DNA, 1502 bp, Cannabis sativa
gttcaatcaacaagatgatggtttaaattcttacctgttgggtttatgtgaaagttagaagatcattaatagtagatacgatatactaaatcttgtaattagagtctcctagagttattggttactgcactcattttcccgaatcaaacttggatgtaactttatatgcgacaacttttggttactagttacttgttactagttttagaatttagtttgtttgtttaactagttccactttggttatgttgtattttgatctctttaatttgttttatttacggagtttagtagttcaccattaatattttatatcgacttttgcaaacctaggtaattgatgatagttagtgatgacaagggagaatggagacttatgagtatttgaattttttaatcggcaaaaaaaaattgtgcatggatatttaagttataaacataattcatatatgtataaattaacatagagattacacttgtttttattgtaagggtattttttttttttttttgcacctaaaaaatatatatcccaattcatttttatataatgtaatggattgtaatctttaatagaaaaaaaaaataacaataaaatcgcaacaaattacttgaattatatttttaatactataaattattcaaaatattaagaaatacccattaaaattataatgttcgttaaattaaataatttaattataatttctacatatactaaattaaattaaaaatatcgccttgtaacaaaagcaaaagtgaccatacctaaagattttcatgtaaatatatatatatatatatatatatacatatataataaatttgggtaaatcttttgaagaaaaaataaaaagaaaagactaataatttcttggtgtaattacaaaagaaaaaataccaaaaaaataaaataaaatgagaaggcagtgtagttgataagattataagtagattaattattgcatagcatatatattacatcatatatatatatatactatggaatttattctatatatagatatgattaattaaggataattaattagatttttcttgggtgtaaatataatccatatgataagaagcttccaaagtccttctgctcaaacattcttcttctccaattccttcttcacatatcactttttccttattttgtcccttaattacatcattctgcattcatttcaaaattaattaatcacattcatcttttttagtaaataacaaaatcaaaaatataaatatataagttcgatcttggttatagatgagcttataaaaattattcccttctaacaataatttttttattaattttgaaaaataccacattatttttctaaataagggtttaaaaatatttttttctataacccactaaaattcaaagctcaacccacatttatatatatatgggtaattacataaaatataattttttataaaaaaaaaaattacatttttacatttaaattttttttttttacattttt

SEQ ID NO: 118769 - DNA, 1126 bp, Cannabis sativa
taaacgtgagatcatcattgatcaaaagatgctttgtcgagtttttcaaacaaaaaaaaatgaaccaaaatcaacaggttaactcgacgcccgcatgtcaattttcaatgactctcttatgatgttatgaagactaatgctttagaaatttctcatgagcgatctatctttaattatatttggtaaagaacaaatgcactatcaattttaagttcctacaagttcttgattttgaagatgcaccaaatttaaatcaccttcctaaaaatattggtagcctatttcacttgaaatatttgagtgtgtgtggtacaagggttgcaaattaagcttccaaagtcaattggaaaattggaaaatcttgagacattggacatgaaaaaatcattagtgattaagcattaaaatgctgaagtgaagatggcactaaactctgtgctctttcagtaacttaataagtgaaactgagacaatcgatttggaatccatctctttcttcaacgtttgtacttaaatgggtgtttgaagagtacgtttgcctaaatggactactacaaaacttaatgagattgtcaagatttggattcgttggtcaaagttggaagatgatcgatccgttgaatgtgctacaaatgctttacaatcttttggatcttagaattgaatttgatgcatattatggaaaaagacttcatttcgagcaagaaagtttcccaaaacttaagatactttttctctgctccttgagtaaattgtgttcgatagtaatagaggataaagcattatgtaaatttgaaacattcgaaattgcacgttgtccacaattaaaagaggtgtacggattccaacaattatcgaagcttaagttcgttcgtttcaaagaattgccaacaaatttcatgcactgcattcattagggttagctacagaattgatggaaaattggctagcatgagactggaacatgttacacctattttagactcattgcgaggtaagacgtgttatgttatattttaagattgtaacaagtatttttctagtactatagtattattattattttattttattatgaatatgaatggagacttagttgatagtattgcactatcaaattggagta

SEQ ID NO: 118770 - DNA, 959 bp, Cannabis sativa
aaaaaaaaaaaaaaaacctggaacgtaaaaatataaaattttacaaaaaatagtactttatataattatccatatttataatgcctagcatccttgtgagataccatatcgctactgatgtaatttaatatcgaatctcacttattttactttaatttaataatgattatagaaaaagaaaatttattatttataagacatcacctcatagcagtacaaaaatttgtggtgcctaataacaatgcttagaggtgtacatcgatctgtttggtcgggttatagtttatttccatcaacctaatatacatatcaagttataaatatttaattgtaatctaccaaattaaaaattaaaatttcaccttttttttaaaataattattgtttaatttttcgtactcacataactagatttacaaaataaaagttcattatttacatttcaaatttaaaattttatagtttaaattaattttaagaactttaacaaatattatttaaattattatgaaaatattaaataaacatatatctgaaaaataaataaataaataaaataataatatgatgtaaattttaaattttaaattcaatatccaaatataataaaaaaaaaattaactataaaatctaaatttcaagttaaacaataacatcataaaatctaaactttaaatataaaataatttaattaataaatataatttatgtcttgcctatttgaataaagaatcttcttcttcttcttgttaaaaaaaaaatatataattcatctaatatatattttatcatatttaaaatatatataactcgatttatttagattaattaaacagtttagaataatttttaatcaccctaatatacttaatatttattgggcaatttagattttcattaagtttgttgctcctaaattcgcccaatatacgtggaccagtcaagaggggacacgtgga

SEQ ID NO: 118771 - DNA, 1531 bp, Cannabis sativa
ccgcatgcaccaaagggagttccccgctccactcactccatgcgcaccaaaggagctcccggctccacttgcctctcccccactatctttatctctttatctctcctcaagctcataattttctcatttcatctcctaacccttagtcaaaatgtcaagtgttattccctctccctacacttaagctaaattaccaagtattgctccctttctcaacactgagccaaaatactaagtgttgctctcactcccaatacttagccaaattttctagcgtggctccctcattataagtataggttgtaatagaaaggatactaaagggatgtacgaccaaggacgagttcgttaaaactagcatgccttcgacaaagcctgaagagaggagatggttatacaatgggtacttattagccaaatttcctagcgtggctccctcattataagtataggttgtaatggaaatgatactaaagggatatacaactaaggacaagtttgttaaagctagcacgtctccgacaaagcctgaggattagttatacaacgggtacaacaagtacaagtagtggagacaccatttgtctcactctaggtacaagttgacatctgaccaacacttctccactatccatctgacacgctaaccctcatagtacaatcagacctatgtcctcttatttttgagaccacttgtattttagagccattagagttcacgtgtgaaagccctatttaaatacttgtaaaggagttgaaaaattattacttgtaagagagctctcatattcaatacaataatattttactccattaatgactgagtgttcttaatttttcttaaactttattctaagctctttgtatttgattttctaattaaagtttagttgacagttcttaccgtcaacaattatttacttactttttgttgataaaagtgtatttttgtaattttaaatctttaaaaaaagtttttttgtttttttttttttttttgtaaataaaatttttatgttgtaaaagttgtaaataaaatatataagaaaataattttgaaaatttctcagtattttttgagttagcagatgagaccatactataaaaatatgtttaatgtatttaagaataaatattattttagattatgtattttgtaaaagttagtacaataaataatggaggtgggataaccaaactagtatttgaatttgtgtgctgaaaatgactccatattggttatattatatttcttttgagtggtttggttcaaaaaaaagtgcttaaatcttataaaatataatgtatatggtgctacacttcttgttctaatctaaacttcaatttgatatgtttagaatggcaatgatatgactattgatttttttttttcaattgaattgaatgagttgcacaaaaggtcatgctgtcaattgtcatgattattagtatttcttttgtagttagtgggtttagtggggtatggtaattgattgtattatatatttttttcttaatttataatacaatt

SEQ ID NO: 118772 - DNA, 1954 bp, Cannabis sativa
acaattatatgaacaacaacaacaacaattccaagcatcatcaatggctcatcatgaagggaatttatcaatgaatcaaataatgcctaatttcaataaccaacctaccgacatctttccacaccacccaaatccaggtatattatataaatttagagttatttcattaatttataattagtaatcaagataaaatatttggcacatttttgttggtcattataatttgctacatcatcacatctgatattatttataattttatatatatacaattacatattacatgtacattagctagttgattactaagttcataaatttatagctgatcttatatgaatcaatgtatgcagatattgaatttgaaggcaataatatcaatggtattactaggaattataatccaaatcaagatcaaagtacaagatcaatgatggtgggtaacacaatagcactacaacatgatgatgatcatcatgttgaagatcaaacaagagtacaatcatggatgtcgacaacaaccaatttcatcaaggaaccaaaacaacatgaccatcatgacattgaaactaatattcaattctataagaaccattttagatctacaccggaatatgcatgactacatttacaagatatagatactgttattgctctccatgtttgttgcattttcatcgtttcaaaattttaatttgaaatatgaatatttatttttccttaatttaatttatcaattacttcattattaatttatttgtgttgttagttgtttccctcacaatttaattattatttattttataattaaattatcattacctcagtttgtttattttttttaattattttagttacttttaattatttatatatagataaaatgtgtgcttagtaatgcattaattttttttatattaatatgtaaattaatatgatatatgatataaaatggcatattaaaaaaatattaatataaagtttgaaatgaatataaaaaaaagttattatctctaaagttttaaatataaaatttttgattgtagtctttaatggcaatgaaaggggaaccacaaaacaaaaggaaagacgctttcattaaaaaaaattatttttaataaattttgaaaagttgttagattatatataaacattacttcagaaatggttggtgtcaataagacatgatagaaatataactacttctatataatcttgtttgcaagttgaatatatccaagaacatttcatctctaaaattcttggtcgattcgagaagtgattttccaataaaagtagttagattaatcaatctttaaagaatcattttcatgaatgatgagacatcaactcggatgacatattcttccaatttgatgctaaggatctctcttgaaattaaaatagtagattctttccatactttattcaccatctctaaccacctatacaccataacataaaaagatgattattctttttactagctaataaagaagtataatcataagtagtacactattagaaaaaatacattttgtaacactagtaaaagtgttgcctcctacactgttgccaaaacttagggtgctaaagcaacactaacaaaatgttgtctattgtaatgtttaatttttataaaaaaaataaataaataaatattatgtaacacttttattataagtgttaccattaataaaataatttatatatatatttttatactgtgaatatggagaaaaaaagaatgttatttgaatttttttatatatataaaatcttgacagtattttatatatatatatatatataatattctaattctaaaaatgtaacaaaataaattttagaaatttttacactaaaaatctaaaatgataaatttattacattaatacctatacacggctaaaccaacttttttacacatcttttatattttattactatt

SEQ ID NO: 118773 - DNA, 1193 bp, Cannabis sativa
  modified_base (1091)..(1120): a, c, t, g, unknown or other
gacaggggcaaaattggtacaatatttaaaaaaagatgtaaaaataataaatttaaaaaaaaaaagtaaaaataaaagaggacacaatataaaaaaaaagtacaaagtgtaatttcttctatatttttattgggctggaccttgatattcggcccatttttattgaacctgatccttttgttgatggaacagttgaggtttttagtgatgcacgtgagcttctctctttcaaaattgaaaccacgtgagctattgcataatggtatttttaatttagttaattaaaatttcggccctcttaatttttacatgtattaaatcatatttttttttaatttttctaactattaaaaacttttctaaacaattattattggtaaatttaaagaattttatctaatttttataaaaaaaattataaaagttcaggactgatacatgtcaagttaggaacatgatttgagatataagataataaaattaggtatataattaataataatatagaaaaagatattatgcatactccaacataaaatcgtattataattaataaataattaagcttttagcgactaaatcctcttaactatcgttttacttgtatttaactcttcaagcttaagttttgacagtaaaacctttcatactactgaactgttagcaaattttaagatgtcatttggttgactgtcactgtagactacttatgtgtacatcttgtacacgttggtatctttatattagtacacctaatatttttattttaaaattaattttaaaattaaataaaaaaataaaaaaaaaatatattataaattttaaaataattttttataattttgaaataataatattatgtatataaacgttccacgtgtacaaaagtgtacacataagcattatatattggcagttaactgtaaaaaataaatgacacattaaatttgctaattgttcaatagtttggaagattttaccactaaaattttaacttagaagattaacagcaagtaaattgatagttgagagagtttcgcagcaaatatctctaaataatccaatattttaaatatacagtagaacctctnnnnnnnnnnnnnnnnnnnnnnnnnnnnnnctaatttgttataaaaaaatgaagtcccaatttgggccagttataaataagaataacctctatattgtaatta

SEQ ID NO: 118774 - DNA, 568 bp, Cannabis sativa
ggttcagatttaacctcaactcttccatgaataagatggatgtatagatctagaaggttggcacttattcatagtcaacaagtagttgaagaaatgaagatggatgccctcaggtgtcacctggaaatgatagtcgaaaaggtgtcagggattaccgaccgtctaggaccaatcctacggggcacgtcctagacaagaatctcgaagaattaggggtttgtcccctacgctagatcttggaaagatgcacaaaaataatgagatcacctttttcggctaacgcccgaaactctaacattccccaaccaactgacggctcacgatccaactatcactatcagtcgtacctatgtgtacgaatgaagattttcctcaaccgtgggcctacttgaaccaacccaatgtcaatatatcaatgtattttatcccaaccagtgggattttttccatttacaaaacccctaatgggttcaggggtaaaaatgtttaatttttaacggtaaaagaaacagaacctaacagaaagaacatgattatgtaactgttatattttaagagaaatttttaa

SEQ ID NO: 118775 - DNA, 1461 bp, Cannabis sativa
tcttcaagcttaatgaatccatctcctcgattgagaaattttgccatcgaccccgcaattaatcttttggtatcctgccacatttctcatagaggcttaatgccccccagtattgcgactgatcttccttccttagttagccccttaaccttcattgctttaattatgaacatgctaatgtaggcccttaaaggttctcctggaatttttttcacttctactaggtcttttaggtgtgagggatgcgacgagaggaagaaaaaagtgcatggaattcagatgaaaaggaaatccatgaattatactttcctagatgtaatttaaaatactattgcttggcggcctctactagtgtggctggaaaaattatgcacagtacattgcctcttacccctgtatatccatttacatctcaaagtatatcaaaggagatagcaaatcttcttttccaatgtatatcttccttatagccattttgaactttgggggtaggtcaatagcattgatttaaagtgagaagggcgatcctcttacctctcgagttttgagatttgtgtgttttgggctagtcagacattgtactaggctcttaagttaatctatttatggttgcacaagtggatcaacttggccagcccgtagaccaacttgtgtcaccttaggatctctttgaactggatcatgggcatagttatttggctggatggctggtggaatgttttgcctatccagtccccttttataattcaagtcattcttgaggtcatgtacggtaccttatcaatcgaacaccaaagtacaaagaggtctttgggtctgaccaacctggttgagaggttgtcttgatacctctgtctgaatatacttatttagctgagtacctcctcctatggggcagtctggcaagatctgactgtctatcatttagcccacaagttggacttgtggccttggaatggacgactgactgttataagttttttcggtatgaccaactgcatactgtttagtctcgctcaagaggatgctagaatcagtcactagttgcgaacaggtaacttggtaagcccttctgatcagcacgatggcctgcctagaattgttgtcaatggctgcctgttgagcccttccatttcttgatccctctattcgatgaattgacatctttgctcattaaaggcaaggttgatagccattcagagatcattctaatcatggtgcaataggttattatggccttgcataagtccaatcacaactcataggttttgaagtttagtatcttccccaatcagcctttaagtgttattggtagatggaatcttggtgccaagagtagtttggtcaattgccatactggcattcccagtttcttgtatgcttggtgtgaacgcagccagaggggaagtccatcgatggcccaccattggtggtgttggcaattattttaccaggatctta

SEQ ID NO: 118776 - DNA, 794 bp, Cannabis sativa
ccctattttttatccgattgttgtactcattttgatcatcttatatcattactgattgtttgattatttaaagtatagttaaattagttctacactattagtcatatgcaaaattattattatttagttattagtcattgatgatgtttgattgattttcttttgtaggttactttttggattgattcactctatgtggctgaaacagttagtcttagcagattgtttagcagttttttatgcattttttaaacaccattcttttttcattgaatttggttctttgttagaggatttagcaagtttgattttttggagtgtctctaattcatgtatgttgaatggtcaatgaggctgcatatagattagctcggtatgctcttcgggtaaataaagaacttgaacttgtattatttgatgagattctttcttttagtagagattaatttataatacttgaggttgtatgacattataatttatttttaaatgtagttattttgttgaaaaaaaaaatatattctaaaaatatatatatataaataaataatatatattgggtgatgatgatgaaatcaagtgtaactaagcacaaacaattagttggttacagcttgacaatgaaaataaagctccacgcgacaatgccataataaacacgtacgaaatcatttattggaataatattcaaactcaaagccatgtcaaaatttgatatgtacacaaacttttatttatttatatatatatttatatttactaggtgattgttacgtgctaagccacgtagtgtt

SEQ ID NO: 118777 - DNA, 1060 bp, Cannabis sativa
tatataaaaacaattattaaaaaattaattgttaaaaataaaatattaataaaatacttatggggtaagacattagtcaatcacccttaaaatatataaaaaaattgtagactaagaaaagaaatttaactaaagtattatttataaccaacaaagataatacctaaaaactatctaagcgatgtggggctttagttggtatatgcggattattttaccaacaaaataaagagaatgtgaaagaatttcttgaaaaatgagctccccatctaacatttttttaaatatatatatatagtatctagtggctcaactaaatgttctgctctcggagacggtatttcgttgatgtcgatgctggtggccggttgccggaaagtcgggaaacctgaggaggcggcgagcatgggtatggttgttaataagaaaaggaaaagaaacgattattgggatgggactgtgagattgattggggtgatttggtttagctttgtgtttgtggtggagtttgtgaagaagctgatgtgggtttctgaccgtaaaacggtgataagcggtggcgatggggttgagctttcgccgcagaagctcgctcctgctaggttttgtttggatgagatgaagatcgttaagaaagccttcgatgatgctgtaagtttctctctcttttggtcttttcatttttatattattactattatttgcaaagcattttgaatttttattattgtactttgaattaaaaagaaaaagcaaaaattattgttctgtatgtcaagattttagatttattaatttctgtgctgttttattattctcatgtttcaattttctttttcttggagagatttcaattatacatttacattgtcaatgcttggggtggaaccactgccttgatgtctctattaggagcattcacagcaaattctcttatagggcgctactgcaccattccctgctcttttttgccttagctagttgatgacagtatggtgtttgggtccaactggtatttaatttggttgtcgtcgaggggaggatgatatgatataaagtg

SEQ ID NO: 118778 - DNA, 1046 bp, Cannabis sativa
aatgacaagagagagggactggtgtgagagagagaggaactgtcaaaataccaaaaataacttatagcttaattttgttatataagagacatatagtaaataaaatttataagtggtcctaatactaaaaataaaatttatatattttttagcttacgtaattctttttttttttacacatagtaaataattatttaagtctaattttcgataatgcaattataaaaaaaaataaaagaccaaataaaatctaccagaggtccactacaaattttttggttattatgtaattcctcttagtactgaaaataaactcttcccttcattcaaaaaattaaaagcgtacttttgatagataaaagtaattagaccttactgtcattatataataagtttgtaggaatggcaaataacacattatggactacaaagttacacaatctactaatattagtaaacatacaaccaataaacaagggagttacattattacaaaataagacataatttttgatatcccaatgagactccttcccattaagacatcctactgtataaacaaatctacacaaatacacaacatataggggaattattctatggtaattcctctaatgaaaaagcctcatatagcgctagttgcaataagagtttctatacgattttttcagtaaatatgaaaaaaaacaaaactaatttaaagtgtaaaaataaaaaaaaaacctcaaacatatataagtaataagattattttatttatcggcttaccctaacaaatcatgtgtgtttatatacattgctttaaaataaataaataaataaacaatgtgtgtatatatctcaaaatttgtataaatagagaggagacattacctgtgtgataggctgagagaggcggccgaccttaacaccggtaacagggaatatgattttctagggtttataattttgggggctgagagtggaagagattcgcaaccaaatgaagaagatgaacccaatttcatatcatatatataaaatgactattaccggcggaccattcc

SEQ ID NO: 118779 - DNA, 735 bp, Cannabis sativa
catccccattaaagattttaatccccatccccgcttattccccatcgcggatggggcgaggaatcccctaatagagcggggacggggcggggaacctcctattgtaaaaatgaaatttattttaaaatattaaatgtataaaattattaaattacataaaagataaaatattacatattatttactattcaatatagtaattattatacaagaacacaacttaaaaattgtaaaaatgatattaatatactaaaaaaaatacaaatacatttataaaatataaaatattaataaaaaataattaataaaacgggtccccgtcggggcggggagtgtcatccccgtccacgtctatgtagggatgagatcagatgcagtaggttcgtagacagtcgaagagaacaaaggtcctagaagggacaaagatggggcaggagtttgggatgcaaagcttggagcagttgtagtaggtgttggtgcaggagggactttaaacgcttggatataggcatccttaaggttaattatgccttgcgccttagccatgaattcacttagggtcttggctctctttctttgcatctctctccataacaaggaacctatagctaaccccgactagagtgttaactcaaacttttaggtctcattgttttgatgattaacaaatatttgattattatttgttactaataatttgttgattttgtagaaaatttaaaagagaaaataaat

SEQ ID NO: 118780 - DNA, 2113 bp, Cannabis sativa
attgccacgtgaataaaattaggacttaacgaagctgaacagacgacaccttaaaaatataaacggaacattactttggaggttttcccaccaaaatacgagtttggatgattttttgtaagtaaattgatagttgggagattttgcaacaaattaaattactcatgtatatatgcaaattaaattactcatgtatatatgcattctcctaaccgcaatgtattatgtatgtgatcttttttttaagaccaatctaattcatcaattatgagaacacttatctaatcaaaacaatattaatcaaactctaaatataacaccaccaattgcccaaaaaaaagattaacttcgattaattaataattaatacatacacatacatacataaacatacatatatagatatagttaaaataaaacttcaattcaaaaacagagattacatataaatatatagatgttgtcgttttagttgttgttagtgtcgttttactcaaagaaaaaactctcattgtcgtaaatcagccaacgaaaacgaccttgaagaacccaaaaacacacttctcttcttgctttggggatgtaacggcggaagacacggcggagccggcaccggagaagactcatcactgttctccgaactacaacaactactgttactactactgcttccaccaccattactcatggcagccatagcaaaagccaaagtgcttttactcaaactgatcggtctcttcgatatccttcctccgccgtaactccgattcttctcccaaatctgattgaatactaaaagattccttcgtcttctcgaataagcgttttcaggtttagcaatgtctgaaattgacgatgttgttgtgattgcgtctcttaaactcgtatacgatttcgattttccattgtagaaactcgagattcctttcctgtaaaacaaaatcggatcagatctgtttcgtttttaggtcaaaaaacaagaatcgaagataataataataataataccttgaaggtaatgaatcttctaacgactccatcatttccagtggttctttgtacgaactctgagcctccgaatcatcatcatcttcttcttccgtacacacatcgctattcttcccgatcgaagacgaagacgaagaagaagaataagaacaagtcgcgtcttccgctccgtcttcggctccgtcttctcccgtttccgattcaatcctcctccgattactttccatgctgatcagatcaatgaatcgatcgatctttaagagagtcttcaaattgttattcagataaaagtgaaaaccgccatggataaaccttatcagagcttaaagagagagaaaggtaaagttggagtgagtataacaaccttttataattaattttttaattaattataattagtggataaagtgagtaattattattattaagataagataatatttaataagagtgttttaaattttaattaaaggttttaatttgatgggatgggatcttatccttacaggtcagcaattgtacttttgggtaatcgaaacgtttcgttttgtataaatacgttgctttcaaattcttttttatttaatttaataaattaatgaaattgtggtgtgttattctgcttcacgtcacattcttcttaaagtgtaaccccacattgccctttttccaatcacatcaccaaattaatatatttttttaaataaattttgtttttttttttttttttatttcatatcataataataattagggaaattatgacttagtattttagtgaaatagttcttctaaataaaaatatctctaaaagttattaacatttttgaaaacttgtttgcgcaagcatgtcttggaagactttcttgtccttttgagaaaatttcgaaaaggaatttcagatggctagttattcttcttagaaaggaattttagataatcgactccagcttactcttttcttttggcaagtaccttggtctgtgattctagaaatcctcataaacgcttttagaagcactcatacatatgttgacatggagatctcgctctaaggataattagttaagtttgttattgcataactaacttaacaacctcgctt

SEQ ID NO: 118781 - DNA, 1325 bp, Cannabis sativa
agtaccaatcaatccatttatgccctcttcaactatgtagtcccatacctacacagtctcaaaatcatcacacatgaccttccctaagcgatgtgggattgtacagctcatagtctttcccctttagatcatggggctctgactgtcacaagcaccccccccctttgggggctcgacgtcctcatagaccaccctttcggatgggtcaaggctctgataccaaaattataatgccctaatgcttaggcacactacaacaattttgtaattactttgttcgccttttctaattaaaggattttcttaaaaatcatgctaaatttaaaattttaatttaaactttaaactttataaacatgtacatatatttagatcaagtcgggatctcatttttaaacataatattcaaaataacattgacagacatgtcacacaataactacaaaatgaagcccaagtcgtcccgagaccgaacactccaggttgtaccgtctcaacatgtacaatcatcccttaagctctggactcattgctgttcaactttgggctttcttttacctgcacatgaaagtaatatttgtgagtcaacaaactcagtaagaaaaacatataacatacaatatattaccgacttgtatctaggtgcctatacacctatccacaagacttagcagatgagtaagaactttctttactaaggtacgaccactgtattacatgcactacgtaccgctactatactagtgttagtagggtttgcaccgtacctcgagtaccattaactgttgtaccacatacactacatacctatccgtactagtgttggtaacactgtattgtactcattgaacatcatacactgtaccaatgcactcagtacctctaccgtactagtgttggtagtatacgaatcacaaatagcatgcatatattacacatacacatattcatatataaatacattctatgctaatcttacctcattccaagttcaagtgtgcctgctgacctgaatggaaaatcacgcgctagatggataccctatgtcacattcacgtaaatgggtaaacaacttgctaaaacccgatctggagatctaaacttccttatcgataaatagcatgacaataccctaattatcgaggaaacaccaaaactaaggctctgaaaatggcccaaaccagtaaaccaaattttctgaggtcctacctgtggttaaccgattcatactaaaaatcttaaaccagttcaaaactcaatcaattcttccctaaattctctcaaactttccagaacacctgtactaacatccaataatagtttcc

SEQ ID NO: 118782 - DNA, 1219 bp, Cannabis sativa
aaaacacaaacaaacaccatcaatacattttaaaaaaaatatatataaaaagaaagtgagtaagtgatgtatgtaatatgcattgtaccgtaagacggcaaagaaagcgctcatgagggctgaggccagaaatttcgacaagtccggcttcttcgattgtcaagaaagttcgtctgttttcggtcttgctttcttctcctcctcctcctttgttgtcactggtagtacaaccaattacctttcttcttctcatgtgaactgttgtttgggttagtctttgatggagcttagatgatggggttgttattgatgggagaaatgttgattgacattggctcttacaaggtcttagtgataacatttttaggcttaaatattttgagatgctttctaagttcacaaaaaacagtaggagtgattcaaggagaaatagacagaaaaagggtgaagagaagagaggccttatcggtttggtgtttgaagaatgtgtggtgaggatggctagttttgtttgttatcccatcacctactactcatcagtacaaactaatttttgtctctattcaagattggaacatacatgtggaaagtaaaggttattagaggaaggtaatttttggtggttctgtcatctgtgaagatacatcgaactgttactttaagttgttgggattatgagcattagtcttgttatgttaagagaaagacgaagagaaaacagcggcggtgacggtggtcacatacccgatggcggcaacgggtggaaatggtctcttcaaggggcccccacagtttaatttgaaatcagcaatactttactttcagagcatttttcatcggttatgcttactattaaactttaaacttgtttaagggataaaattaaaatacaaccaactaaccaaggcatatcttttcataaaatgcaacattatcttatcttaagggcatcatgcacaaagtagccaacaaattcatgtaagaaaaatcacatttgtgaagtttgaacgagcaatatattaatttattaggaaatgactaatccatcaaaatactcaaaaacagagtccaccatttaagaatataaagatggtaaagaattacttgactttagatccaagtgcccaccacaataaaaagagtacttatatggatcataggtattgattgtctcccaataatgaattatttaacataatagcttcatggactctttctt

SEQ ID NO: 118783 - DNA, 784 bp, Cannabis sativa
tgttaagtttcaattgtatcatggatgggacctttaggtgtagtcccaagtccctaagttcgggtctagacccctagattcgagtcggagttggggttttgtaaatattataatacaagttaatacagatcatttgttatatattaaataatataacttacattgtattaaaatttttggtcgtaataattaatacaatacattgttttatgtaaacatagtgttatttattatttaatacaatacaactcttatacggcttactaaatgatcctttagtgtcatatgtaattataaaataagacattctgtgaaagttaaacctttattttaatggctattgataaaaagtaccattgtttgaagttggcaatgctcagtttctgaaatttactataagttgttcctttctacaaatgaaattcacatgtactgaccatataatcctaattttcagggcccttctagcaagaacccgcttgcgtttaagtggtttaatgccgaagaagttatactaggaaagaaaatgaaggttagactatctctttctctaacttattttcttgtgtaatgtttcaatttagtaagataacaacattttctaacctttccaattcttgttacaggattggtttcgattcagtgtagcattttggcacacattccgtggaactggagctgatccatttggtgcaccaactaaatcttggccttgggaggatggaacaaactcattggctatggcaaaacgaagaagtaagactaaatattcattttgtgttgg

SEQ ID NO: 118784 - DNA, 834 bp, Cannabis sativa
  modified_base (781)..(809): a, c, t, g, unknown or other
tattttcactttttcaattttaaaaatagaaaactgattaaaaaagtgttaccaaacggcaccataattaatattaaattctgttgacgtttaaggtaatattttattatttaatagaatattcttaaacttttaaataaattattttgagagttaaggactcacgaagaaaaatcttaaaaccctaaaaccttctgttagtatcgcagtcacagcttctttcaagtcgcatactcgcaacatttttccttttgcatactctacatgaatccgtgacaatacaaagaatacattggaatggattttcgatttttcaagaaaggggttcacatgtgaactcaggattctttcaatcggctcctcgcaacaccgaccgatcactcatctatgacttcaatccctgaaaccaccaaaggctttaacattgtaaggctttccacaatttttttattgagtgtgaaatttttaattttcttttctcttaatgatatatagtgggttcagatattactttgacaagagaagagaatgtagaatctggttttgagttagattaattagttcctaattttattttttcctttaatttaattttttagtatcttatacttacaaatattcgttttgtcattatgtttctccaacagaatttttatgtcgctgctggatataggtgtacaataacttctaaaggaagaaaagaaggtagatttatttgaatgttaataaagttaattgaagtatgcatacatctatgtatatattgttataaaataatatnnnnnnnnnnnnnnnnnnnnnnnnnnnnnaagaagaagatgaagagagaaagag

SEQ ID NO: 118785 - DNA, 1445 bp, Cannabis sativa
  modified_base (680)..(693): a, c, t, g, unknown or other
agatagagagtggtttgataagttgtaaataattgtatagatttattgaggccaatgttggtgcttttaggatgtaaataaaagttttgtgcaatgaaatcttctgattcatcaaaaaaaaaaaaaaaaaaaaattaaggattgatagatacttactatcttttcggtaatttctttatcgtaatcagtaatatgttttgttctcttggcttgagatttgatccaaacacggtggcatgggtgatcttgaatgtcgaggtcttttttctacattattttataacaattaaatgagtacaattatattttaaagcacattattagaattcattgattacttaccacatcttcccttacatttaccattccactccgaccacttcgatgtctgtattagatttttgtagaacgttccccttgcaccttactcaattcctacaatgccaaaaaaaatataattagatacgtgtacttgtatttaagagtttatcttagtacaaatataattagcgtacttgaaattcaggacttagtcgactttcaataaaattcaaccaatcagtaaggtcaatctccggatgcttctttagggacttgtgcctgtcgttgcacatccttctcttctaatgcgagcattataacgtcttttgtcattctattcttgaagtctttcattaacnnnnnnnnnnnnnncagacaatcatgtttgaactcatccgccactataaaacccgtctagtttgaaggaaaataaatacgattagagttaacgtctgaattaatcaaaaataaattaaaattctcacaaataaccgattacctgtatatgtttccacactttattttttagtgtagggttgacttctttccaatttttataggacaaccctatcgtctgatggcatctaactcctaaagtcgatactagcttggagtagtttttgcctcagtactgtcctttgtcattcacctcgagtgccactctttttccttggtccatcagcttgaatatttcattcatctgagtagctcctcgcagtatcggcctaggacactctgtttttgggtctgaacttgatcctcaacctgagttggtcatatcgacaccattaacaaacaaaacttaaagttagctatataacaagtaatctataagaaatattaagttgtaaaagttgtaattaactaattagggtagtgtttagttgattagaatgttggtagaattggaatgacttttcttaaagtgaatccattcatttgtttggtttgtaatttatataattgaaaagtttatataaatgtgttatgtcagctaatttcttacaactagtgattaattaattagttatttatgttatgtacttttcctttaatatttatgttttttagtaaaatttattctaattctactaaaattccgacagcataacggctgtaattgg

SEQ ID NO: 118786 - DNA, 2611 bp, Cannabis sativa
taaataataaaataaaaaaagagtgctggatggattgcttactaacaagtgaacccgaaattaacttttttaaacaaaaatctttcaaagaaattactttacaggtttgcttattttttaattattttttatttaccaataggataagatgcaccaaattcaatttcaaaatcaaatttataataaaaaaaaaataagaacagggatcttacatattttccaaattacaatgggctctcattccacatcacgaatggcgggctctttttaaatttagtgatttttttttatttttttagatcggataattgcagggccggccctaggtaggctgagcccatgtgtaagacttacttattttggaaatctaacataaaaaaataaataaataattactaaatttttattaaaataaaattaaatgtattataaataataaatagttataacttaataaaagaaatgttaaaaaaaaaattatttaacccaattatttttttttgttcttatttttgaaaaaacagaaaataatacaaacatgctctaatagtacctaatattttcttatataaaacatgctctaataattatacctaatactttcttattttatatgtatcaagttccatataatttaatataataatttttatcgctaactaatcgcaacgcgacatatcaaaaaaatactaaacaccgctaatgactaataagaatgctcattatataatatcataggttgaatatttttttataatatattttgaagagtcttaaaatttaattcgcttaaacctatatattcctgatagttgctaaagatcttattttaaattcatggttaaaaaaaaaaaaaaaaaactcttaacagatttagaggcaacctaaagtttagtgtgatgccgttatttagttgaaaatattttgaataaagtctaatatttaacattgaccctagattaatacactctcactcaccttcgtggaaggtactattaaaaaaaagttaaaatgttgttaattaaatattaattttaaattcattaaattttgacattggaaaacgcgattgctaaattcgaaaacacatcctcgtcgtccatcctcgtaccgtaaattaaaattaataattaataaataaaaaaaatgaaataataataataataaagtaaagagattctttttctctctaaaatcttctacactattcttctattcatatccacaacaaaaccagttcattcaccaattcactgcttaattttacatggaatcaaaaatttgaaaccaaattactcttaatcaaaaattatacttatatacaatatggaaatcatcacagagaaagagaaaaaactccagattatttcatataatacatcatcatacgtacataaacaaaaaaaagaccttaaaaaatccctcaaattcaaagaagaagaaaaagaaaagaaattaaaaaaaaaaaggattaattctaaattagtctctaattcaaacacgagtgcgaattgaagaaggaggaggaggaatataagaaacgaaaggaagattccggaggatgagaaatcgaacccgtccaggaaacggcgccgaatggaacaaatgttctagaaccctcgacagcaacgccgtgtactcctccatcagctccgccattgacgccactagtatcattctttctttttttcgattaaagcccttagggttaggtattggagtggaatgaaacgacgattctgtttggatgatgagaaaatgaaagagaatatatataagagagagagagagagagagagtgtggatggatgatatttagttgagtgggtatgtattactatgggctttattagtttctggtttgttctgggaatggatgatgatctgaatattattatattatcatttatttgtaaagtggtccccactctcgtatctttcttttttaaattagcttatcggcttccacgtgtacattgtactccgactcatcaattattttaatattttttaacatttatcttcatttttatacaaatggtcaaagtttgagtgattggctgcttgttttttttttttttttatttatccttatctttacgactttaccactctttttcttttttgggtgtggaattgttattttttaggagaagagatatgataaatattttggtattattataacttttcgggagatgactatagacaaggatgaattacgtattgattaaatgtaatattttgtcattaaggtaatcaattgcttattaattacctattaatcaactgaaaagttaccattataaatatcatttcaaaaacgtatgactatgcagtatactctaattacaaaaaataaaaactatcatattaaatacttctgacaaattttggccgtccatttaaaaagttgaaaattttatttgtgatcctagaacataataaattatagagaaatttacactaagtggctttttttttcaatattaaacatttatgtttgccttatcttttttttacttttttactttggggttttttctttaatactatttacaaagtttgatatttacaattatacaatttatactatttttccttcttcctc

SEQ ID NO: 118787 - DNA, 1533 bp, Cannabis sativa
  modified_base (931)..(934): a, c, t, g, unknown or other
  modified_base (1013)..(1015): a, c, t, g, unknown or other
  modified_base (1380)..(1382): a, c, t, g, unknown or other
aaaataacttttaaaattttcttaaacaatttttttttcttctttttaatcaatattttggatcccaatcctaatgtgaaccttggagtccaaatccgaactcggatcttgctctgacttaagactctaattctgacctcgtctccaaccttagccctcgaccgaacccaaacccaaatagggacttgaattaaataaataaaaaaaatgaaaattaatgaaatttactaaacattttatattttgttttaaaacttaaaacataaaagtggtaatagaacacatttttatttttcaaaaacaaaaaatttacattcatttttgtggttaaaaaattaaaattagttcattgtgctcatcagcgcctaaccctgatatgtggatcatctaaggcacattagcgtggcatacttctcttgttcgcactgagatttgaaaccaaacttcttctcaagaggatagatggggcgattcaggtgagatccaatatagatcaaactttctattcactagtgggatccgggtgatctagcagggaccaccacggctcctctcttctcgaaaatccataaatcccttatcagtatatggacattaatctcttgaacacagatttaggttcagcctctatggaaaaataaaattaagcacataacaacgtactaagaactatgagataaaaaaaaataagtgttaccaaacgtaacctaaatttttcttttaaaatctcgatagttgattttctcctttgttaatagtatatatttaaaagttgaactatttgatttaattaggaattttacttatttggcaccctctcttttatctaaatataggtttagtactttgtattttcaataatgcttattagtacttatattttaatgttggattatattttaccaagacatagatttactaacaagtatgnnnnttaacatcctaaatatgaatttccaaaacaatagaatttaaacacatataaagtttgagtaaccttacattgattgcannngaatataatgactcctcccactcacatctctaacccttgttcctttctgtcgcagagtattaccaagatctgagcctgattctccttcaggtgtttggattctttacagtcttacacactatgattgagtactagatttgttatgggtgggcatgcactcaatcactaatgctcaaaaatttatgaacactctaagaattttcaaaaattagaagaaagaagaggaagaagtctcaagaactctctagttgtctgacaagttgtaaactaggttatgagtcattagttttttttattatgagaccatcctattctttttatactaattctcttagggttaagattgaattatatggaataaaaannnataaaataatagcaaaaatagggacttggtggccgaccatgtatgtgggccctattaattatatttttgtaattttttcaaccatttatctattatttcacaaatgccatattttctaattttaatcctataaatgccaaaaatatttatt

SEQ ID NO: 118788 - DNA, 2691 bp, Cannabis sativa
  modified_base (413)..(417): a, c, t, g, unknown or other
  modified_base (1334)..(1335): a, c, t, g, unknown or other
  modified_base (1491)..(1506): a, c, t, g, unknown or other
  modified_base (1620)..(1623): a, c, t, g, unknown or other
  modified_base (2639)..(2651): a, c, t, g, unknown or other
actttcttccgggattccttgtcaacttagggaggacctctaagatcgctcacaatatctatgtctattcctgtggagacaaagaaaaaaggttaatggagcaacaaaaaacatataaaattaatgatgtgtataatctcactcaaaccaccattcataagggatgatactcaccctcaaggatcacttgtgaggatctcccatagcgggctatggggttcccctggtttggattggtccaaagctcctcagccttggaatccatcgtttccagttccaattgaggcttaaagttcttgggaacgaatggaaaatagttggtgcattctggtattatgaatttgggagggtgaatttctgaactaagaaaggacattctagcaagaaagagatgatccattctgaaaatggannnnnccaaaaagccagaagtttgtgaaaaatgacaagcttgagctgcccttttatacacaaaatccagtgacaagaaagccaaagattgggaaatctaatggttgggagtagagcagaatatgaagagacaattcataatgaccctcaaaaccgtacaatagccaaaatcaaaggacgcgttttttccaagaagggtttttgacaaaaatgccctctataattattaaaaagcactttttaagggccaattgttatacccaaaatttggctaccatctcaatggaggacacgtgtccagataaaaggaatgtgaatcgatgcaatcgctttttatggtataacttattaattacataagtgtcagagtatatttgtaacttgctgactgtaaggtcttaggcgaggaatcaatatacaaactagcacttagtatattagcgagaaaatatatgtcgctgaatgcgaatagtgaggtatcaaggatagtacatataggaagacgaaagcgacacatatcaatttcaaaagcccttagtgtacaaactaagtgtaacagtcatttcagctcgagaccaaataagtgaggtaaccgtctcgctatggaaagactttctataacttcatcctgttacgacagtgaggcttgtaaccctgataagttagaatctaacattcaaacgagcttcgaaagaactctttgtgaataaaaactgcgaagacatgcatcgaacaccttggaaggaaaagtgatctcagctcgctattgagatcactggaaccaagcttctgtcgagacatctccagatgcaataattaaagacgtgtttaatgcacgatcattttgacctagtaaaggcgttaaaatcacagctacatgattttctaaatcatgaccgcatttacactatgtgatatgtaannaaaccccgtaattttaggggatgatcattgtaaacaaattacggtcaattttgtaatgaactgcccactatggaattataaatagaggcaaacaagatcaaaaaagggacgaaaaaactcatataagagaggccctgaaaaacaatcagaaatctnnnnnnnnnnnnnnnntggactatgcagaattttaactgccaaaccacgtaaaaaaaccctgtgttcatacttttatttttatagctttcattttttctgtattaaattactactgtgaggctcaaattnnnntaacgaaaatctacgttaacagtaagtcttcatgttcatactttattttctgtaattatcatgtttttccttgtcttaacaaatttacttgatatgtacaaaactctcttatgattgatactatagtggaatcacactattaacaaggtatatgaagaagatgaagagtagtttcagttaatctttgtgattccaaagaaagaatacaccactcagaaccattatgaattttttgttcagagaatgggagggttgtctctctactctcaaagatgaggtaggaaaatattacattagcataacccatttcgggtttctattttagattatcctgtgtatggaaacaacttctcaacatttaattatttcaattattctgttgcggtgcatgattaacttaagttatgagggaagtttaacaggcttgtacaagtcaaatcttatcaattttattattttggtttagaatagactcattgtctgttgccataaagaccccaaattaatttccaactcttttgaaacttggtcctatatgtaaatgtggatttaattgtaaatcaacttgctctttgttcagctgcatttagaaatcagtgtatgctttatctttctttaatgaaatttcagctcactatggctagcgagtttggtagcaagtattggggtcggattcctatattgaggagggagcttcatcaacttaatttccaagtacaaaataagttaagaggaaatgtaatttttataataaaaatggtttattttatattttttctttttattttgtcattataaaagctaaatttgtgtaaatttgtagagtagaagaaaaaatgttttacttttacacccttgtgctatatagacattctggttagttgttataaaaataagattatgtgcgattgaagattaataagactattagtgagagtatattcatcttagtgatacagaaagtaatagtttattcaaatattgtaactacatgcactgttgggttttatgccctnnnnnnnnnnnnntttcaatgtaatctctatcttttaaatatcaataaagaaa

SEQ ID NO: 118789 - DNA, 2230 bp, Cannabis sativa
  modified_base (373)..(379): a, c, t, g, unknown or other
  modified_base (2168)..(2199): a, c, t, g, unknown or other
gaagatccattggtcgactttaaagaataaattggagaacacaaataatacaattgaactagaacctaacatcgtcaaggttgagatcatttcatctaagatcaactaggtgatattgaattgaatagatattacactatgtttacgatatctaatccaagttcaatatcggtccattctgatgcatactccatacatccaacccaagctttctttaaccaatgccctggttaggacatagcacttctccaaggtgcaagtaaactacgttgtagattatcatatcagttaaaccctgtttactgataaatcataggaatacatttaatcacacaatcttgattactatccactgtgttgacaacacaataannnnnnntatcagtgtgataaggatttggataaatttattaatcaaataagtaaataaatgatcacatgaaccagataacacattaaacaagtaatgaaattaaatttgtttctttattgataattgcatagaaaagattatattgaaatagagttttatttagggcacaaaacccgacaggaaatgtatctaataataagattaaccaatgagggagcgaaacccatagtgagcatcatacctgaataaaatgccattcaactctttcaaatgctttcctcatatcaagcttaatggctacaaatccgtcttacctctcttgaggtgtttgagagaatgaatgagttcaaacacaacaagaatgttatccgtgattaaacaagatggcagaaaagcactttgagattttgaaattactgagttaagatgaggcttcatccttaggacaatggtcttggacactaacttgtataatacattgcacaaactaattggtcgaaggtgtgacatagtctgaggctttttagtttttggagttagcgtgataagagtcgtgttgaaagaggaatgatcaccaccatcattgaggactttcaaaaccttttgggtgacattctcacccacaatgtgccaataattggtatagaccattactgacaccatctaaatcggggctaccatcttcactcatggactttaatgcttaaaatacctcatcagcagtatatgactgtgtaggggccatattaatttcatttgagacaaggcagggcactgtagaaaaaactgctcgtgtagcagtaaaatttactcctccggttaaaaaaatgttgctgaataatgtcagcaagacttaattgggaagtatgttccaagctattagagtcagttagttttgtgatcttgtttgcttcctttttgttgtttgccttttgatgaatgtatttagtgtttgagtaacctgatttaagccaagaaatacgagaccgttcttctaataatcctcttcttgtgctaagagttcatctaagatattctcactgatttgaaactctacaaagtgttcatggtctgtgttgttcgagttttgaagggcagcaacattttgatcggaggatttaatcttccttggcaggtcacaaaatataccccgatgccaagcttgcaattgagaggcacaaatggaaatattattcaaagtttgagatgttggatcactggcagccgagttcttccaaaatctagaaatgagttgtaagcaatcatcatcttttaaccataatttctcaaactgaaaatgagatttaaactgttgtatacggtgttggttcgcttgagaaacctcagccatcaaaactctatgttccgaagcatagaagtccaaatgagtaagaataggtacaaggaagagctcaacccatttcacattaatgaatccatagtctaaacatttttccacattagaccctctgaagttgttattgtgccaagtgaatctatccccctcaaactccaattcattaaggccacaaagatcgatgctgtctcaaaatgcatctatttgagattcattacagatagcacctccgagtttttcatcatgagaaataatttcattgaaatcatccaagacaagccaaggcaaaagaggacctaaatcttttaatctttttagaagttcctaagtgaagcctctttgagaaacaataggtgcaccatagaattcagagaaatgccaattagagccatcatggaacagagatatagcagtcaataaagtgttggaaattatttnnnnnnnnnnnnnnnnnnnnnnnnnnnnnnnnttattaacatcctaaataagaactttctaaa

SEQ ID NO: 118790 - DNA, 3874 bp, Cannabis sativa
  modified_base (3271)..(3272): a, c, t, g, unknown or other
aataatcacaacaagatatgaactacatgctttcaattcaattattctcgagaatataacaaagcataactgaaagcataaaaatccaataaaaaaaattattggccaaccaagtagttcataacatcaacaagtaaattacatatataaatgtaatctcaaaagataaaacaagaaactcttactaactcaaaggatcaaaagattataaaatacccatatcaacaacatgtttattaaactacacgacacttaatcatttagttagaggatctgttaacatcgacttggtcttacaatattctaccacaatgtctcttttcctgaccaagtctctaacagtgagatacttttatttccatatatttagaagtactactaatctcattattctttgaaaagaaaacaacaatattattatcataatagattagtatagagagaaaatagaattaactagtcgtatctctaaatcaaattctttaaccataaagcttgcaaagatgctccatagcatgccacagactcaacatatacagtagatgatgtgactaaagtctatttaatactttttcaagaaatagctacaccagcaaaagtgaaaatatagccagaagtcaactttaaatcatctacacaaccattaaaatttgaatatgaataaccaactacttgaagattgtcgatatgcttatacacaagcataaaactcttcgttctttgcaaatatctcatgactttcttggctgcaacccaatgatcatggccaggatcagataaatatctcctaagaacatcgactatgaaagtaatgtcaggtctggtgcaaacctaagcatacatcaaactccctactacacttgggatgttcttcattggttttcgattcaagtcgttcttaggacattgttgcttagtaaatttgtcccttttagaataagaacagaaccaagcttacaaaaaatatgttgaaccttttgagcatacgattaatgtaagctttcttgagataaactaagaactttttagttccttttacgatggatgtcaatccccaaaataaagatatctctccaagatccttcatatcaaaaatggtagacataaaaattttggtctcatttagtaatgacaaatcacttctggcaagtaaaatgtcgtccacataaagaataagaagaatatgacaactcccactgatctttatgtaaatacagtgatcaaatttgttcttgatgaaaccaaatgatgtcacaaccttatcaaacttcaagaacaactagcaagatgcatgtttaagaataaaaatggatcgtttcaattttcaaaccaaatttttatttctattttccttggatcttttaggttgagacatatagacttgctcactcaattctccattcaaaaaaacagttttaacaaccatttgatgtaaatctaaatcaaagtgcacaactaaatccataataattttgaatgaatctttagtgaaaacaagcaagaagttatggtatgtgattaccttctcttttggtaaagccttttgccattaaacgtgctttatatctttcaatctgtcccatttcatctttttagttcttaaaaatccacttgcaacctattggtttaaaaccattaggtaatagaactaactcccaaacatttatttttgtccatgaacttaatctcatcatccatagcttttatctattttgaagaatgtggactattaagtgcttcactataagtgataggttccacaaaatgaccattatcatattctcattctcaaaggtaaacaaaattattatcacaccttgttgacttcttttgtccttgagattttctttgaggaggtgcttctagaataacctctatcattattttgaatgacatcttccacaactgaaatttcttcgataataggtccctcatcaataataggtcgttcatcaattataagacccttgtcatctttgacatcaggagcaatatattcatcagcaataggagtgttattaactagagtaagaataagactgctattattatcatctcttgaaagagacataagaattaaaatttcccttagatgactcccccatttcaagagatgttgaaggaatattttcagcaacatcgaattccaaaaaaattaacagtctaatactcaacaatttgcgaaccacgagtaggatagtagaagcgatatatagccttttgagtgcattggataaccaatgaaataacagcgaactatttttagatctaactttttcaaattaagatcataaattcttacttcagctggagaccccgtacgcgaagatgattcaaactaggcttctcctagtccacaactcaaaaggggttttgggaacagatttacttagaacacgattcaaaatataagtagcagtcatgagtgcttcaccccattagaactatgatagctttgatctactcatcatgcttcctatcatgttcattagagtgagatttttcctttcaacaatgtcattttgctctggtgaaccaggtatagtgtattgagcaactataccattttcttgtaaatattctgcaaaaggactcgtgtgttgtccaaagtctatataacgaccataatattcttctccacgatctgaatgaacaaatttgatgactctttccaattatttctcaagaacgtattgaaaattttttagcatcaaattttctttgatcaagtaggcgaagccatatcgagaaaaaaagttatctatgaagttgataaaatacttatgttagcacaacgtagtggattaagatccaataatatcagtgtgaataatttataacaaagattgaatacagatagcagtcttctttcttctttttgtcaattttctacaagtgcaatcagcacaagtatcccaaccagaagcatcaagaggaggaagaattttagctttaattaatccttcaaactttgcttcagaaatgagagccaatcttttgtgccataataatagggatgtaaccttaatgtaagagctcttacacacattattcacaaaattgaaagagaaggctaaggaattcaatgataatttgaaaagaccaccaaagtgaaaataatttttaattattcaaaatcaaggcaaaacaaaaagaaaattattattgaactaaaagtggaagcgaaactaaattacttttgaaattaggaatcaagaaagtattgtttaaaataatctaaacattacactgtaattcaagaataaatgtnncaacatagataacgtcaactctaatataagtggccactttaagctttgactccctctcacttggcttcctaagatcccttagcgctcagctgtgcttgcttctttcataatttttcctatcctttgttgagcttaagttgagagacatagtaagaagatgcattcttctcttttttacagcttgctttccatagttatatgctgagaaataacgtcactactactacaaaaagtcattttatgtccattaaagttggactagataagtcttcctagtcctttttgtgttggacatagtatcaagggacataaaaagtatatttttcatgtccaataatattggactaaaaaaacatttctagtccaatattgatggacttgaaattgggatgcttatttgatgtccaattttgctggactagaatctatataattttttttaaaaaaaataataattaaattaaatattataaaaataaaatagaaacaattaatacatcatggaaaaaaatcttttaactacatataatcataacaaatttattttaaccattatatataagaaatttttacatgaaaaatccattttacacaatttatta

SEQ ID NO: 118791 - DNA, 1056 bp, Cannabis sativa
cttccgatcttagatctaagatcctggtaaaataatttccaacactgtcttctatagaattgaacctaattagaaaaataccatacgagatcattccaacacgttaaatattttcctttcacatccttcgagctaagccttccaatattgaaagtgggggatttgcacccaaaacataacacactattgaaggcttccagaattcaatttcatgtatatcatcactagtaattttaatcttactagctgatgctgacttcgaaaaagaagtgttcaaattgcgtttcacactaccagaacgtagaatagggggattagatatcttaccttgagctaaattctcagaacaccgattgttagcttccagaaattgcacgctaaattctcagaacaccgattgttagcttccagaaattgcacaaaacctttcctgatatcttcctgctacttgatagatctcaaagaagatttaggcgagagaggctcagggaagaattcacgaatctctagcagtagaactctcgaagcatcttcattatcccttattcgcacatccttagcttcctcctccgtctccgcatctgagaaatcaataggctcgattccaagcacaacatccatttgatttagttttgaggactaaattagaggaaggcggtcccctcttcttcccatcattccatgtcaccttctttttcccgttgatgttatttggagctgcaacactcctgttatccgaccctttcaaaacttcctttctcggacgtccatgactagccatagctctgatttagagatctgagtcaaagaagccctaacagagcttttcaaagaatgggttttatgattaatttaggacaagatttatttaaatatataaattccacgcatgtgcaccatgagccattcgactttggtactaagacaagattactcttattcaactattacaaatattacaatatcaaaatattaagggtaaatactattttagaccatgtgttttgcaaaagttattaattggaccttctattttgttaagtgacaaaatggacc

SEQ ID NO: 118792 - DNA, 2292 bp, Cannabis sativa
cattgttttagaaattcatattatgatgttaatgaaacatacttgttagtaaatcaagatcctggtaaaataatttccaacatagataagttttgagcatgatttctaagtggaattaagtttgtttgtgcatgatttagttgatttcatggctttttggaggagatttgggttgttttggggtgaaaacaaatttttcccatttctgccagctgagaagcaggttaatcagttttataggtgctgtaatttggtcaaacagtttgccttcatggggtaattttgggttttcttctcaagtttgattacagttcggagtatcttccagagtgtaattcatagtattttagagatatttaagttagtttgatccagggggaaatagggttatccggtcatgagagttagggtttgttcccgagaatttaataaaggtttttattaagttttggttgtcatgacataggacctggattgcccaacttgttttccactcaggtcggcccgcacacttgagttctgggttgaagtaagaaaaaagtattatacatcacttcggattaagtgattaacatgagtatggtaagcctcgattctcagccgcgatgccacgcccggtggacagggtgtttctttgattgtattttgaaacgtaaagtttatgttgcaaaattattttgaatctaattaatgtaagtattttgttacgagggggtccccataaagaatagtatttaacttttaaaaaaaatattagaaaggaatcattttaaatggaaaattttatttacccacaatttttgtataaatacctaatttatcaaataagaattttataatagcacacacacgtggcgttcgtgttggacagggcattacaaatgtgatagcttcaatcagtacttatgccaaacatacattcaccgatatccaatataaatctatgtatactgataccgccattctaaagtaatctaacaggcaaccataaacatgtaaactaaacatgtaatcacataagcatatcattatactaatcttacctctatcccgaatttaggtgtgtcggtcaacctgcgtgatacacaaaatcactttttgggtgcttagaataaaaactaaagtttccctatcgatggataacatagtaataccctaaatattacaaaaacaggataatttagggtaccctaaactgccccaaccagtaaatcgattcccaacccgaaaaccggttctatggggtcttcctggggggaaccggtggaccagttctaaagggcattgctgaattggttgaccggtttagtgcaggaacctccaaaaacttcacaaagaacttaatttgaccccaaatggtgtcaaacctccaaagtacctattgatgcctctaggaacatatttcaagcaacaaaacgatatacaaaccctagaaacaaaaattaccatgaaagggcaaagtttgagctcttaagctcaaactttttccaatcacaacaacaagcaacacaccaaacttaaatcagctcaatcaacttcaatttaaccacaagattaaattaacctcaactcgcacaaacagaaccctaactcaaaattgcacgaacaaaccatacctttctatttaaaaacccaaggaagaagagaagaagatcttacctcaccaaaatactagaatcaaggttactaaattcctatagaattgatccaaaatgaagaggaacattgactttccccctttggttcttggtgaccgactcaagaagagagagagaaagtggttcaattttctattttttttctactttaattaattaaaacctaaggaataagtatctaataaatccatatattcaacctattataaaaagaataagcttggaattacttaaaatacctaataaatcaataatagaaaattagggtaaaatgaccaatttaccccttgcttcctcaagaagtaaccttgccacctaatggaattacgatcaaatctaaaacgtcaaatattcccgacattcacagtgtctatctaagctaatagtgttggaggcaatgctagacgctaagctaccaatccaaccttttcgaggatcttaacaggccttgtaaacctagggtataacttgccctttttccaaaattatttaatccccttcattagagacacttgtaggaatacgtgatctcctaccagggccggccctgaaaatatatgggcccaagacggattaaattttggggcccttaaaaatatataaaaaaaaatcaaaaaaagagtgttatgggatt

SEQ ID NO: 118793 - DNA, 1235 bp, Cannabis sativa
  modified_base (69)..(70): a, c, t, g, unknown or other
atccactcttagaacttagaattcactactacaaaaatagctttttccatcggtttataactgtctttnntactatttcccaacggttcctaaaaccgttggctatgtgggtgtcataaaaaaagagaactttaaaagacagtttataactgttgggaaaagccactttaaatgacggtttataaatgttggaaaaagttactttaaatgactgtttataactgttggcaaaagtattacttggattaaattaaattaattttttgatatatattttcttaatattaaatatatataataatattcattttcatcaaaaaataaataatattaattaaaataaataaatttaatatattttcatacatatttttacaatatacatacatacatatgatacaattcagaaaaaaaaaatactacaaattaaaaatatatataatcaatatcaatattacaaccgaaattgtttaaaaaaacttaagtgaaattaactttaagctttcatcaagcaaaaaaagagcctctccttgagtaaccctcaccataaccagcgatggccttccttattatagtgtacgaagaaattaattaagatgaagccgatccatatcatataccatccaatcatccatccatctcaattacctgaacaatgtaaaatgcattattggtcatgtataataattaaatatatgtatttatatcttttaatttcaaacataacatttgttgggaaaaaattagaaaaagacccaaatatctagaccaaattaaactagggagatacagagaaattgaaggagatgttattggattttgaaattaactctctcgaattaggagctgaaacttttctcacaatatataacaatattcattaataaaaacaattatacatatgcatatatataacttacatttatgcattgatcatctgtgactttcgtttgtttgggcttttttttcgaacgaagcatgcttgaggatagggttgttgaactggtgtagctttcttcgtatactaggtatggaggcggcacggtttgttagggtttttttttttttgaaaatttgttagggttagaaaataaaatgtaaataagatggagagagaaagagatttgtagggtttttaattttatataataataataataaataaaatatataagtaggagagagatataataataataataataagtctttactctttgcatgctaaaaataat

SEQ ID NO: 118794 - DNA, 799 bp, Cannabis sativa
ttatataatatttgatacatttgatacaatattctaattttttagttttcaaataattataaaaaatttaaaaacttatttttttaaaaaaaaaaattaaattcggtttggtcgatttaaactgtggattaaaacggtcaatttttttacatttttataatggtcagtcggttttcggattagaaccataaaaaccgaaaactgaattttggattttttttttgtgtaaaaaaccgaccgttgctcaccccttgttaacttggactctgaatctaaacttcttacaggtttcttcttccccaatccttgtgtttttcaatatttttgctagttgtgtttgtcttgaactttggacagctaggaacaaagcctatcataaaggcctcacatcgacggtggctggtgttaacgccttggtttcctcttctctagcacagttgaaccaagcttaagaaaattcttttaataccgtttctgctattccttgagacagtggtagacccaggatgtgatgtaagggtgggctaaataaaacccataacaatttatgacaagttgtggccaagttgtattggtatagcaatttcttctcttgctagtggtcacaagtccaattttaagaacttatactttgtaggttttttttttttattttagaaaaaagaacgagtggattcaaaccataatctgtcatataaaattaagggattatttcacaaatacacaaaaataacaaaaagattacaaaaatacaattttacgaaattttaaacattcttacaatttttttgattttatt

SEQ ID NO: 118795 - DNA, 2343 bp, Cannabis sativa
  modified_base (2137)..(2143): a, c, t, g, unknown or other
aaacggtagaccgtttcatagcagaaaaatccaaaacttgacttttctagttcatttttaccccaaaacataccaaactttccagatgacctatttacatcataatgaacataaaccaactaaaaacaacatcatcaaagctcagaaatcaaaagagctattgttgagcaagctttgagttttaaactcaaacttgcttaacaccaactacaacaacaagtaacaacaaccaaaacaactcaaaataagctcccagaagagcttctaaacaatccaaacccttacagaatcaatccttcaaaattacagcacaaaaccaaacttccaacttagaaattcaaagagatgaaagagctaggattaccttttgtttcccccacaattctacttgaaatccttcctgaattacccttgattttggtttgaaagtataatttggttggggttttcctttagatgctcaaaactgagagagagaaagacaggttttggtggagatttgattttctaattttaatattatccttataattctcatattaattctaagttaaaaatcggattataacatttaaaagaatttctagaaatctcacctaaatagctaatatcaatcttaggcaaaattaccatatttccctttatttccctcttaagtatttaaagtctaagggtaaaatggtcaaaacatataaccccacccaatcttaatattctaaatttctaaataacttgctatgctaattcaaagatactcaactgtatccatgttactctaatggccaaatcgtcagatgccactatcattgggcataaaacatgaaaatattaaaattcataattaacatacatgtcacactagaatacactaaaatctacataaataagaaagtatatcacaaatgtctatttctaacaatatgtcttattttgtactaatacacatatataacataaataataattaaatcactaatcaactactaatttccatgtctaaatatgtaatcattacaattattctcctattaaaaggatttattcctcaaaatcaaacctgagaaactcaggatactaagtcctcatattggactccaactccagatggcttcctccaccttattatttttttcgaagtaccatgatcaacactatggtcttattccaaaagactttatctttcctattgaggatctgcactggttgctcctcatgggataagtttggctatagttctagggcttcataactcaaaacatgagttaaatctttcacgtacttccttaggatcgacacatgaaaaatgttatgcactactgatattgcttaaggcaaggctagatgataagatactaatacaaccttctcgagaatctcaaaagaccttgtaaacctagggcttaacttgccattctttcttaaatgcttcacccctttcattagtgatactcgcaggaagatatgatctcttacctgaaactatatgtctctgcggcttggatctgcataacttttttgcctattttgagaagtaatcatctcgaccttgatcttctctatagcctcactggtccattgaactaattttggacctaaatacttcatttctgtgatttcatcccagtaaactagagaacgacactttctaccatacaacatctcataggaagccatccttatagtactctgataactcttgttgtaagaaaactctatcaaaggtaaatacttactccacaaacctttgaatccattacataggcttgtaacatatcctccattatctctattgtcctctcggacttgccatttttctgagggtgaaaagttgtactaaattttagattcatacgcatggccttttgaagactttcccaaaacttggaagtaaactttggatatttatccgaaacaatggacttcaaagccccatggagacgtattatcttcttcgcatataacttcgcgtactgctccactatatatgttgttttcacaagtaggaaatgtggtgacttggtaaactaatctactattacccatatcgaattgtacaaacacatagtcctaggtaaactgtaatgtacatagttgaatcgtgggaatcagtagatgttgcccctgattttgcccaatnnnnnnngaccaaccggacagggacacgtggatcaaaatatcttaatacttgaattatttgctaagtctttatgaaagaaggtagcatccaggacgtgcctcccgttgaaggcatacggagccccctatgctcccggaagcctaagtaacatcaaagcatctccgcgaggcgtcaggcttcccctgagcagtcattttgcatttaat

SEQ ID NO: 118796 - DNA, 1125 bp, Cannabis sativa
atataccactattatacatatcaaaatacaaaataaatatcatctaagaataataatataccatacaacaaaatagaaatataccgtataacaaaatatatatactaacaatccacaacaactcataaaaaattaaaaaaatcgacataacttttaaataatttttttttaacaaaactaatataaatattccataatctttaaataatttgcttctaattaaaaagaaaaaaaaaattatgatttttaagggttttttttcaatattatacttacaattgattttatttataaaaatacctttaagaaaattatttgtacaaataccgttatgccacgtcagcatacataccaaaattcaaaacaattaccgaaaatagaaaaaactagaaaaatcccatttccaaaaaaattcgcttttagggagttttgaaaaaagcaaccatttagttacttttgatgtgaataagatatcaattggttacttttccattaaaaattttatttcagaattttacacatatataaataataaaataactattttaatatttgagaaacatatatttttctatttccaaaaaatgaccactaatgtgaaaagattttttttttttatatatatttttaagctgtattatgttcttttattgtttaggataccttgaggtggtcttcgttccttatgaaattggttgatatattaaatttcgtttaagttaaagtttgattatttttgttaacaaaatccatagaaaataaacttaaaaattactttttcgggtcatttgtttttgtagcagtaaaaaaaaatatgattctcacatatcaaaataatcatcataaaaaatagattgcaatactacaatttttgagtcaaaataataaatagtgtggtggaattttttttataaactttaggaaaaaaaaaatattatacgctgccaaataattattagtgtgataaaaaaaaaatcatttttaaacttataaaaaaaatagagtatttttctaatatttaatataaaaaatagaaatttttacatgaaaaatccattttgcacaatttattacctaaatacctctacacgcctatgtctatatttttacttacaaagttggttt

SEQ ID NO: 118797 - DNA, 2993 bp, Cannabis sativa
taatgaagaagaaacacagctctttgttgattatttttattgcccaactacaaaaacaacttgagatttgttatcgtaaaaaaaaaaaaaaaaaagaagacttcaacaatactcatgcatgttttggaaatagttgttaaaaaatggacctataatgaatgaatggactttctaattcctttctcaaataagcgttgcggtgactcgtatgttgttattttttctaatcaacaaacgagcaattataatttcaagagtgatatcgttcgtcatgtaaatttaagtttataacatagtctattggctaaaaacaattataatcggtatggttatcaacatatcattattattggtcaacttatagttatatatattttttgtaacttgcttatttatttatttatttatcaataaagtgcttcattaatcaacgccaaataattacaaactagaccaggttatcacctcatgataagggtatttatgtattaatggttcggtttggtccgaattttcattttttttctaacaaaactagtaatgttggtttgttaaacttcaaaaccaaatcaaaccaattaaatgctcaaactaaaccaaactaatccacttaagaacggatcagtttatttcgaaccgtagtttgtaattcgtaaatgttttaatattttttatttgaattattttactttaaagcttataatacataaataacaatgaaaataaatattgctaacacaatgttaaggtaattatcaatactatgcctaagattgttcctaaatatcaagaagtaggcggtttggtttattttgaacaacaggcaagaattttaaaatcgtgaccaaatcagagaatttaacagtccagattgaccaaactattaacactagattcgtttggtctggtcttcaattgtttggtccgaattaggtggggtttgttgactgtaaatttagccaaccgactcagagtctgactaggatcgtagcttacggttgccacatgtggaatgataataaatgtaaagagacacaaaaattttatagaggttcgaccccttttgttaatttagataatggcctactctcattttagttgtatttactattgagataatatcaagcacttggcaaggctctcttcagtattacgataaagtttgcaggtgagaagtgtgaaaagagagaggacttatagctataattcttatcagcatatttgcatcgtcaattctaagtatgtatcttgccctttatatagtggtagggcttacaaagttgcacatagagatgcccctaaaaaatagggaggttacaacgtacatttgaattacagagagaatatctcctaaaaacttgggttgttatttattgatggagagtcctatcattgtgggtagtttgaactgatctaaaaaatgtagcatgttgaaagtgagtgggaaggcttgtgagaaaaatacaggtgtttgtccattcttaaagctttagctagccagccttgttgaaggctgcccaatgcatggaagttgtccctcttggtcggccagctatatgtccggtcaggaccttgctggcaggtacatggattcttactggcctatatgtgttgtgcaacatatgatttcatggtctggaaagctactcggaactagtcctaccaggttaatgatgcaggcactaaccgagcaagttggaaggctgtatgcacttttagagatgttctccattccaatatcatggtaggggaaccaattccatcttcgatcagtgtatctgtccattttgtaagcacctttaatttgattttgggcacttggtacagtctttcctagcttggtcaaaacactcctactgcataatctttagaatttaggaatactcttgttgtccacgtttcctgatgaattcaacatgaaagccacagaatggtgccatgtcagatcaaaccctgatagcacagacctttctctagacaaggtcacggaagatactgcagtatctgaaaaagtgcttctcctacaaggtcgaggtaattctggagattctcaccttacagcttcgtattcgggagtaaataagagtcgcatacatcccatgatggttgcgaattgtctaaactaggaagaccttagtcgagccttcttgaaactccataaggctaaatccagagctaagcctgacggttgcatgtctactgacatcaaatatgatcatgtcccctgcgttagaccgtggttatgcgtgtacatgcctctatagtgtttattgtccaacagcttgtctaagtaattatttttaaaggatagtcctttgggcgacatgtgtcatgacctttacaagatatcttgcactgatcgagcaccacaggatgggaaatctacctaccaaatcagcggtcatatgctcttattgtgtattcagcctttcttgcgtgttgaataagaaaccctatgttggtaaaggttatacccttacccacatgtgtacctataaatacctttattttttatgtactgagggtggacaatttttacttacaaaacccctactaaaatttctagagagctttcttctttgagagaaacaaaaggaatatagagattaccatagtaaacacttataatactcaaatacttgccaaagagggctaatacaactgactcgtggactaaggatcattaacgtctgaaccacgtaaaaaatccatttgtctattatttaatattttgcatttctagggataccaaagataacatttttgacctcctccattgtgaatttctacaaaagtaactcagcatgagcttgataaaccatatctccatagtattccaggtggaactgatctcctgttctccatagtagatctcagtagccttttgttgatggacaaaactcatcaaccaagttagtgttggaataattttactaggatcttagatttactaacaagtatcttatttaatatcctaaatatgaacttctaaa

SEQ ID NO: 118798 - DNA, 685 bp, Cannabis sativa
atttgttttgtttatgttttttttaacatgcccaatggaaatcggtctcttttttacttttctacattttagtttgcctaattataatttttatcttccaaattttaatatatactaaataatgtttttaaattttaattctctcaaactattaaaatagttagatttttaaaaaaaaaatgtccatttgtattaacacgataattgttcacgtattaaattgtgttttcaaattttaatatcaaccaaatcgtaccccaaattttaatatttattaaattgtggcacttaaattttcattcataccacatttttttgttagtaaaattgaataaaaatatttaaattcaacaattttaataatttgagcagaatctttaccgcgaaaaagaatattattataattttattgggtaaaaaattaaagatacttactagaaataaataaagaaaaatctacaatacagccatgtaaaagatgtttccgtatactttctttttattttgttatttaaaataggagagttttttagtataaattttagggtgattctacactgcactcccttaaaagtgatgtacaaatgcaccattgacttgtttcggtatccagaagaactttttaatctaatttttttcatattcatgtacgttatagctctataagataacctacaaaattttg

SEQ ID NO: 118799 - DNA, 2109 bp, Cannabis sativa
  modified_base (2070)..(2074): a, c, t, g, unknown or other
gagagagagagagagagagagtagctggggtatttcagggttttcttcgtataaaatgacaaaggagtagttgttgggggttttattatgctcggggtatacgtgacggtttaaaactgtcgcagatttttctcacgagtgttctaaaccatcaagaatatccaatttttttcggcaatttgaaactcttatttaattttattaggaacagtctccgaaaaaaatattttgaggacagacaggaatacccaattttttagtagtgtacacgtatttacaaaaaaaataaataaataaataattgagaaccaaactatacaatagaatgttaagtatatcatacacatatttaaataaatttagatttaaaagttaaacctgattaaaataaatttagaaaacaaagatgatgatgtcgacagtggcaacaacatcatcttggaaacggcaatgccaacatctcaaggacaactatgacgacaatgggtacatggagacgatgatatggcaatgaaaactatgagattgaattttatggcttatggtattaatttacatatatgattaaattttgtaacttattaattcctcctaactccacaatagatttaaaattgaactctcaattacatagaacgctctatacaccaaatatataaatattatgaattatccattgtcataatctaaataatcaatgaccctctataaacggtttacatcgaattaaagataaatttactgttttaccctctgatgtattttatccttaaaatacttagctccatgtaaatgatattttgataaaataatgtaaatagtaaaataatagcccttctatttatattgtttagcctagctaagatctaaggaagctatcgcttcacttctaaatagttatagaagctacaagttctatatctatgattaacactcccacttaattgtattatcgagtttctaaaatgtaagtatgaattagtcctaccggtaactagtaatgaacaagtcaaagaacctgtacattacaattaagttaaagcttaatcatgtcaaggttagatcaattgatttaaaatcaactaaatgagattgacttagaaaagatataatggtaagtttatgatatcttttcactgtcaatatcggtcaagtctgatgtatagttgatatatccgatacaaatttacattactaatgttgaggaaaaaattacacttatccagttgtaagcaaaacatatcgctgattatcacgtaagtgtaaaagtgcactcatgtatcgtggaacttaatagttttgaagcatataattatgattaatttttactgtgtagacaacactatacataatcatgagtaactatatgtttgtgatttaatagaattatatattaaatatataatcataaatcttgtgaatcaagcaacataaaataatttttgaaattttattaattagtaaatatgattatattaaattaagttttatttagggtataaaaccccaacaagctcccacttatactattataaaattagaagtgcatttcaattaatcacatcttcttgatgtgttgatcaaatgtagtatatgttattatctttgtaataggatctgacatatgtgttatcacgaagtaacactatcaattaatccaagtcaagaataatgccaactttagattctgaataattgtctagtaacctttagggcaactttaatattcagtatgactagtagagttatatattctaaattggcttttacacttctccaaaatcactgctccaccccgaaagcaatcaccatctcagatgtagactttttaacattaatagtaattttgaaatatgggttggtgctgcctgaagggttttataaacaccatccttatagactaacacatagatcctcttttattcttaaaatttattttattgtcctctaatattcctatctctgattagactgatgaatgctcacgactctcattcaacaacatgtatctgatctagtgcacactaactcttacataagacctctttattgggctttgtgccctaaatnnnnntctatttcaatgtaatcttctatattcatttatca

SEQ ID NO: 118800 - DNA, 548 bp, Cannabis sativa
attagggttaaaaagtagaaacgtagcctgacactcatttaatgtaccctgagacccatctaatgtatcatagaattcattccgtaaaagtacattacgggaaaaaaatcatatcctatatatatatatttggctaagtttctccttttaatttttgtccttagaacttttttagttgaatttaaattttttttgtctaattatattaaaaaaagtttgatgtgaatgaaaatttaaaagcgcaattccgtgcatgttaaaattcagggagtataattttataaatatcaaaggttgaggtgcacgatttaatatataaacaaatcattatactagtaaaattaaataaaattagacaaaaattcttaaatctaataatttaaaaattttcaacaatttaaaaagttaaaggtatcatttgttaaatgttaaagggtatgatttgttactgtgacagtctgtagtcccgtgatctgtaggggaaacaccgggtaagttgtgcaatcccacatcgcctgggaaggtcaagtgtgatgattctgaggctg

SEQ ID NO: 118801 - DNA, 926 bp, Cannabis sativa
ttattattattacaggatattaaagtaaaactatctaaacactatcatttgtaatacttaatcctataaatgaaatttttagttgtaaaatactaaaaataattaccaataagataactaacatctacacaaatattgaaatatacacatatcatgttattattagtttacataattttaattattacaatattaaataaataattctaaaataggaaaattaattaaaaataataaataaaatctaaaaatatatattttcattttttttttcatttttattattttcctgtgacatgtaatcttaattttccatttttttcttcaaacccctctgtgcagaacaagaggcttcttcttctgctcacgctagcaatgaggcttccatggtgtttcatcgaaaccccttcgcccataataaaagcgatctccttcattttggttctctttcagatttttgttcggattagattggattttttttagagattgaccattgatttgagaaaaaataattagaaaaaattaagattgttgtgtttgatgaatagatgaaattggagtttatttttcttgtgattttgttaagatttgttttgttcaatttgatctcggtatgcttacatttggttgtggtgattggttcaatgtttatagtatttctcttttagtggtggtgataatggtgatattgtgaataaaataaaaaattagagaaagaaaattatttttattattttagttatttccaaactttttattttttatttttaaattatttttataatatttaaattattaaaataatatggaccaataaaaatttaacatgtgtacacaaatgtactgtcagcagtccatcctcgcacttaagaagtgaggtttacataaaaaaatggtaaatatcattttggaccttatgtttt

SEQ ID NO: 118802 - DNA, 1334 bp, Cannabis sativa
agtaccttcaatatttgagaggaggttggaatgttcaattagaatctgactcgtgaaagaaactgtggaagctcaaggtccctccgaaagtgttccattttgcttggtgtgcactgtcaggctgtcttgctactcgaacacaactatacaacaagcatctccctgttgatatgcagtgtatcttctgcagtggagaggttgaatcaattctccatgttcttgttaatttcccctttgctcgttcatgttggaacagatctgcaattgatctttttccttctgctgctacggtttttagtgactggtttgctaagttttggtcaaaaaaagaggtggagcggtagaagaatttctgatggtgggatggtcaatttggaaagctcgtaatgagcttttatggaagaatttcttgcagtctgctgctgctgttgttaatttagcacataagattcttgatcaatggagatatgctcaatcttgttgtattgagctactactacacgaatcggatattgttggcagcaaagattgttggactaaacctgtgttagatgcgataaagattaatgtagatgaaactacttttctgcaaaaaactcatatggaactggttttattgctagaaattgtgatggtgctgtcatggaggcttttgctacgtattcaattgtggctcgcaagcaaccgtggctgaaatgatgagtattaaggaagccctaagttggataaagaggaagagtttgaacaatgtagtggtggagaatgattgttttgttgccattcaagctattaatggctctgttgacatgccatctatcttcggtcttctagttcaagattgaaaaaatctcttattttttttgaataatgttaaagtttgtcatgttaaatgatatgctaacaaagccacacattttttagcttatagttcttgttattggtctggtcgtatgttttctgagagcaatattctttctgctcttcagtccattgtaatagctaatttagctatttaatgaagtttctaatttcattaaaaaaaatgcaatcttattattattttttttgtttagttactttttttttggttagtttttctttatatatattagacatcttggtcaagcatgcctttgataatgtgtcaaggtttacatcccgacaaagggatgccattgagaaactttgggcgtctatacgaggacaatacacatgtagaaagtgataactctatggtatagagttattttttatgcttttaaactaaaagtattgtgagaagagtagtgaaaatgtgtttgtttacttaattttagttagttttagtgttattt

SEQ ID NO: 118803 - DNA, 1766 bp, Cannabis sativa
  modified_base (1735)..(1740): a, c, t, g, unknown or other
tttgccatcggatatcaaaaataatcttctaataatgatggcttaatatttttaaaattaacatttatagttaaattaattttgtacccatcaatgggtagtacctattaagaagtgttctatatatatatattatatgtcttgaatgcttatgcgaaaatttcaggagcaataatctaataggaaaggataatgcaatgtttcaaaaatactataacacatcaagcaaagaatatcgagtacaaaaataagactaaaaaatgtgtaaatttgttttgaagatttgaacaaaatgaaaatacatataaatagagaaaagggagagaagtattgttccttactgatatatagatagctatttgatagatggagattaggaagataaattgaaaaaaagttggcacctgaataaaaataagttcaattagttaaatgataatttttttttaaacaacaagacctgtaacaatgaagaaaagcaaacaacacaggttacaaggtctacaaaggctaaggaacacaatggtttcacagacactctttatcagtttctaaagcagcctgggccaagttatgtgctagcttgttttttcccttgggataaagtgaacggaggcactaggaaagtggataaagagtctatgatctgcctcaccaaatccgtcaaggtcgatcgatctttagctttcttgtttattttagaagctaggacttgacagtcggtaaccaccaacctgatagggaaatggactgcctggcaccaagcaagagcatggtgaagtgctacagcttcagcaaaaataggtggcagtcctgagatggcagaagattggaaaccagcaataactatatcagaagaatcttgaataacagctctataaccatgaagggtatcctcgcttcttactggagcatccacactcagtttgtaaaaacctggttgtggaagaaggctttcttcaatcgactcgcttgcagtgtgagcttggagatttttgtgaggttggggcaggaactttgattgggcttccttataatcctgcaagaaagaaatagtaacaggctctatctctttataatcggacttcccattctgaaagagagacttattttgatgattccaaatagcccataaaataccaaataaagctgccaagtgatctttgttgaaagtttcataaccacgtaagaggaattctttaatatcacagtatttatcagtagaataggaggagaaagtagtgtgcttcaagtatttaccaactctagaacactctaagagggaatgggaattggaatcaactcgactgaaacaaaaggggccgtgggagtcctagagaatcttcctagtgaagaggttaagcttagaggggagaagatggtgaaaagctttccaaataaagtgtttaattttgggaggaatatttaaggaccaaactgatttccaccacttcttgaaagtgtctgcattagaggaactagggctggagtgagtcgtgttggcaaggtggtaagcagagttgacagtgagagaacccgacggatcatgcccccaaatgagacagtccttagaattggaattgataggtacactaaggattagcttaacaaaatcactgtcaaaatgggtggtgagtttatttaggtcccaaagaccatcctcagtaatagaataggaaatagaagtatgttggaaatattttaccaggatctagatgttaggttttatgccctnnnnnnaactccatttcaatgtaatctatttt

SEQ ID NO: 118804 - DNA, 3796 bp, Cannabis sativa
attatattagtttactcaaatatcatttataggatcatttataggaagctaagtattttaaggataaaatacattaacgggtagaacgataaatttattcatattcaatgtaaataaaatatagaaaatctttgattattttaattcaaacaatggataattaatagcatatctatatttggaatacatagagcattctatgtaatcaacagtgcaattcaaaatctatagtggagtcgggaggaattaataagttagaaaatttatttattaaattttggatctacctattgggagcttgattatataggcccatggtctccgcaatgtcttgtttattgaatagatagatttgacatttataggattagaattaaaatatggcatttgtgacaaaaaaaagataaattattaaattaaattgtgaaattgaaacatgtggggtccactcatatggcttgccacttaaaagggattattaagccattattttttttttaatttaatataatttaaatcttaaccttagaagaaatcctataaataaataatgataggctattacgagatcgaaggtgcaagggaggcaaccaacatctatgaagatgaggaaagttcgcaagaaaggccttgtttctactgttgatgccaaacaaaagcaaatcaatggatgcggtgattggtatcgaaccgatctatttcacggatgaggagagtgtcaatgaaggtgatggccgtgaaccagatgttgatctttttcaagcacctttatctccaaaatcctcgcttagcttgatccaaaggcaagaagaaattagatctaacttcgccactttcgtggaggcaaatgctcaatgcaacaataacatctcacaaggtaaggcctccattcctccaatactgggatctggtaatattcaacgatatttggataactcatttaagaatttggagaaggaaaaggtgaagataactgatgaggatatagaagaggaggttaacttctggaactcaacaattgtttgctatgttcttggaactaatcctcccctttctgttattgatggatttgcaagacgtgtatggaaagataggattgacaaggtaggaatgatttcacatggagttttcttgatacaattttacaccatagaagatagggataatgtgctaaacggagggtacatcttttttaacaaattccctcttgtcatgaaaccgtggaattcagatggtaactttaaaaaggagaatctcaatgtgatccttattttggttcagttggaaaatctggagttgaagtactgggagagaggtcattatttaaaatcaaagggcaatttggaaagccaataatggtggactcaattaccaaagagagaggtaaactaatgtattcgagaattcttattgaagtctcgatacatcaggatctacccgagcttattgattttgaagatgaacattgctacaacacttctggagtcaattatgagtagaaattagtgtgttgtgagcattgtaaaggattggggcagaaagcgattgaatgtagaaaaaagacatgtggtacataagaatgggtggtgaagaaaaggcctgaggagccaactgggacagacaagatgcagatgaattcagcagactctgatggcttccagccaattcaaaagggctggaaaccaaaggagactcgacaacctatgatgactataacagaaaactcatactagattttagaagaagatgatatggaggccatcaattagaccataaatgagaaggatacttcgggaaagaagaaaatggttaacataggaggagggggagatcagccactatccaatggatagaattttatcgtggaacgtctagggaatcaacaaccaacaaaaacaacaaatggttagagtttattaataagaataaggtttgtttggttggtctcctcgagacgagagtcaaggctcctaaattaggagacttgtacttaaacttctttcaaggatggtgcttcacaacaaatatatcatggcacaaagggggtagaattttgattgcgtggaatccaagtagctataatgtaagtattctaaagtgttcaagtcaactaattcatgtggatgtagaagcaattgatgggaattatcaattgcactaagctttgtgtatgcttataatgataaagaggggaggaatgctttgtggaaagacttgcatgaggtggcacaacacgaaccttggttagtcatgggggacttcaatgacattctagccaaggaagaaagaatagggaacagagttaaatatcatccttcacaggattctattgattgtgtttctggctgccttttggaggatgtcaagtcttgtggcaatttctagacttggagtaataaacaacaaggagatgagagaatcttttcgaagattgatagggccatggcaaatcagagttggatggacaaatttcctaatgctgaggttaattttatgaatgaagagttaatggacatactccagctgttatgacattccataatatgcttcctagtggaaagaagccatttaggtacttcaaaatgttgaatactcatccggattatgcagcaagagtggcagcatcctggaatcaacaaactagggacttaaaatgttccaagtggccaccaagcttaaaaggttgaaaggggtgttaaaggagttgaataagcatggtttttcagacatccgaaaggctacacagcaggcaaaagagactttagctaagatgcaaaataaattacagcaggatctattaaactagatgttgcagtaataagaattaacagccagggaagattacacagccttactaaagaactactagtcttatcttcaacaaatagctaaggtcacatgccttaaaaatggagatgaaaacacggctttatttcatgcaagtattaaaggcagaaaaagacagaatagagtgctttcaatacagaatcaagatggggagagacttgcacaggaagcaaaaatttcaaaggcctttctgtcatactataaagggttattgggcactaaaatgcagaggagaagaactgtgataaaaatcttggtgcattcaggggctgttctgtcaaaccggcttgctagttggctttttcaggactactcttataaagaaataaaggctactgtctttgcaataccaggaatcaaagcaccaggtcctgatggctattttcaagctacttttttcgggataattgggagcttattcaaggagatgtatgtgcagtagttcagaatttcttgcactcgggacagatattaaaggagatcaatttcactgtgcttactctcattccaaaagttaaatgcccaaatactgtaagtgatttcagacctattgcttgttgtaatgtcatttacaaaattgcaactaagttgatctattcaaagttgaaacatgtgcttcctgaattagtggctcataatcagggggttttacatagggaagatttatagcacataatattatgatttcccaagatctaatcaggcactatgggaggagaaacacaaagcctagctgcatgatcaaactggatttacaaaaggcgtatgataccattgattgggatttcttaaaagagctgttgagggcttttaagtttcctatccaattcataaagcttattatgaattgtgttaggactcctaagttctctctgatgtttaatggaacaatgcatggattttttgagtctaagagagggctaaggcagggggatccactatcccctct

SEQ ID NO: 118805 - DNA, 1638 bp, Cannabis sativa
ggttcgtcatttcttgtggcgagcgtgttctggtagtcttccaacgaaggttcagctccaaacgaagcatatcaatgtggatcttttttgctcaatctgtgcagcagccgcgcctcctgctggtgcatcagatgactttgcagcctggttttttggtctgctcgaagggaatcaagttgatgtggtggtggacgctgctatgatcagttggagtattcgaaaaactcgcaatgagttgctttggcagaagaaaacacgttcaactttggatgttatgaagtcggctagatcagtccttgcaaattggaagattgtaaactttgagttgccttatgcttattttgctacgggtgatgttactaatagcaatctttgggttaaaccagaacatgatactatcaaggtgaatgtcgatggagccatctttgaagcgcaacaaaagtttggttttggttgggtggctcagaatagcaatggtactcttattgaagttgtttcagggagtaggttgggctgtgtgcttcctgaaattgctgaggtaattggtatcaaggaagcgttgagttggatcaagagtaaaggatggggtaaggtggttgttgaatctgatgctttagttgtggtccaagcaataacaagttcacttcatatgccatctcaatttggtttgttagtgaaagattgtcgtttaattttatctactttaaataatgtccaaatttattttgttaatcgttctgctaatagggccgcacattgtgttgctaaggggtcttgtttttcgtcagaacgtactttctatgagcataatgctccttcctctttacgagacattgtaattgcggatgcaagttgattatctatgataaattcctttttcaaaaaaagaaaaatagtaaatatataataggtgtgattggtttaagatttgaaaattattttatgtttttaaaaattaaaatggtgggggtccacctaagaattattaattggttgagtgttttcaaaaacaaaatttgaatattaatttgagttttacgctaaaaaatgaaaacacattatgttttatgttttcaaatcatgaaatccaaaaactctccaattattctcttacttttttattttgagattctcaaccaatcacatagaacacattatgttttatgttttcaaatcatagaatccaaaaactctccaattgttctctttttattttgagattctcaaccagtcacatatttagaaacaattttttacttacaaaatttaaatttttgtttccaaatatctttaaaaaatataatttttcaatcacaaactaatatgtaaattaccatatgtaatgacttctactaagtttttttaatttttacgtctcttttttacttttcattttgtatatttagcttgttttaaatttaaatttaaatattatattaatttttatttttacgttttactccttaaactactttgtcttttcttctcaatcttatttatgtctttctcgtgatatgaaggaatcaatttatatatatataaaggaaagcattaaggagttgaggtggcaatttgtatgagtttttcaccctcttccttgatttctcaatttctcaattttctcatttatttataatt

SEQ ID NO: 118806 - DNA, 1744 bp, Cannabis sativa
gaagatgaaataatgatgagtagtggtaatactactcattcaggccctcctaggaaaaaacttcgtctctcaaaggaacagtctcgtcttcttgaagaaagcttcagacaacaccataccttaaaccctgtaagcctatatatacatatattaattaatatatgcacttgttaataataataattaataaaccgccaccaccaccttcttcttcttttgaaatagcccttgaatttactttttttttgttattatttatactaattaattacttatataattttaattgcagaaacagaaagaggctttggcgttgcagttgaagctaaggccacgtcaagttgaggtttggttccagaaccgtagggccaggtaccgtaccatataataacctaatatatatctatacatatatatacacacacatttgtacatatatgtaataataacatatatggtgagataaggtcacgaaaaatataaatatacataatacttttttatatatgaatttgttggtggttgggatttaagtaaggtccagatatttagcgttgacagaatatattataactgttgaatataaatatatatatatatcacaaagtatgtgcataccatctgaatctgattctactactcccgtatctttcgtaatctcctataacataaaactctaggcccagctttgatgtttacagtttcgcttttagactcatttatccatatatgtatatgtatagccctatctgctctccattttatccacttgcatatatcaatatattattattattattattattgttattattggagaaatttctgtagtgacatacttttaaaatattaaaataaaatattgtagtatcaacatattcgattttctgaattttatcctttttcaaagggaaaaaaaccattcaaggattttattttttcttgtttgaagaatatatatggcctttgtacgtggagtataaaatctgctcacaaatctttactgagaagagacattcataaaattgagaagaataataatattttgatttaatgagtgtaaatacagttaaaggtgagtcgttgtttaagtttgactgtaataatgcatatatatatatatatgttattagcaaacatgtcattcatgagattatatatgctccttaaacgaagttgctactgtttaaagaattaataattaaggttctaactgtaagtggagaaatggccacgatcaaattaataataaataaatttaagaaagtcatgacaaaacatataacagaaaaatggagaccaatatataataaaacgtctatatatacatatataaatattttttttataaattttaatcacatagcatttatctaattaccaatatatacatatttttaatatgattaaatttgtaaaatacactttatgttttacatggcatttatattagttattttataattataaaagtattatatgtgtttgcgtcaatatatacatacatatagtgagaaagcttaattaaggtggtccaggagcggcatatatatgcaattatgaagaacaaccatgcatatatatgaatgatgatgaggtatatatatgtgtgtatgtatgtgaatgtgatgaagtgaggtgagctttataatgatagttgtccaaagtatgaagaacaataaaagatagaagagcatcgatgataatatatatatatatgtatatatttatagagagagagaga

SEQ ID NO: 118807 - DNA, 1749 bp, Cannabis sativa
aaattatacatttttttttaccgattttgaaaaatatcacattttttgtaacataagggcctaaaaaaaaaaaattcctatggcccactttgtttcagggccggccctggcttcggtgccgaggatctcttgagctttgcagagtttagttgatgttgagggaggaaacgtggatttatccaaagggatgtgcaactcttgtcttgaccccttcaccattttgaacccatatgggtgcctgtatggactgttatcgtcagaatttagtaattgggtttcttagtctaagttcgacttcttttgactagtgttgaggctccttcaaatctttggttgaggttggagtttgtgtgtatctacataaataatatttaaatatttatttcttattttgttcaaaaaaatattttaaatttatatatattttttaattttaaattaacaaaactacattaggttaattagagttatatatgtactataataatttttttttgcatgttataatattcttaaattatactttattatatgcatattaatctaaactttgagaaaatataataataaatgaaaacatagaaaataaatttttttatatatttgggacttgggtatttatcatgtctgtgatacagacattcgtgtctgagactaggttaagttcatctggggtcttaatcacaagggtatccgtgctgaggatgttttcctttatgcatctattgttgttgacaccatttggcggatccgcaataaaaatgtacacaataagtgtcctactgatgtgaagaagtgtattgactttgtttgtacttcttttgcagatatgcatgcttcatttttcccttgcactactccggccttacgggagacttgggctccccctccaccagactggataaaactgaatcgtgatgtttctgtgggtttagaaagcatgtgtactgcagttgttgctaggaatcatcttggcaggatgattcgggttcacacgtcccagttggatttttctgatgctttatgtggagaagctgcgacctactgtttggctgtgacggtggctttggatattgggtccaagtttgttattgtggagaatgacttgagggtagttatcattgctctcaatggtaaggagtctcattgggctctagagaactatgtctcattttgtattaagtcctctctttcgtattagttgtaatttttctaatgttaatagaacttgtaattttgccgcttataatgtgactaaatgggcttttgctcaccagttgtttggtcttatcctgatggatcccataccagaaaacttattttgtaatgaccatgaggtctaaccatacttgtcatttatgataagtatgctttaattcaaaaaaaaaatcttaacaatactattatactaactatattaaagtataatattagtatgataatatcttatgctataatatgattagagttgttgtacttatggtatatatgtgccctatgaagtttggagtgatttggataggtttcagtaatatttcggtaagtgcaaaatttgaaaatcgtaactttttgccacatgtccaaccgatccaccagttgtgaactggttaaccggttctagtggaagtggttaaccgtttccaactggtttaccgtttctgggctgtctcgggaaatcggagaatcgtatttttgtcataactttttacttgggtatctgttttagacgttctatataccgtttcgaag

SEQ ID NO: 118808 - DNA, 882 bp, Cannabis sativa
  modified_base (638)..(642): a, c, t, g, unknown or other
atatttgacatctgattgtcatcggatcaaatataattggaaaacacttaacatgtcttagatgttaaggcattacaaattaaacaagtctcctatttttggagagtttggaaaaaccctagatggtattctgtctatctatcaaaaagtctggattgttagttttaattattgtacgtgaactaataacactataactcatcatcaaaaaataatactatagctcatgttcttgctaaattaactctatgatgttattgtattttagggtctcctgaattgtatttgagtttttggcttgtttttgtggtggttgcattctaatgaaaatctcatttcttaaaaataataataaataataaaataatattttttttgtctttttcaaatcaatcaatttaatttgttattttaataatatattttaattatttttaaaataattaaaagtttattttttcaatttttaattatataatacactactttttgttaattttttacatttttattacgttcaaagatcttttttatatttttatggtgttctataaaaataatactaaaataataagaaaaatacataaaagtaaaataaaaataacatcaaaataataataaaaaataacatacaaatnnnnnaaaatcaacaataaattaacaaaagtacaacataaaaatatatcaaaagatcgtattttctataaataaaatcataaaaattataaaaatatttaaaattaagtacaaccgcattttttgtaatttttttattctttttgtatatttgtaaaatcattttttgggataattacataatacattattttttataaattttttacatttttatattcaaagatttttctttttttttttttt

SEQ ID NO: 118809 - DNA, 1670 bp, Cannabis sativa
gggggtaattgtaataccctaagaataagaaaattaattagcaaaccctaactagttaaatgtgtattattgttgaattatattattatatattttattatatgtgaattaatatggtgtatgacaagttaagatcccgttggtgagccatgggcgttttcgtaatttttacccaggaagggtaaaacagtgaatttaattaaatgacgtgctattggactatattattatatagtgtactttttgtgtccttttttaggtgttttttgacaagtcgacgcggtatagtcacaattaggaattttgcgccgaaccgggttcggggccaaaattaattttcgagattatttattggaattttattaatgtgtgataaatctaaaaattaattgaattgggtgttatgtcagaatgatatttttacccttgcttgctgcctatgctttattatggccccataggcattattgtctttttgaccctttattttatctacaacaaaaaagaaattttaaatgaagtaaatgcatttttttcagtttgtttctcagcccccaaaatgattcgcgtctctctctttatccatctttatcaacttgtgaatttgtggagaaatagcttgtgttcaacttgattttgtgacttctttggagcttgaatagttgaagatttggaggtagttttcttactattttaatttgaaattgttgctaaaatggaagtggataaataggtctttgagctttgaatgttcttgagatgcatgtatgttgatattagtgtaatttgtaatacttaatgcttgattgcgttaaagatttatgtaagatgctttatgctgtgttttgagaggaattttgagtttagatttggttctcttttttaatttgtgcaactctgaatttatagttgagttttgttcttgtgtttaagctcttgaagatgggatttggtgaattttgctcaatgtttggggcctagtttttgtgttgttaaatctgaatttagatggtctatattgttggattttgatgcatgaaatttgtaggttaactctctattatgttgataattatttttggaaatgattttgggatttatgcatgtttggggtgaatttcagtgagttttgatgcatttttcgaagctgaaaactgggttttctgggtttttaaacccagtggtcgcgactatcataggtctggttgtgaccatgataatggcaatttattatttttttttttgctttcgccaaaccttttgactcgggactacgtttgagacgttctttatattgttcgaaagctcgttccgagctcgattatctgtaatttgaatgccaaatttataagttgtggaaatggattcagggattaatcctatacttacaaatcccaaaaattatgactaagattagcggcactttgtcaggagcacccagggatttggaatctccatgtttgcgggacatcaggtatgatagtagttagcacgtaaagaatgcaaggtggcgcctatattgaaaattatatatgttgatatttggaaactaggattaggattatcaccctaacatgagcggtttaatggtctaggattatttccctagtgattattaatgtgaatgtgctatgccatgttatatatatgcgttcaaggtataatcaggt

SEQ ID NO: 118810 - DNA, 2098 bp, Cannabis sativa
tggtaaaataaattccaacatcggttcctacgccacctatggcgtcggttattagctaagaaccgacgctatatatactcctatggcatcagtttctagatattaaccgatgtcataggagtatatatggcgtcagttttttaaaatcctttagcgtcgccttgatcagcgtcggtagcaaattttgtcaaaatcgacgctaaaagagcttaaaaactgcctctaaaggggatttttgtagtagtgtgtctagaaattatgtttagtcacaagtaacttttttgttgtgactaaaattttattactactaaaagtgacattttttgtggtgttatgttgccaaagtaggagattcttggattatcctatttatgggcatatatgtataatttttatgctattatgaagtgatacaaaatcaattgatcaattatattataggcatcaaaatagtgttaaattgtcatgaaaatattatgtagatactataagttaatttaaaatttataagagggcaaattataaatatcgaaaacttattctttaatgagcctataaataaaaagtgtttcttataattataattcttgtattctctcttagggcaaaatatataaaaaaaaatagtgtaaagatcacaaccttatatccaatctccaataataattttaagttagggctagctctactagttttatagaaatatgataagggaatttatattaaaatatttttaagaaatataattagatatgtgattatttgtattttggggtgttttataaatgggatgcatccctttaggatagttggaattgggctggtttagtggccatctcttaaagtgatgatcaatctaagtaactagtggtattggagaactaacaagctgtcctatacttccactttggaggcggaaatggaggcattatttaatttatggctctgaagtgggcgcccgaaggaaaggggtggacaaatgttgatgtgttttcggattgccaggtggctgtcatagtcattcataagaggcaaaacccatgttggagcgtaaatacttttttttggctttctagagttgagctcttggtttgacaagtgtaatgtccattatactagtcacagtaatattatatatgtggacaggttagctcagtggatcctagtattctttaattagtgtttaattagaagttatgttccatcaaaaaaaaaaagtgtgctatacaacactggtttgaaatctgaattgaagccttcttattatggtatatatatatatatatatagaataattttatggcaccggtaagtacccttgttatgttctcatagcttagggtcattttcttaatcaatttacataacttttattaatatatacttatatgtactcaataaaaaatttaattattaaaataatgatgtgtgtgtttacctgaaggagacggctaaaaagaaggttatagcaggaatgaggttgttcatggcggaggcaaacgttgctgatgttacatttaagctttcaatatataaattgtgtactagtgatcccctacatgcacgtattattaataataagtatttgtataagaattaattaatatattatataataaatatatatatacattattgtatccagataataaaatactatacacttccaaaatattatttgtattatgaaacatcaatttcttttcattaatattctattttaagatgaaaaagaaaatgtcctatagatcttaataatagttataatgattacaaagtgggtaatttattttttaagatttaatcgtaccaaaatattatttatcaatatcgaaatcctattatagataatactttgaatcgtgtacaactactaattaggattccgtattttaaagaaataatttttaaaatatatacctgggttttctagagttgttaaaaaatatactattacatttaatttttgttaaaatatttttaaatataactaaagctaaaatgtacatcccaaatattatatatatatatttatatttatatatattaagttattgttacatgtatttttacgtatatttaattactagatagatgt

SEQ ID NO: 118811 - DNA, 2789 bp, Cannabis sativa
atcaaatctagcagccatggataaaacaagtctgatggtagtttgtttgaaaactggtgaaaatatatcattgtaatcaatgccttcctgttgggtaaatcccttagcaactaaccttgctttaaaccttggaccctcacaaccaggtacaccatctttttgtttgaagagtcatctgcacttgattattctctggttttctggtcttttaaccactatccatgtcttgttcctctttaatgccagtttttcttccttaatggcaagcaaccaagctgtactatttttttctagtgacagcttcattgtagctagatggctcatcactatccatgtcttcagccacactaagagcataggcagtgaattcaacgtagccaaacttgtcaggtggctttgtagttcttctttctctatctcgagcgagttggtagctgctgagactggtttgagtgtctctggtagtgctatcttcattaatgctttcaatattttcagtaggtatagatgaggttgtgtccacctcaatttgttcccttaggttgctggtttcaggtgtagtatccttgacacttttcttcattgccatttcttcctcattaaacacaacatccctactaataatgcatttcttatgccctggttctgggcaccataacttgtattcctttactccatcagggtagcctaggaacatacacttgagggctctaggctgaagtttgtcctgtctgtggtgagcataagcagaacaaccaaagacccttaaatggtctagcttaggtacatgacctatccacaactcttgtggagttttgaacctcaatggaatagaagggcacctattgattagataacaagctgtcttaacagcttctccccaaaaaggtctgtccaaaccaacacccttcaacatacaccttactctctcaataagagtttgattcatcttttcagcaagtccattttgccgaggtgtatctctaacagttaggtgtctagctatcccatgttctttgcaatattcatcaaattgcttagagcaatactcccaaccattatctgttctcagttttctacttttgcatcttgtttgattttcaatcagccttttccaagtgacaaaggtgttgaattcctcatccttacttttcaagagaaatacccacactttccttgagaaatcatctatgatgctaataaagtagctagcacccccaagtgtcttgactctagaaggaccccacagatctgagtggatgtaagataatttctctttagttgtgtgttgtccagtggaaaattttaccctgcagcttttgccaaaaacacactcctcacagaagccaagtttcccactcaacccaccttgaaacaacccttgtttgtcaagctcaatgatcatctctcactgacatgaccaagcctcaaatgccacagttgtatatcattcttggcattgtttattgctggtgatgttgcccctattagagcagtaccaatcatatagtatagaccattcttgaatctacctctagctaccactagtgaacctttagagatgttaagagtgtcattatctattttaacagtataaccatgattatcaaatattcctatagacaataaatttctattaagatcaggtacatacctcacattttgaactgattgagtaatgccatcatgcatcttcatgttgacagatcctattccatggattttgcaggctttgttgttccctaagagtactgtactagttgtgctttcttcaaaatcagtgaacaaatccttgtttggggtcatgtgaaaagagcagcccaaatcaaggatccattcaccaccagaatcctcactagagactaccagaacgtctgcagaatcatatccacatgatgcaacatctgcttcacctctgtccttacttttgtctctcttaagtttgttctttaacaagtaacagtcatccctgaaatggccctcctttttgcaatagtagcatttctttccaattgcatttctgttcatggaattggacttatgtccagtctttgatttcttgaaatctctcttttcagatctccctcgagcaaataaaccttctccaccaatctcagtttaatcatcaaccttcttcttttttttttttttttttgagttgagtgctgctttaacttcaaacatggtaagtgtatctttgccataaagaattgtgtccacaaagtgttcataattcttaggcagggaactgagtaagagaattacttgatcttcttcatcgatcttgactccaatgttgttcacgtccaagattagtttattgaaatcatcaagatggcttctaagttctttggtttcttccatcttcatggtgtagagtttctttttcagatagagtttattagctagagatttcttcatataaattgatccaagtttattccataaacccactgcagtctcttcatctgcaacctctcgaagtacctcatcacctaggctcaataagattgtactgtgagctttcatttcgatttcttgggagactttctttacatcttctccttccttggtaactggttccagaatagcatttgcaatgccctgatgcacgagtagtgctttcatcttgatgcgccagagaccaaagtcattgactccagtgaacttatccacctcgaatcttgctgtcgtcattgttgtgtttcaagctttgatcttcacgattcttggttcctcaatagcaacctgtgctctaataccatttgtggtgaattaacaccatccaa

SEQ ID NO: 118812 - DNA, 557 bp, Cannabis sativa
tatataattaaaattattttttcgacaaataaactcgttgatagaataaatcatcataaataaaaaagaatactataaaaaaatttaaaaattcatatacaaattttactttaatataatcaaaattaatttattgatgaaaaagtcattttttaaaatattatacttctgtgtttatgcttcaaacaaaaaaaaaaagttttttaaactcaaaaaataaacttacaataacatgataaacttaagctcataaaaaaactcaaaaaataaaaagcataaaaaataagcaaagttaaatatgtattaaagtaaaaagcattttaaaatcatatattattaagtgtaatttaataacactagttggagctagcatatactctaagttgaattaaatattaagtctcacataatttaatttaaaaattattatagagtatctataacaattcatatgtcattagagcattttcaatgaaagtataaataagtggtaaaaatctaaaatatagcccatttaataaaaagtatgctctaatggtgtgccaaaaaagtgatgt

SEQ ID NO: 118813 - DNA, 828 bp, Cannabis sativa
gtggggttaactgaagtgaatcatacatacctctagagatgaaaattgtcttccattaaaatgcttgtaaaatatatcagcaaaatcttgagaaaaaaaaatattctttaataatgtatacctgttaagtcttaataaaattgcagtctaaaaactgtaagaaaatatttgtatcagaataacagataaccatgaatgagaaagaatcaataaagtaaaggcagaaaacaagctcttgtttcatgaggggatgcgacttctttttcagccattgagaattattattcaaaatcctatgataactagtaccaaagatgctgctatggaaaccattaatgaaccagaatttggaattgaacacagccagaacacatggactaagttagtaaatgaggataggaaattgatcacttttcatacctctagtgttcccacttgaaggaaggattgagacggaaccatagaaattagacacacgttctattgcggtctctgagatagaatgattgagagagactacaaaagaagaaagagagagatggtgaagaaaatttccacttaaaagaagctcaatttgtagccgtgtacatgaaagttccaaaagtaagtaatagtatatttactcaaacaaaactctgattaatcttattattttagaaaaaatagtaatacattaatcattctgctaaagggaaaagaaatcataatttattcaaaatcaaaaagcttactgcttctcttttggcacaaccatacttgctctacatctgtaaggaattaagagtaatataaaattagtaatactgtatgaaaaaatcattttaatga

SEQ ID NO: 118814 - DNA, 1326 bp, Cannabis sativa
acttggggctggcccagcgcccaggttgatacttggggctggcccctacacccaggttgacaatttatcaacctgggccacaaaaaattgagttttcccagagctcttttgatcatcatctttgtctttacaaaatattgagaatcaactatttcttggggaccaaacgaaactttcgaatatgaaaaagaaggacccagcatccaagttgacacttgggactgggacctgcgcccagggtgatattttgtcaacctaggctatttctaattcagttcagcaaaaattgctctaggaatcttcatcgtcatcaaaaataatgaagagtcaagtaaactcggggagaaaaatacgagcccctataaatagggcctagtacgcaggttaacttgttgttgggcccagcgctcaggttgacaatcaacctgggatgctgccttcaattgcttaaatgctgaatctagtacgacgactaaatctagcatgatcaaagatgggagaagagaccctgtccttaagttcaaaagccttggaagccttgaaagtattaaaaataaagtctcgagagctcggtttaaaggcctcagctcccaagtcagtatttggcaagtttgatgggttctgtttattcaaatctgatgtcgtttcgacagttcgtcaagtttttcacaagtgcaatgatccatgaaatcaaatcaatcaagttcataacttcaattttagctcatctgaaaactgaatatttcgagtcttccgtttctgcaaaacaacattatttccgagaatgtgtgaccagtttcaccaaaacatttaaaagaactaaggggtgtcaaaccattacttaggcatctcaaaggacttcttttggatgtttctccacttttacaacgtccaagtttacatcagatgtccatttgggtgctggaatgtcaaccttggtgctggaacttgaaatgccttcagtaaagcggccataactcactcaattttcatccaattgatatgattcaacttgcattttgaaactatttaagccctttattaagtcatgtctcacacattaatcagaattctgaagctatcattgccaaaattcattcccataggagttacgaaaataagctttgtgtaactcgcagcgggacccgcaagacataaaaaattaaccatcaccaccagaagctagttttcaccgttagatcatcatcaacggtataaaatactttatttgtattttatctcctatttttgtgggcctccttcacctataaaaagagagctcccttagtttatttttcacactaagaagacaacccacaaggtaag

SEQ ID NO: 118815 - DNA, 4043 bp, Cannabis sativa
  modified_base (2836)..(2846): a, c, t, g, unknown or other
aaaagttcgggggcatgatttgatacatgtcaaagtttgggtggaaaaaaatcctaattagccttaaaataaaatgaagacacaaaaccaagtccacgaaaacggaactaatgtagatcctctctatacggagaaaatgattttaaaagttctatcacggactgaggactcactgatctcttctcacaaccaagacctaatacgccaaagaaaaaccgctcttgagctgtaaattatgtatgaatagaatgaagaagagaagcctttatttataagcttcaaaaggcacccctattaatcaccagattaatgcacctgaccatgttaacctatttatcaccaaattgatccactatagtagaacaaaggctcgtatagaactcaaatctcctgtcaaagaatgttgttctaaagtgtgttaaccaatgagatatgagaacatgacgtgttatatagtgagttaactgaaataattagctagaatctatcgctttcttctctattgtttttccaagaatacgacctatttcaatttttctttaagagctttctttttagtgtagcgtaatggtattttacaatcagttaataacttaaagattctggattcgaacccatgacctctcctttttcccatccctcccttaccactaagctacccttagtggcttatttttctttaagagctaaagtaaccaaatagccaataggcaatattctttagagtttattagaatgtggaataagatgaatgaggtttcatctcaaaaccaattggctatgggaggagtagcccattcatcttatatatgacaatttatttccacacattagcaatgtgagactaattctaatacaccctcctcacgtttgggcctgaaaagtgcgtataacgaacgacctttaagagaccacacggccgaatgtgacatttgaaagaatcccacaaggccaaatattgggaaatttgtgggttttgaaacacgtaaaagaccccaacactagaaactaacacacattggccgaaaggtcccaaatggaggtaaatggcgaaagaatctttttttgaaccggtagcactttggctcacaacagatcatgaacaactttttggaccggtggcactttgggctcacaacggatcacaactggctctgataccatgttagaatatgggataagatgaatgaggttccatctcaaaactaattggctaagggaggagtagcccattcatcttatatatgacaatttatttccacacactagcaatgtgggactaactctaatagagtttatttattcctaaaacaattataaatatttttccaaaaccaagtggacttttatttccttccatattcatcatcccgtaaatttatagttgcagcctactttattattattattaaaaataaataagggttcgtttagtacatcataatgtattgtattgtattgtataatattgtgttggattgaattatattatattataattatttaatacaatactatgtttgatattgacttgtactaatatattgtgtaaattaaattatatatagtaaacacggcccaaccctgactacggcctggactcgaacttggacccgaacccagaccccaaactcgaactgggacatagaccccagacttgaacccgaaccccagacccgcactcaaacctaaaccccagccccaaacaccgaacccggacccaacaccgatgcagacgccggacccagacccagaccatgttcaattttgggtccagggttcgagtctagagttcgagagcctggtctgggtccgttttcgatgttcggtgtatggggctggggctgttggttttatggtactaaatcaggtacggaaggaaaaattgtatgtcaaattatcattgtaccatattctcaatggatctccaaatgtataaacattaaatcaaaacataaattacatgaaaagaatatacctcttgatgactatcagggtatcctcaaaacttctcgtaagttgaatccttttaggtaaattggaaactcacaccgtagtctttcaaatcgatccaccatacacaagaaatagtgtgggctattaagataaacaataaaatttgtttcttgataaattctcaacacatgagcaagaactatttgagagaaaaaaatagctttacttttttcctctgaattttgaaaattgcaatgtgaaaggttcttttaatttctcaaatcaagcttctatttatagtagttaattgctcattaattaaatcatatttaattatttaaataaatatttataaccaaattcggttattgatatttcagatgagagaatctctcaactaactttgagggaatatcttaaccaacttaaaatatctttagccacttttcaaattcaaatatgtatctaattaaattaattaaataattaattaacccaaaaagataaagatactaaagggtaggcgcctaccttgttaattaagacaaggaggtgtcttttgtcttgacaacttttttctcaacaataattgtcataacaaattttgtctttttcctattaaattaatttgaaaaaattatttatttattaccaaaataaatgattactattttgccaattcaaaatagatttttccgaacaacattattcaactctttatccctacccttaatagtgttttaaggtagtgattcggggaccatggacctataattttaagctccaataaactagattatttattgagtctcattaaccaaataatcatgtttattaattccatgattactctattataaatatagaattgaactcttannnnnnnnnnnattatatttactgagttttactacggtctccattgatataatcgattttgaacataacaaagcaggtgaggattgttatgccttaagaggtattcaatctctctctttagattttgacactcattggtgtcatggccgaagtcgttgtgatattgacagaactttgtcatgtccctctagctcatcttccttttaatataaaagggcttctagtagggggtgttccttgagtggccataaagatggcctcaggtttctccgtcaaaagggtgaagcaagtatacttctccttctttttctttcatggcgtaggagaagtgttgaacttatcctttttgctattgttcctcccagagttattggtgttgcacttaattcaagtgtttttgtcactagagatctgggtagagttgctggtgctggcgtgtgtgcctggtaggtcatgagactacaatatgtctcgtgaatgcctattgctggcatgccccacctgggcatgtcgaatggctttttcgaatttgataaagccatcagctctatcgaggaactcctttatgttgttggttgagatccttcagatgtctttccagaagtcactcaatgggagtatgcccctagtatggtcgtgtaccatctttcttttgtgaggcctttcctcatccatgagccactggatgtaattcttcaaaagttctccttgtcattgtttgacttcgacaaggtcttctagttgtgatggtacaagtctcaaagacgagaattgcgtgtagaattctcgagagaacttggcccaagaattgaatcttcttggggtgagtttgaagtaccatttttaagttatttctgacaatgtggctgggaatatgggacatcgaaggatgtactcctggtcatccatccatctcaagaatttgcatctctattgagtgaatacatcgcaatcaatagcgcgtggttctttagttaggctggcttggcctacatcttctttgagtccgactaatttgagatcttctcccaagtccatgtggggcttaccaattgcaggcttgccaactcctggtcctgtctctccggcgtaatattggagacgagattcggttattgttcctgggggctattgcccatgagtccttccttcagtgggaggcaccaatggagggtcctcccttggaggcaagggcttgctattcagat

SEQ ID NO: 118816 - DNA, 1408 bp, Cannabis sativa
  modified_base (1354)..(1367): a, c, t, g, unknown or other
aatttttggaggtataataaaaaatgaatttattattttgtaatatttgatgagattttatattgactagaaaaagaagaaagagataccaatttcctaattaacataagattattaatattctagttttttaaggaaattcagatattatttaaaagaaaaagtaattttcccaaataaaaattggtaaatatatatgctgtacaatttataacaaaagttttgacttgaaaaggaagaagatcaaaagaataagaatgtctttgatactacatatacattttgaagtttcccataataataagatactatatttaattaaaactaagtgctcaaatttttcagcaaaaaaagaaaaactatgttctaaaattccaactaaccaactaaagcatatacaaactctttttacaaaacttaatttccataatataatttataaatacagatctcccaaaaaataaaaaattaatatacagatcatgggatcactgtagagtgaaaatacgtattttattgcaatagatttttactatttgttacaataaattgcatgaagccaactatactgataacttattaggaaaataaatactggacaacaaatgattcagcaaaataatcccaaactttccaataatattaattctagctagagaatatatttttgtattaattttatgagcagtattgaatactatatatatatatatatcagttccatatctcaaataaataaataatataaatatacatataacaatatgaaatgaatcaaaaacacattatagagagagagatatagaaaaaatgggtgtttcttcattttccagagtttattataatctcttcttcttcttcttctttttcatgactgtttttactatttctaatcatgcatttgcaggcactacaaggcactataaatttgatgtacgtaccaaaatatatatacttcaatacttgtttcttataatttaaattttagtttgtcattttctaatttatatatatatataatgaatattttgtatagattgtaatgaaaaatgttacaagagttgggcatagaaagagtattgtgacagtaaatggagagtttccaggaccaagtattgtagcaagagatggtgatcgtcttgttattcaagtggtcagccatgtcccaaataacatcactcttcactggtaatattaataatatcatccattattacttttctattcacaatttccaatacatattttttggtatcttcacacttaatttgttcttggtactttttagttttatcataagtatattctgtttataatttttagctttttttattagggaaatttacatggtatnnnnnnnnnnnnnntttttttacaaaaatactatcaggtggtattttttactttt

SEQ ID NO: 118817 - DNA, 1543 bp, Cannabis sativa
  modified_base (1362)..(1385): a, c, t, g, unknown or other
aaaatgtaaaaaaaaacattctttaaacgtaaaaatataaatattttacaaaaaatggtgccttatataattattcctaatttaaattataagattaatgttatttattttttattttatctaattagatatttattttgttaatttatattttgtttaaataacatgaaacttttttaatagttagttgatattttttgaatacatatttagggtttttctaaccctaatatttttgaatttttaaggtgttttattttaattattttttaaataaaatgataatatcatgaacataaatattctattttgaaatttgtttatttttgttgaatttaatttgttaaatcttaagatttgaaatataatattagaaatatcttatttttttcacattaagagattatgatatattatttattagttatttaattaatttaaatttatttaaataagctaaatttttgaaaattatttggatatttgaatttgatttgagatattttaggaatttgttagatttaatatttttttaaatattttctaactacataatttgaagtcaaattaagatatttttttaataatattatatttattaaaatagaaatatcttaaacaactttccatatcttgttacatgtttgtttatttaattgtttaactcaaaacttttttaacaaatctattatttatttaatttaaattgctatgattaaattgttgatagatccaatgatctaaactagtcatagtccaattgtcaatagatcaaatatataatttgtaagaggtaattttataattttatttcatttgtgataaatctagtaacataatagggtccatccaaatcaattgtctatatgagcctatatgttcacaattgggctgagatgcatataggaagctcatttctttttggatatttaaataaagtaaactgctaaaataaaataatcactatgatagttttatttaggcacaattagtattgggcttattaaattaataacaattatttaattaaagattaaattctactctttgggccttgtgtgagagttacgggctatagtagtgggtactacatattgaactcagccctccctcatatgaatcacctcaactgtgaaggctcatttaccttaattaaataattatattaggctaattatattagtttaacctaattaaatttgactagcaacataaataattttaaaataaatgaaattaattttttattagattattttaaaaattaatttagaaaaacacacttagtttaatgaaataaattttagataagctatttttagtaactaatttatatatttctaatatttaattaagtagaannnnnnnnnnnnnnnnnnnnnnnntttattaattaattttagatcaatctaaattatctaaattagaatatctttctttcatgttaaattagaattaataattaagttgatttcattcaaaattcttaattatttatttctatgttaatacatttaattaaatagaaaattatattcaagtt

SEQ ID NO: 118818 - DNA, 1279 bp, Cannabis sativa
  modified_base (1239)..(1244): a, c, t, g, unknown or other
gtaacattgtgttgtgactaaaagtcacatttagttacaaaaaaattatgttgtgactaaaaagttatcactaaaagtagcagttttttgtagtgagaataactcatgtttcttttgggaggactatttggtataaactatgagccccaaagtattggtttattctttggcaagctttacatggtcatcttctaacgagagataatcttattagaagacaaatgaagatcgattcacctctttgccttagtgtgtgaacttgaattagagagttatgatgatttattcttcactaaacattgatagatgactgtggaataatctttggtcgaatgtctatgaagagtggatttttttggctgaatagcaaattgcccaaaagtttgatgacatttgttttttgtaaagcaatgcctgcaggcctacataaactcataaagtatttggatttatagcaatttatgtatttttgagagtaaatgcttggcccttattgtattgatactctagtgaaagaaagtattaagataaggtagtactatatacatgtaaaagaatcaaattattcaagttggattaggtgactttagagtttgtaaagaggttatagttttctttgtttgttggaagaggtatatatgccccacatttgttgtaattgggatagtattgattaatgaaagtttttcttcataaaaaaaaataaataaaattatatgatatcaaatatatatcactacaacaaaataattaactttaatgtcgattttttagtcacaacatattttttttaattaaatatgacttttaatcacaataaaataaacttatttgtggtatttaaatactatcactaatctaattttagccacaataagtactatgactaaaaaatatatttagtcacaacaaattatgatttttgtgactaatacatttagccacatacattttaatcataacataaaaataataatttataattagtcataatttttttataaaactattttttttttcttttgtagtgtataaataattaaggatatgtttacgatcttgattaaattttatgtagtttggattggtggaattaattaaaatcccaaatgaaatatatataagcaagattgaagatgtcatatgtattcttgttcagagaatataacaagttaggtcctcaacatgaatatatgagagcttattccaattttacttcttatattttttttttttttnnnnnnggtaaataggagcataaatatccaaagttttaagt

SEQ ID NO: 118819 - DNA, 2095 bp, Cannabis sativa
ggtttgaaaaaatggttaaaaaccgcacaacccgcaccgcgaacacccctaatttaaaccatccaaaccaagagctttatccccagagaggctaaaaaccgcttttttcacttcttgagttgtataagggctagccaaataatcaatatcagactcatctaggggaggtcctaaacagtctaatatttgattagttgcctcagcatcacaaccctcagaactgaaaagattggtgaaaatagaagaaaatataccaaacatagcctcaggatcattggtgctgttaccaagatcatcctttaaatatttaatagtattattcttcttcctatgagaagcaaacctatgaaaaaatttagtattcttatcaccagctctaacccaattaaccctagacctttgcctctagtagatctcctctttgtaaagaagagcatccagctaagactggagatactgaactcttagagcagactctctattacaagaagcagaagcttgaagcctagcaatctccttttgagtatcctaaattctagattgaaacatcaccttagttgatttattccacgactttaaagctgaaacacaagcatcttggcaaaaaaggaactcactaaaagcattttcatgagaagaagccctagaagaattcgtccaagagtcattgacagaataaaaagtagggctttgaagccagatgttttcaaattgaaaacgcttcctgaaagggtgaactctagacacattagactcaataagaaaaaccttaagaggacgatgatccgagccataaaatggcaagtgatgcagattagcattagggaaaggttcatccaagattcagatccagagcccaatcaagactttcatgcacagaacgattatgccaagtatacttatccccctcaaaagaaaggggagagaggcagtacttatcaagaaagtgggcaaacctctccatatcattatgattataataattactccctattttatcatcaaaaaacaaaaaactattgaaatctcccataataagccagggaagatttggggcattagaaaaagttttttccaagagattccaagtaaaaaaaacgattagaagcaataggggaaccataataaccagtaaagtgaaacatttcattatcattaaaactaatattacagtctatatgattgctagagtaggataaaatatttacatatacagtagccttccacaaaagaagaagtccacctccaaaatacttcctagggacttcaaatcattatcaaaacctagagctgctctaacacgatccacaggcataacaggcaatcgggtttccatcaaaaaaactatatcagggcagtgatccttaacaagcagggagagcctcttgaatgcacgtgtactccccaaaccacgtgcattccaacttagcacactcatttttctggttccaagttatcagcagcaagggaagattcctcttctctatcaccagcacgagcgcgtttcagttgggacctcatagagctttcaaccacaacatgatgtggctggaaggaaggtctcttaactccagaggcagaagctaagcccttcccacgaacagtagggtcaggaagaccttgagaagagttagcacccatagcaggatcaccaccagaagaggaaatctcagaaaatgacacaggattagcagggccagtagaagaaacatgcatgtggtcaactggcttgtcagccacaattaaggaatcagtggaataggatgtaaaagctgaaggcctcaaggatatgtcaaagttgggggcgagtagactgtgaagaaacaacagagaagttggggttcaaaggagtaggcatcataagcacatcaatagatggaggagaggcaaaaggaccagtgaagttatcattaaggctgagaaaggaagggaaagtcatagtttgattagagaagtgctggggtggcagattaaggttgacaggttggtagttgaccatagtaatggttggaggatggggatattggaaaggctgagtcttatctgtgatcttttctttgcctctaagaaggatgttattgttggaattatttta

SEQ ID NO: 118820 - DNA, 2864 bp, Cannabis sativa
  modified_base (1777)..(1779): a, c, t, g, unknown or other
  modified_base (2805)..(2817): a, c, t, g, unknown or other
ctatatgaaataggaaccaactggaatggggcatttccaagatggttgaggaagtccttatagtaatctcgtagggggagaattgctccagccctgatgtggttaaggctccaagcgcctatccctatcgagccactcgtactcccctcgccactggtcccctcgggtgcttcgcgagtaagaaattctagtgggtaacaactaaactcgccaagagccacagatctaacccgtcattgtcatttttggttaatgcaacaagtcattaagatgctacctacgtaatctctgatggcttgtaccctcaactcgataaattctgcctcgaaggtaacgttaggatcttgggagtctttgatttacgtggctgggaagttatgagttcaaaatccatgtcacctggttaaaaagcaatcctgactctgggtaaaagtaaaggcctagcaaaaggaatagatgataaactgggaggttcaggccaagcagcatctcgcaagaaacgatgtgtgccttctattatttcttgcaagaagtacctatggcaactagcaatatcatcttggtggggttttagtaagtggtccctaatatttgcatcatttatctctatttggactggagtttcaaaattctgggtttaaacgggatggcaagttcgctggggcactctggttctaaaatttctggacgataaacttctgaaccagattgggacattattacaaaaagaaagcaatccaaattcctgaatgaaatttatcaaaccagaagcttataaatttgagaaacccaaaagtctacattatgcctaaaccctaaaaattacccagaaaagtttaacctaaactcgccaaaaccaaatataatgacaaaggtgcaaattaagaaagtagtgatcaaacctagaaaagtaaaatagaagagcacataagaaatagagaaagatgaatcacttactgtttgaagtcgggttttggtgcgatgaacagttctgtaatcgacaatgcagcaaacgacgtggtgatctctctggatgctggaggtcgaaaaacaggtctaatgaaatttgcaagaagtaggacaaagacagagatgacatgcaaaggttcaaaaaatttgggtggggttttttgtagaaaaatctcaagaaatttttgaaatggcaaagatgagaaaaggtggtgccttttttgattttataccattaggttgatctccgttgtattaaggagtaaatgattcaccgggtagaaattaaaaaaaaaaagtggaaaagatggttatttaatgctcatgatgtgcctcgaaatcacaaaaccgcacaaaatcaaaggcatgcatttttttcaaaacagattatgaccaaaatacccttggtaaccatttaaaaagcacttttcactgaaaaagactttttaaggggcaattgttgtacccaaaattcgtttggtacttcagaggatgacacgtctaaaccttgggggatacgaatcaacaaatataaaggaaattatattaaaatatatcaaaaggaataactcattaaatgcggagttaatagagcatatctataactcgctgactatatagtctctagcgagacaaagatgtataaactattgattcacgtattgacaagaaaaccatttcgcatcagaggacataatcgtaaggatgacatcgatgatacatagcgagtcatcaacctctctatgtgtaaaaaggtattgacgaggcgaataggctgttagaacaagagactgggaataacagttcnnnacccaaccagggcattcataatacgattgtttcatctggaaccaatgcccagacgactatcggagatgccactgaattacaaaatctccgtgatgctgttggactcatgcagaatcataagaacaccttgcatcatgatcaggacgaactgcgtgctgcagtaaatcttgcattcgacgaataaaggtgcatgtttgctgaatggagggatggagagatggaggcattaagggctcaccatgaagagatcgaaaattgtagtcgacaggctaccgtgctgatacaaaaagcctatcaaactgtaggtcagcagtcaccgaatgtcattcccctgggtggaacagacgaagatccaacgatgaatacttcccacactacaaatggtcagcccccaatccccagtcacgattttcgctcgtgggcccagcagtaggcgagcagaccttatctagtaattcattaggagaagttatacctgatggttccaaccagattaatggtgccattccactcgtcaaccaagtgaatcaatcgctaaggcaaccatgcacttatgtgttcgaaaggttgggagcaacccatgacctaaggaatgatctgaacagaaggaggggagtagacgaacaaaatattacgacgaacaaaaggttgggagcccgtactcaaattcccgctcagaaagatgctgacgtaattcaaattgaccataatgccgagcaagttagcccacccgtacaagctcagcttgacaaactgaaaaatatgttccacggcatggctggacaaagaaacaatgatcttgagctggaccgagcacgcggaactcctttctcatcagagatcaatctcttgccactgccccacaactttaaaatgccgacctggaaaatgtacacggggagagaagatcccctttcccatctcaagtactttgaaatgcaaatggatttttaaggggtacgaggagatatatgctgcagagtctttcctgccactctatcggaagccgctcagcaatggtatttnnnnnnnnnnnnnggaaagtttagttcatggaaaagcttctcttcagaattccatgcaca

SEQ ID NO: 118821 - DNA, 592 bp, Cannabis sativa
ttaaatttaaggacttttgtttataattaagagctatcttcataattatatagattaaatattgtgtttggtaattatgcatttatatatatgatgatatattgtgaatagatggattttttacatgaatgtgaatcgataatatggtaaaattggattaggaatttttatagtttcattagaaaaattttaaccatttttttggtggtataggatgatgttatccgcgttttcgacaagggacatgtggactccaagttagcatccaaagccaccaatgggcccgaagaagataacttaggccaagcctaagtccagtaaagccttttgggaaggtatcttccctccttgattcaaatgagcttccaccaaggactacttgtactaggaagcaattccagtactgtgctcctggaagaccacatagcgtgttcctagaagaccaacacagtttcccttcttatcaaatcacacaaaataagggattaaatttccttattttgtggccagaagatcatatcaagttaaaaaggaaaactacccaaaatgaagatcaagtaattaattcacaattaattattcacaattatag

SEQ ID NO: 118822 - DNA, 1115 bp, Cannabis sativa
aatactagatcttggctttaatgattatgagtaatcattattttaacattctataactttcatttttattttttaattttatttaggttgggtctaggttcaagtctggtttgagtctgggattggggccgaggtcggagtctaagtcctaaagttcaggttggggtcggagttaaaaatattaattaggaaaaaaatttgttttaaaaaaatttgaaattgattttttttttcaagaatttaaaaatttagactcttaattttaaaaaaaataaaaagtgaaaacaattttatagaacatactttttttggaaaatattttcacatttttaattcaaaaaaaaaaatttaaaaatgttaacaaatgcaccctaaaaaaataaatccaaacaacttaaataccaactaaaaaacccaaccaccaagcataatttaaaaatagagcaaattgtgctaaggtattatccttacccttacaatgattaaaacatgaagcttattacattgtttataaaaatagattatggagcataaatttgtgttttttttttctttcaaatagtttgttaaactatttttaaaaaattatttaatatttatgtttccttaaaaataatattagattgacaaaaataaaatacaattacatgttccctaataaatagaaaatagggaaaaaaaaattatagtatgccttttaaaatagtcgttttgaaattttgatgcacttttatctttattttttaacaaaagaaaaattttattcaaaaatcgaacacaattacataacaaaaacaacggcagaactcaaggtactcaactaactatcaaccctcaattacatttaaaacataaaaatcacccctctttaacttggtacttttaaaaattattgctttaatgagagaagtaattcattaacagattgaatacatacatgaaatgaaaataatttattctttaaagttagaaaaataaattaggatatttatttatcttctcctattggaaaatatcatcacatgttttttgatatggtattcgtgttgggttttatgccctaaataaaactatttacaatctgattagttatcaatataagaaacttgaagtga

SEQ ID NO: 118823 - DNA, 2376 bp, Cannabis sativa
  modified_base (26)..(30): a, c, t, g, unknown or other
ttaaataacatacttgttagtaaatnnnnnatcctggtaaaataattttaacaaatacttcccctacaccataaaaccaaaaaggaaaatagaagaagtacacatgcttcaccttcttcaccaagacattagagacaatttacatggccactcaagctgctatcccattcaagaagcctcttccaattaagaaggacatcaacaagagcgacatgtccaagttttgaaatttcacaatgtcttcggccatgatacaaatgagtgtctacatttgaaaagggatattgaattcctaataagaaaaaataatccccagttgcattgttatgtgaaaatgaccaagctcgggcatatgatgtgagtgcagttctaattacagaagaagatggtatccaaaaactattgtattacatcagtaaaaggattattgatgttgaaagttgatacccactcaaggagaagtggacatacatcttgctcttagcatcaagaaagctatggtcatacttccaagctcacctaataaggatgtacactgaccaacccttgcaacaagtgttatagaaacctgaagcatccgtccgattactcaagtgggccattgagcttggccaatttgaggtcacataccaacaaagaatggacataaaaggctaagctctcgatgagttcatggctgaatgtacaagcatatctcctgacatcttttaagatttgggacgaaaggaagagtaaaaccaaaagcaagagcacaaagattcagcctggaagttacatgttgacgaaagttgtactgaccacttttccagtgcaagcattgccctcattacacttggggacaatagctgcacagggaaatctagttcggtttcaaggcctccaacaatgaggttgaatatgaagctttgattgctagcctcaggttagcacacaaagtacgagtcgaccacctagacatataaaatcactcaaaactagtcgtaaataaagtcctaggttagtatacagcctaaggtgaatgaatgatagcctattagagaataatccaagacttattaatttggcttaagggctatactctaacgcaagtccctagagaagagaatgcaacagtcgatcacttgcccgtctagaaagcagcaccttgactaacaaggaaaatttgtttcccatacagttcttaaaagaagcattaccattctaaaagaggttgacatgttggacgatactctaacctggatgatgcccatagcagcatacctccagactaaagtcttgcccaaaacgaggtaagaaaaatgaggaggaaagctgctcggtatagattagaaaaagtactgtatagacgaggtttctcaatgccgctcctaaggtgtgttagtaagagaaaattctagcagttaattatagaagagcatgaaggcttttgcgataatcatgcctgggaaaaagcctatcaaaaaggatacttagacaagggtattttttcctaccatgatcgaggattcaattgactatgtcaaaaactgtgacaaatgccaaagattctcaatgatcctaagagctccaccaaataagctcacactgatgcagttttcttggcccttttttgtgtgggcgatagacgtcattagttaactccctaagagagaaggaggtgtacaatgtgtcgtagtcatgatcgactacttcactaagtggacagaagttgaaccactagtgataataacttccaagaaagtgttcgactttgtaatcaagaacatcatatgtcggtttggactgccatagaagatcgtgttagatgataggaaatagtttgacagtgacatgttcactgacttcaacaacagacacgacatcattaaaactatctctattgttgctcatcctcagatgaatgggcaggtagaggttgtgaacaagaccctcagggacactgtgaaaaagactctagaagaggcaaaaggcaattaacccgaattactcatagaggtactctagtaacagaggaccaccgagaagactaccacaatgcaaaaaccacttgctatggctatgaagcaatgttgcccatggtactagaaccaccgtcctataagaggataacctacgaccaagacgtaaacaacaccctattggcagagtcgttggcaaaatagaagaatggagagaccaagccaagctgaagctatatgcctacgagcagaaagttgccaggtacttcaacaaacaagccaagcaaaggaaattcatcataagagacttaatgctctgaataggggtgaggaacggtcggtttggtcggttttttacacaaaaaaatccaaaattcagttttcgatttttatagttctaatccgaaaaccgaccgac

SEQ ID NO: 118824 - DNA, 833 bp, Cannabis sativa
cggacggacggcgcgcgcgcgtatgtagtgggtcaagtgtgtgtgtcctcacccattcgcacaaaactgggtcctataagaagaaacaagaagcttgagaaaagaggttgggctcaattcggagttggactgagaatgtgattcatgtatgttaacctgaagtaggacccactaaaggcataagaggtaagttcacaccggtgggtggccgagccgagccgagtatgaacgagttgaaataagataaagtcattcttgacctaattagggcgagcatacccaatccaagagaagaagcaattattagattcgagtcgaaatgagtcccacttaagatagaacaaaataaaaatctgactcagaagactgagacagttgatttcccggggagatggtgaggcaggcttagcctcaaactgtcaagacgggatttattatggactcactagggcgcatctcgtctcaatccaaggagaaaataagtaatctaaatatatagtagttaagaattgtaatctaaagttgacggaccaaatagagtaaaaacagtagaatattaaaaaccaacaaatcatataaatcagtaaatatttaaaaatatgaataaacgttaaaataaaatgacttaacaaaactaatcatgaaaaacttccaactaagaataacacgtaccaaacagagtactaaataagtgacagtgtaaccatgcatgcgaggggacgtactacaaaaaggaagcaaaggttcatgtagaggcatcgaaaatgggaaggaagaaaatgatgtatattatgaactctaaaagaaagaacacagaaaaaaaaaaaaaaaaa

SEQ ID NO: 118825 - DNA, 1681 bp, Cannabis sativa
tatattatatatattttttaatattatataccatttggtttactgttgtttccatatgcattgtcgtttggtcttttttttttttaataggaaagttgtcatctatccaagaatttacagttttacatggttgataaaattaagtaaaatttgcttaacctgttctcaattagattaccccaacaaaattttcacttatatatagttttatcaagagtaaaaatattgttagagttttgatttgaccagtcactactgcacaacaagataagaactccacaaaaaatacagtgtacactaatatattgcattcaatatttacttttaattatcaaaaattataaattatagtatttagatacacataataaaaatttcacgaaataactaattatattttttctttaatttttaattgtatcacttttagataacgtaaagaaaacttagcataaaatttatacgtgcctagcacgtaactttttcctagtatgtatagatacatacataatggatttcatttttttttctagcttttttgattttattttatttttgtacattaaatataaatacatgcttgaatgttattgagttaccaacctttctacttaccaataaccccttaattaattattttatatttaattactgctgtatataaatacatacatatattttttcttttgtgcaccaccatgttttggtgttctattacattattattttgtaaacttatatttctttttctttgttgtgttatttttagtgtgtatatataaatatatacatgtaaatatatatatatgaatatttagtgattaaattatgtgtatatgtattttttttttatttcaatatacataccataaccatcagaagaattgtttgctccaggatcagccacagtaccaattcataagtattcttgtaaagaattatttttgagaagaattgtgacaacttatctttcttcaagctcaacgaacgcatcttagaaggccacatgagagttctctattttcttaaataagtacatttatcatcttaagcaaggtgatgtatcttaaaatttttaaaatatgtttttatcttttttaattattattttattttttatatttataaaaaacttagtcaacccaaaagacatccaaatttattttcatttaagaataaaaacaaacaaaaatatagttgtatatatttattttataagtattattatagggcatcaagtgtgcctatcacctctataacatagcgttttataattagttagtaattttctataatttttattaaattaaaataagtgtggctcaatattaaattgtattaatcaataataatattacatcttataagaatatttaacaccatttaacatttttcttattttatatatattcatctaattcttagttaacctcctaaaaatattgtaacaacttagtgagaatttaattacaattaaaaaaagtctcatgagttttacaaatttctccttaatctttttattatttgtaaggaatcaatttattgttaaaacattttatttaatagataaaaaaaaattattttattgaagtagttgtaacgtttaagtaataatgatatcttagtatttcttggtagaatattctgttaaatttaacgattaggtttgatctcccgttaa

SEQ ID NO: 118826 - DNA, 1105 bp, Cannabis sativa
aaaaacgacaacaatcccaaacttacaaaaacagtgtcgtttacaggtgaatatcaaaaaacgacaacaatcccaaacttacaaaacggtgtcgtttacaggcgattatcaaaaaatgacaatcccatgtcaaaacggtgtcgttttattcgttttggcgtgtcaacaaagttagccaaagcccaaattttgtatataaatagtgaactggtgacttctccaatacaaagtcctaaactttcagatccttttcaaactcaagaaagaagaagatgaagatcactgtaatgactaccaatgacaacatcgtcaccttagatgtcgaccctcatgaaacggtaataaacccttttgttcttcttcctgaatttcacttatagcttttgtttgatttgaattggttttcttggtataggttgagaatgtgaaagctttgcttgaggttgaggtatgttaatttaataatgattggattttttgaattggggttgggttggattgggttgagtgaactgattttggtgtaaagtttgtgttttgattgtttttgtttttttttgaatgtgagcagactcatgtaccgttacaacagcagcagttgctttataatgggaaggaggttaggaattctgataagttgagtggtgtgggtgttaaagatgatgatttgttgatgatggtacccaattctgcatctgggtatgtttgttttttgttgtaagaattaatatatggatcctttgttttattgttttgtgatttgttatggatttttaagatgtttggggttgaaattgaatcttttataagctcatagtttgtggaccaaaggttcttgtgtaagtagggactcattcacaaatcaatgacagaaaatataggctaaaattgagatggatttgaagattgatggtaattttatggaattttaagatgtttgggggtgattttgaatctctttaagctcatagtctgttgaccaaactgtttttgaaagatgcatattggttagtctccaagtagggatccacaaatcagtagcaaaaactatgtagacaaattgagatggaattgaagattgattgaaatagaatatttaggcaaa

SEQ ID NO: 118827 - DNA, 1139 bp, Cannabis sativa
cttaattatcagaatggttgggtgccacactattagacaaatctggattgccctaaaaaaaacatcacttctcaagtttcatccaagatccttgaattttgcaccaaattacagaacctttaaaaagaaactttttctctcaatgagtattttctcaaagtcaagcaacatgttgatttgcttgcgtcagtaggagaagtcttttcaaatcgtgatcatatcgctacaatctttaaacgattgccaagtgaataatacttttatcatatcatcaaacactcgaattgaaggatattttgtagctaaaatcgaagctcgattcttgcctttgaatcaagaatagaaaagactgacaaagatgtagatctgagtgccaatcttgttgttgctcctgatctagagaatcaattgtcatatgaagctttcctggctcattacaacagtaatttcaaagcacaaggagctaacaaaggtcagttttattcttcaccctatccatcttctagttcttctagctactacaataatagagaaactaattcaagttacatgtctcgagatggatctccttcctacaactatggaagaggtaatcataatattcaacatggtggaaggttccctactacaaaaaactatcccactactacaaaaggtacaattcacgtcggtattcaagtatcatttaaaggtttagaaaaccgacgtatattccatagtcgcaaatagttttttattagtgttgtttttaaaatgacgcaaaaaataattatgttcatttcaaaatcgtcacaaaatatacattcttctattatatcttctgcgtcggtttagaaatgacacaaaattatttgtggcattttaaaaccgtcactaaaaagttataccgtcagttataaaatgacacataaattgctgaaatatttttttcacctattgcatcggttataaaatgaagcataaatgtaggtaaggaaaaattacaatttttcatgtaattttcaccacatgaaaaatcacataatttcacaatactccaaaacacttttagagaaattttgttcttgaagtgataaaacacaatgcaagttaaaaccagataatgagaacagaacaaaaaaatagattatagttaagta

SEQ ID NO: 118828 - DNA, 1144 bp, Cannabis sativa
tatttttgtagtagtgtggtcaaaatctcatgcctctttttcatttcaggagtggggattggtctctttataatagctaaaacttagcagaaaaattagaattagtaaagcattaaaatcataaaaaaacaactcaaaaccaaaattttgagaattatcaatacttacgtaaaattctgaacttagtgttgtagattggatggaacccatttgtccaaaagaagtcttccctaaactcctttttattgggaagcctcactatgatcttacgatcattagtacgagttcccaaatagtaaaagcctcctgctccatgctttctcgcaagaaaagcttttacggagtaaaagtataaaatctctaggggagttggacactcccaatttaagatgtggtggagatccttcaaacaagcaaggatcctataagaatttgggatgagctggaaaggtgctatcccgagatacctgcaaaattctttaaaataatcccttaagggtagtacggctcttgccctaatgtgttccatgctctaggctccaattttagaggactcgttggtgtcgcagccttcatctctaatgatgcattatgggggaaatagctaaactccccaggtgcgactgaacggatttaacatccattctcgtttctaatcccacaagatcttaatacatcccccacatagggacaatcgaccttatcctagattcaattagttcagcttcaaacataacagaaggattctgaggcatcttggatttgcgagctttatgagtcataaggtcaaattccaagtcatctggtgaaaaagcaacagtgactggtggtaaaaataatagctttgtcgagggaatatcaactaagttatgaggctctagccaagcttcttctcgtagataacggtgtctaccctagatgacttcctcttggttaaacctaaagaggtgattcctaatttttatgtcattaatttcaagtatggtttgagatttaaaaactatggcctgaaattaaggacaatatcattctgaggaatctgagagtacaaattctgggttaaattaggacatgatgacagagaataatgcccaaattcttgaaaaaatagagcacaaatagaacgtccagcgccaaagtcact

SEQ ID NO: 118829 - DNA, 1904 bp, Cannabis sativa
ctacaacactctctttagatcctcatcaccaatcccaacctttaatcccataccacctcctatgacctctccagatgtgcctcaacaaagtcaatctccttcaataaatccatcctccccaatgcaaccacaaaatgaacctgttacacaactttgaattccatctccagttcagatacattcctccataacccaaccatcaaatgaaaacattacacacgaccttgtgccagcccaaaatcaaacaaaacttgatcatgaaccacaacctattcttatttctataccaacatctattttgcaattaaatatccctatggttgcacctctcaacacacattccatgatcacccaatcaaaaaatggcataacagaactaaaagcttcactgctatttccaaagtctctcttgaactaacctctctaaagactgcccttcaagaccctctatggtttaatgctatggaaaattaaatttatgctcttgtttaaaacaaaacttggaactttgtgcctcattttccaagaatgaaagtggtgactaacaagtgggtgcatttgattaaatacaactctgatggtttggtggacagatacaagtctacgctcgttgcaagaggtttttagcaaacaccaagtctagattacattgaaacttacagtccagtagttaaaccatctacaattcgagtcatcattacacttactgcttgcaaaaattggacaattcaacaagttgatataaataatacttttcttaatagggagcttcaaaaatgtgtctatatgactcagccgccgagtttcaaaagcattgaccatccaaatcatgtttgcaagcttaataaaactatctacgggctaaaacaggcacgccggccctggttcaacaaacaaaaaacttacttagtaaaatggggatttgacaactcaagggctgacacatctcttttttttcacaaaaagaaagaacaaactcttacttctccttgtatatgtcgacgatatcctaattactggagaatacattgcttaaatcaccaagtttataactgatataaattcacaattcgccttgaaaaatctaggccctgttagctacttcttgggctttaaagtcaccagaaactcaactgggatgtatctcactcaataaaaattcatcagagatttactcagctcagcaaacatgacagatgctaccccaactcccactcctatggtccaaggtaccaaacaatcaatatcaagtggcagacccttaacagatcccaccctatacagaaaagtaattggggcattacaatacctcacaatgtccagactagacatctccttttctgtcaacaaactctctcaatttcttaaagctcccacttttgagcactggttagcttgcaaaagagttcttcaatatttagttggtacctgtgatcttgttctccacttcaagccatcttccaacctttaattagtggcttactctgatgcagattggaccagctcagtacatgataggaagtctacctctggttactgtgtatatctcagagacaacctaattcactcgtgttctcataaacaaacaattattgcttgctccagcacagagtcagagtatcgagctattgccttagctacaactgagctgatctgttacaatctttgttgacataaattagattgtctagtctttcttgccctattctatggtgtgacaatctcggggctacttgtcttacttcgaatcctgttttcacgccagaaccaagcatattgaagttgatcttcattttatcagggatcgtgttgtaacgtcccaactttaagcctccattgggtccttgcacccacggaatgaatggctcttatacacgagtatgtcactctggctgcttcatgga

SEQ ID NO: 118830 - DNA, 548 bp, Cannabis sativa
  modified_base (503)..(507): a, c, t, g, unknown or other
tattttcaaaggcattttgggagacaaaatcagagaagctatcacttagaatatgttatataatatattttatgtatacatataatcacatagtatggtaggatttaaaaaaagctctagtactatcattttcgacctaccatattcccttcctttcttctcacaaggagatatagttattatttagttaatatatagagaaaattatggctcttttaagtttgaagtattatttgttttatttaattatttgagttttaggttatataaatgaagctgtcatcaatggggaaccttcaaaaggtttactctttatctagaataaccacactcaactcaagttgtcacctatttggtttgggtttccttctaagtcccatcaattgcaatgggccgagtaagaaaggccaaatatttggaggaccaaaagcaagagatatatagtccacgatataatagttttttttggaataatttgacaaatacacaaaaataataaaaannnnnacaaaaatacagtttcacggaattttaaatatatttacaat

SEQ ID NO: 118831 - DNA, 2014 bp, Cannabis sativa
tttttcaattttaaaaacagaaagtaaaagtgtgttttgtaaagtttattttcattttttgattttatttaagtttggtctaagtctgaggtcagattcgagtttgggttagaagtcaggttcaacgctaggggcgtagggaggatttgggtttaggtttgatcggaatttaaaatattgattaagaaaaaaaaactgtttaaaaaaatattaaaagtatttttttttgtttttaaaattttgattctcaattaaaaaataaaaaaataagaacagttttataaaacaggtttttgaaaaatatttttattttttcaattttgaaaataaaaaactgattaaaaaagtgttatcaaacgccactataattaagagttacgtgatacgtgcaaaaaataatgttagtatttggacacatatgattactctaaaatcaattttcaattatgtacagagtttttttttttttttttaaaaaataagtaacttcattagataaaatcgtttcagtacaagttacaataagacatggaatattaccattccaggataacttcccatgaagccctattgccttttttggctatattatgagccactgtattacaatttctttttacataacttaaagaaacataggggatataagacgagtcaacaacataatttataacatcacttaaagaggataagtcgaaatgatcactataaatttaatcaactagcccctttgaatatgtttcaatgcaagtaacttggatattataagacctgcaccatccaatagcatacttttttttttttgtttgcaagcattcaatagcatccttgagagcaaaagtttcagccaatgttgagggataatcaccaggaaaagcatttatctagcaacaattcttccttttgaatctctaacaattactcccacacctattttctgtcttttggaatccacagtatcaacattgagctttaacattgaagttgatgattgtcatttgcaacaactacttcactctacattttccttcattctcttttcaccagttgcttggacttatttatgctcttgaggacttgtctggtattgatttgtattaatagtttgtttggtctgtggccaaatctaagttcgattctaaggttcgggtgggagtttgggtccagggtttagggttatgggtcggggccagggctaggtcggggttcggggtttgggatccaggtccagagccgggtcgggatctaggtcgaggtttgagtctagggtccagagtctgaggtcgggattcacgttcaagtttgggatcaagttcgggatttgggttcggggttcaggttcaggttcaggtccaagttcggggtccaggtttgggatccttaccccagaccctttatattataatacaagttaataaaaattatttattatataataaataatacaattctcattgtattgaaattttaaggttatataataaaattaatacaatacaatgcttttatccaaacataatattatttgttatttaatataatacggtcattatacgacttaccaaacgagccatagatatattctactactccattgattatttccagcacagaaaaacaattcttgccaaaaaataataattatttctgttgtttcagatcatccacaaagttccaacaagcaattcacaatcactcttttccaacacttcaaaagcatttagtaagaagtctttaatgtctaaatgtttattttctgattttttttttcctttttcataaaaggagtatgtttccaaatttttttaactttgcaacaacttattagtgaatgagtcacactctcattgcaatggccacacataaaacaagtaggactaggaatgatttttctgttaaacaaattaagaggagtagggactatatgattgtaagatctgtaaagtcattttttggcaagttagttgacaaaataatttttccatttatggtaagattgttgagcattcatatt

SEQ ID NO: 118832 - DNA, 1211 bp, Cannabis sativa
  modified_base (30)..(34): a, c, t, g, unknown or other
  modified_base (1130)..(1163): a, c, t, g, unknown or other
tgcaacataaaatgttatttcttatctttnnnnntaagtaaatctgattatatgaattaaaacgatgagcctggccctcaccttgtataaaaaataagagagacttgacgaatctaaaagataagaactcactacagtgaaggccacgctcatgtcctggatttggtacacggtgttggttgaagtgcaggccgcatatctcttcatggggagttgggtcaagctggcagaaaagtggctatttatctctgaggcaaaaggagccaggctaggtcccacgaaacgtttaaaccagttggtcaagggatccaaattcaaatcccatacatttttggcgtatttgctttggacagatctatcctgggcgtcccttagtattttcttcagagcctccacctccgcgttccccttggtgtactcccccaaggcgtagttgtacttagcaatctggagctaggccctttcctcatctggatgaacgagagtcaagataatgccaggaggcacaggatactcatctactttagaaggaatccttgagtcaacactgggagagggagtatccactcaccttgttttattaacaactttcttctccaccattttgcctttacgcttgcggtccaggggagggatgatctctccttcttcctcttcctcgtcaatgagaacaacttggtcctctggaacaccaacagaagatctcttgggagtcactactatctttcatgactcggacaagccagcctcaggactgtaggtacaggcaagggcatcaaggaggtcctccattggcttcgctgcttaaggaaataaacaaaggagtcatagcattgccaaaaaaacatgcatgaagaatgacatgatgagactaatcctaccctggcgatctaattctgccatagcaaaggtatatattaaaaggttggtgtcgtcatcccctagaaagctatctcaggggaggaaccaactggaggacacataggcggagttatccaggacgatgggtaagggaggaccgaaacgcatctgggatcggcctaaaatatgactagagttggaaaaatagttgcggttgggcgtttcttcttccctcgggaggcgatgaaaatgttggaatttattttacnnnnnnnnnnnnnnnnnnnnnnnnnnnnnnnnnnaacaccctaaatatgaactttctataacgataaataaacacatataaa

SEQ ID NO: 118833 - DNA, 2220 bp, Cannabis sativa
agatttttcctcaacgagtctcttagtcacatccttcttcttcgtctattaatttatgtttgatgaaaaatctaattgattatgagtgtatacatttttcaaattttcataagttatttgttttttagcatatatttatattatagattttgccttgcttcttagacttttttttttttattattaatttatgtttaatgaaaaatttaattgactatgaatgtatacattttttaatttgaaatttgcagctaaactcttcaactctcaattaactctcaaacttcaaattttggtagaaaaatccactaacctctacttatattggtaaattaaaagtaccatctataagagtggttatgtatcatcatagattatcccacatgtaaacaaatactatacaagtatcgtgtttatattggtccatataattatatataatgagctatcaaatcgtgagcgagagataagtcaaatctcaccaaatatctatagacagccctaaatacatcatgaaaagtaagcaatcatgtcctatgatcaaatttaagaaattttgtaaagtatagttcatacaaacacgacaatggtgaccttttactaccattacgagcctataaatacccctaatgatgtatagaaaaggggattgaaaaattttctataataaacaccctcatttaataacaataactcatggactaaggctcatcaatgccccaaccatgtaaaaaaaatccctcttctaacattcattaattgtttcacacaattctaattaatagttgttgaaaatctcggccaacaccatacatttatttttaaaagttaaaccttttggcgacatacgtccactcagtacagtggtctcctattgtccagcacaagcacaaatccttctaagggtcccaatagtcaactcttttttgcatattttttaccccattagtgggctttttgcaaaaatcctaggtgggtcatgagcatgtccatacccgcccttagcctaaacacccttctatttccatacgatagggggatcacaacccgtatagccaaagctctgctcgcattcttctaagctttcctcttgttcaagagaaacaaataacacatagttagggttcttgctgaaacactgtaacaacattaaatacgccctttgaggcttataatctgactcatggactaaggttaattaacacatgaatcacataaaaatctccatcttatttatttctgcattttatcacttcttaagctcttaaatatttaatttctaaaaatttcggtaaatagttaggatatttaagaagttgttttaatgaaaatcctaactatattttaatttgaaaaattaatactttataattaattgtctaatgaaatattttaaaatatttacatggttaaataattagttaaactcaatttgtttagttattttactacaattaattgaagacaagaaaagggtataaacttattttgtttgaaattaatttatttaattggaaatcgctttattttcttaaatagttttcaaaaattatttatgtaatatgatattaattaaattattttcaagactataacatagtaatttaattaatatattacaagtggttaatatttagaaattaaaatatttttaaaataattttaattatgacaaacacatcttaaaatagtgagggggagaggattttcatttgttatgaaacacgtggtctccattattagtacaacactgaaggtatggggagagcattgagatgactttatttttgtcccccaaaggaaggtattgaaccatatatcatcaatgctcgccttctcgccttctcgctcgaactagatcgaaagccgatctaaatgggtctcgtgagtaatagggctccatttggaaaagtgagacgcaagggagagaggaaaagtgaaaggaagctttggttcgttgggttccatttgggaaagtgagacgcaagggaaagtgaaaggaagttttgcgatataacatttaaaaataaattggggacttaaccccgttaaccttagccaaaaaaaaatgaaaaatttctcataaaccatatagattatagaatagatatcttctataagggtatatatgtgatccaacaataaaagttcaaagtattgtaacttttaattaagttatagattacaaaaaaaaaataaaaatattttttttgaaggaaa

SEQ ID NO: 118834 - DNA, 519 bp, Cannabis sativa
gcttgttatcatgatgtctggaaaatatcttggtggctattttaacaccaagtttgtgatattgattacctgcttcactttttttgttgttgtaaattggttagttgtttttgctcattttaattgaatttttttcttattttcagtgatgagaaaggtctattctatgctttagatctcggtggtactaatttccgcgtgctacgcgtacagctaggtggtaaagatcaccatgttgttagacaagaatttgatgaggtttcaattccacctgatgtgatgactggatcttcagaggttagtaatttgattcagcaaatgtattaaggtctaagcttgttaaattggctttaaactaagaaaaatgttcaaatatttcagggtttatttgactttatagccgcagcacttgcaaagtttgtttctgaagaaggtgagggttttcaccctgcaccaggtaggcaaagggagctgggctttaccttttcatttcctgtgaagcaattatcgatttcttct

SEQ ID NO: 118835 - DNA, 1196 bp, Cannabis sativa
  modified_base (48)..(52): a, c, t, g, unknown or other
  modified_base (1076)..(1099): a, c, t, g, unknown or other
ggttcgagtcccaggtaaaacatgatgtaatatataaacgcttgaatnnnnnaaaaaaaaaaaaaaaaactttcctataagaattaaatttatattaataattatgtaagggtaagatatgaattttatattaattcacttttccttcattcttatctaccaaacaactacagaggatatgtactctcctttctatctctcctattttctacaatctctttactttctatcatatttaggtaaatactattttaaatcctacgtttttacaaaagttgctaattagatcttatgtttttactttcaacatttgtgaaataattacatgattattggcagatttattcgtcagtccatgtattccgttgaggaactatacaaagggtcaacgcagtagcttgcaaatatagttaaaaggagttacattgtaagaataaaagaagataataaacaagtaacaagtatgtcacattttgtaatttaataataactaatttagcatgaatcaatcaaccaccaagcataagttctgtaatttaataataataatattatatatctaaaattgtgacctgtcaagagtatagcagagaattgttagaatttattgggtagacaacataagagaatccaatcatcctacaatgaaaaatagtactaccttttatatttgagagtgaggaatgtcagtgtaaaattagtatattgatatttggcattgatcatctaaattcactaatatatatttaaagagcatctcagtcattttagagagaaacaatggatgttacacaattaaaagattgaagacaaataagtattaaccaaatctttaatatgatcagctttgacaatacgtccatcaacacctgttcctttgatatatacttgaattcggcacctaaaataatacaaacaaagctctagatagacatctaactaagagagaaccaaaaagtgagaagatagtaccatgttgaagaagacttggcaattggagaatatattgatatttgttatttttttttcggaggtcatttcccttcaatcctaccactacaaaaaactgctacttnnnnnnnnnnnnnnnnnnnnnnnncataatttttttgtgactaaatgctacttttagtcacaataaaatgttacttgtgactaaaatatagtatttagttacaatttatcactaatttagt

SEQ ID NO: 118836 - DNA, 1096 bp, Cannabis sativa
cacttaaattttagcaacccgaactttagattgggttagaaaatatataggataaaccgcccaaaccgatcgatgtacaaccttactatgggtggcaattcgtgtttctgggtcgtgttcatgtcgtgttgaggctcgtgtattataggtatatgctcgacctgaacacgactcatttataaacaggttgacacgacacgacctacataactagtttataaataaatttatttaaatatgttaacccattaatatattaattatattttaacacgtttataacatatttaacaagtttatgactcattcataacctattaaagaactaaataactttaaataggtcagtaaaggttcgtttggtacactgtgttgtattgtatggtattgtgttggattgtattagtattatttaatacaatactatgtttgatattaacttatattaataggttgtttaaaattataatatcttgaaaataaacttgacccctaccccgaccttggctttaagacccagacctgtgacctagacccgaacccaagatctaaattgggaccaggacctaaactcaggacctagatcgagaccaggacctgaacctacctgaacctgaacccgggacctaggatctggatccagccctagccctagagttaccactttataaaagatatacttttgtttatcacattaccaaaaatactctcctcataatttctttatccctcactctagctttttattttctctctatctcacttgtttctctctcatttaatcgatctcttctctatttatttctttcctctgtcaacctcacgcctttgatgaccacatacctctaagactctatctatgctttcaccttttgaatcaaactccaactccgacatatacaaatgaactcttaatttttttctgccatttttgttagaaagttaatgccctcgatgtgaactcaacaataatttgatggggagtttttaatcagtgtgatttttacaagaaatttgatgcccttgatgagcgcttgtaacgtccccgcttcaagcctccattgggtccttccacccacggaataatggctcttat

SEQ ID NO: 118837 - DNA, 1003 bp, Cannabis sativa
aaatagtccagtctattcttaaaccaaacatagaattactttcagcataatccattagtctaatcatgcgtaccaaacgggcccttaaagtattgcagtacttttctagttttgtcttaatacgttttttttaataattatttgcgaagagtaataaataaataataaagagatattgagaaaatagataaattattgtttacaaagtaaaaaagtaaataatgcaactaataatcaagtcgtatattaacaactaacataaaaagaattaaaataattaaaaaaattaaataaccttaattatttatttaacacttttattacaaaagacccttgataatagtaacctatgtatatgctacattttgtaaaaatggttcttttgttattatataagttcccacatactatcaatgcaaaacacaattatgtaataataataaaaaaaaaaaaaaaaacaaatacgaagtaaacaattaatacccatcttcaaaagaaaaaaaaaagtaatacaataatttataggattattttagcatttaatatttgtatattttgacaaagaaacaatggtttatttattttatttttaagaaaaatatggcttgagcaaaacgtagaaatattttttttgaaaaaaataaggagatgtgatatattattaattaaggtatcaacctaaataataaaatcaggtgggaatagtatatgacttagaaattacattaaagctaaacacaaagtttgttaatatttaacaattttaaatttgtttagtagaccgtattatattatactatattatatagtattattttaaattatattttacataaatacttttatgtaaaattatgtataagtgctaactttaatttataagtattaaatatataatattttagtataaattaaaatttaatataaactacaaaaaaatttacttttggtcacaacaaaatttgtgactaaaaataaaaaaaataaaaaaaaaaattgtgac

SEQ ID NO: 118838 - DNA, 1427 bp, Cannabis sativa
  modified_base (861)..(862): a, c, t, g, unknown or other
aagtagtatttgtgtaattttcttctatttgggttgtatatttgtttatttggccagctgaaagtatttttgcaatattgttacttttttggttaaaactgaaaaaaagccctaaatattatatgtcaccttataattggcttcaactaatagcgatattaatacataatcatagatgacttttagcatttctcatttaaaaataatatattaaggagtactaaggagactctatatctcactctcttttgcactctctttttaatataatgacaaatgtcaaattttgagtaagatttgttcttgcttaatatttaattataatattctaatgttattataattatgccattctaattaaattatcaaacgctcttctttctctgatctttcggagtccttagtcgagtcagatctgcaccgcaggttaataactagttatttattataatctgattacttcattaattttttatttttacttaattacaagcaaaaatatatatatatatatatatatttggaagaaaaatataatcacattaaaaaaaaaaaaagtacaatatatatatatttaaattatacatagattaattgcaagattttttttttttcaaaaagtaaaaactataataagtttaatgtatacaaaagttaatacaattaaaaaaaaattcaatgacttaaaactattattattaatttttttgtactattttatattttattagttcttttattacacaatactagtttttttttttagatttatcactatatttttaaattattttttattcttcttatacaagtaaaattcactccacttctaatacagtattttggtaattaaaattacannaaaggtataaatgttgtccacaccttatggatgtatttttgtaaataaagtgtcaatttatattttctatgtaataattcctaaatatattagatagtttattagtgtatttatattgataaataacataattataataatcataaaaaattattactttttcataaaaaaaaaaaaatttaaattgtattaatttttatattgcataatttataaaaagaaaaaacaaattacaattttcatataaatattaattattactttgttttattttaaaatatatttatatatttttttttcatttttattctttaatatggttaattcttttatacataaaaagtcagtaaaataattatattacaaatagtaatgacacaattataataacattagaatatcataactaattattaaataaaaataacttttgctgaaaatatgacatctgtcatcacattaaaagatcacattaaaagagtgggatagaaggtttccttagcactcttctaatatatttattagggtaaatagtgacataagtactcaaagttttaagtttgta

SEQ ID NO: 118839 - DNA, 624 bp, Cannabis sativa
tccctacctcttcatttgtgcagcgaaagtgctttctagacttttggaagaggatcttgggaaaggaattattcaagatattaagttaagtagggggtcggtgctatcccatattttctttgcagatgacctaatcctagtgggtcgtgccaacataaacgaagctaaaggcttttggaattgtcttgagaagttttgcgagtggtcagggcagaagatcaataaactcaaaacatctatattctttagcaaaaatacccctgatggaatgaggagaggaattaaggaagtcttgggtatagacactcctgaaggggtcataaagtatttggggttgccctttttcagatcaagacaaaaagatgttgacttcaacttcattcttgacaatctcacctctgaattgcagggctggaagaccaaaacattatcaaaagcaggtcgggctacacttattaagtcggtgggcttgtcaatgcccatttatgccatgcaaaccaccaaactgtcgaaacggcttgtgaatcagattgatggcctgatccgtgatttttggtggggattttagaaggggaatcatggcctctatcttaaagcctgggataaactgtgccttcccaagtc

SEQ ID NO: 118840 - DNA, 914 bp, Cannabis sativa
ttccaatgcagaggaagcttgtaaattctgtgttcattgtttttaatttctaattcataacatagatttaatctgctaagaatcatcaatatgaactggcagaaattaggactttcacgtagtctcacatgtacgagtagagcctctgcgaaatggggtaataactcaactgaacgcattccaagtaaccttcgggcatttggttgtgagaaacccataccctttgcaggagcactcgactttagccttacagaagtatgtggcttcagccccaaggctgggagagacttctgattgtcgctattcaggggatttcctttcatggtggccctttccgtgagctaaggcttccatcttcatagaacagcggtcaagagagttgacatgctacaaatcacttagtttttccagattaggatccacatgtcaggcttacaaaaatctggacaacgcttatgacttgtgttttgaacatacaaaatgattttacagtcacttcttattgttattgtcatatatatagatatatatatatgttgtttactgaagtgacaagtataaaaaggagatgtgaatgcacatagtcataatttgttacacctcatgcacattttgtttgattggtaatagttgttattgtatttaaatattttcaaagtcatgttatatgtaatgtatatatcctatcaatatgatatttatatatgatttagctgattgatgtataaggtggataatattacagtagataattatattatgtaagtgggaatattaaaattaatattgtagataaatatttgttaataaccataatagcatggttaatagtcactaagggctcgtttggaacgccgtattatgtcgtattgtattgtattatattatattaaattgtattttatgcaatattt

SEQ ID NO: 118841 - DNA, 2294 bp, Cannabis sativa
aatgcttccccaatatcaggccttacaactagcacaaattagaattcaggtcagccccttgtacctttctcggatatagtctcaatcataatggttataagtgtcttgattccaatgggagattgtacatctctagggatgtaatatttgatgaattttcattcccttatgagtacaaatctgatcatgctccaactcccatccaacagtcctcaatctcacctgtttcagcaatcattcaaacctgtccttacttcacccaaccttatactatggctgatctcatgggtcctagaaatgaatctgaacgaagaattgaccaggatgttttactagataatactatacatgttcctattgttgctactgacacttagcttcccagccaaccctctatacatgttgcaggtgaatgttcagggactgcagcagatgacttaagacagcatttggatattcctgttgcaccaaatgctattcctgaaccagttgttactggagtcattgatgataatgctgcatcaagtgttactccctctgttgctacacaaagtcaatctcacccagacagtgatcctactccatacagggacccatattcatctctctctggtgtttctaatgctcaaaccagacccctcatttcatctcctgctgcattacctttggttgttagttgtcacaatgccccaggaaaatacagcctacatcggatgtaaactagatccaagtcaggtgtttttaaacctaaaacctttgtgatcaccaaagaaccagcaagtattaaagaagctcttgcacaagagcattggaacaatgccatgggtgatgaaatactagcccttgctagaaacaaaacgtggattttggtgaaattacctcctggtagacaacctattggttgtaaatgggtctacaaagttaaagaaaacatggatggctccctaaacaagttcaaagcaagattggtggctaaagggtttcatcaacaacctggtttcgactttactaaaacctttagtctagttgtcaaaccagtcactattcgagttattttatccttagcattatccaaagggtgggacataaaacaactagatgtgaacaatgcttttcttaatggtgaggtacaagaagaggtctatatgacacaacccccaggatttgaagttccaggacaagagcatctagtatgcaagttgaataaagctttatatggtttgaagcaggcccctcgggcatagtttgacaaactaaggaactgccttctgtcacttggatttgaatcttctaaatctgatcactcactctttattcatcacacaaacacatcttctacacttgtcctagtgtatgttgatgatattcttgtgacaggaagtgaccctcttgctcttgattctctcattacttctttgggtaatcaattctccctcaaaaatcttggcacattgagttactttcttggaattgaagtgagatatacttccaatggtattcacttgtgccaagctaaatatgctaaagaccttcttgccaaggctcaaatgacaggtgctaaatcacttccaacaccaatgaccagtagccttagattgtccgctcaccaaggggatcctatgccagatgttcaactttacaggtctgctgttggtgctcttcagtaccttacaatcactcgacccgagctgtccttcagtgtaaataaagtgtgccagtttatgaaaaatcctttgcaaactcactgacaagttgtaaagagaattctcaggtatataagtggtacaactgacttcgagcttcatctcaccaaacctctgtcctatgagctgacagcttactgtgatgccaattgggcatcggatctagatgacaggaagtccacttcgagatttgccatcttttttggaccaaatctagctagttgcctggaatagtaagaagcaacagacaatttcccgttctagcacgaaggctgagcaccgaagtgttgcaaatgtaacagctgaactaacatgggtgcactatctgttctctgagttacatattcacttatctcagcctcctacggtctggtgtgacaacttaagcaccattatgctcactcaaaatcatgtgttacatgctaggacaaaacacattgagcttgatctgtattttgttcgtgaaaagctgttaaacaagaccattcagatcaaacatgtcgctgcctatgatcaacttgcagatgggctaactaaagcaatatccagccagagattcattgactttagaaccaaactcaaaattgaaga

SEQ ID NO: 118842 - DNA, 1162 bp, Cannabis sativa
tcctaaaggactaacactcccttcctctcttaatgcagaatccaatttagtatgcaagctacacaaatccatatacggtcttaagcagtcttctcgacagtggtacaagaagctctcggatgcactcctccatgaaggatttcagcagtctcaagctgactatacattgttcacaagaggcaccaaggatactttcattgcccttctagtttatgtcgacgacattgtcattacagggcccaatctttctcttctccgtcaactacgagacaccctacaccaaaaatttaagcgtaaggcacttggaaatctcaagtactttctcggttttgagattacccgtgccaaacaaggtctattcatctctcaaagacaatacacacttcagcttctcgatgacacgggttatgtaggcagcaaacctactaaaacccccatggatcccaaacaaaaactcgacaatgaacacggtgaaccacttgataacccatcacattatcgacaattgattgggaagttgctctaccttactctatccagaccagacattaccttcgccgtgaattgtctcagccaattcatggccacaccaaggactcctcatttacaagctgttcatcacctactaagatatctcaagggaaaacctggccaaggtcttttctattcatccacatcagccttaacacttcggggtttctcggattctgactgggcatcatgcccgattactcgacgttccacaactggatactgtgtttttcttagtgataatctcatatcctggaaaactaagaagcagcctacaatttctaagagctctgctgaagcagagtaccgcgcattggctgctacagcaagcaaaatcacttggttacagtaccttctccacgattttcagataccacagccccatccagcgttcatttattgtgacaatcagttcgcaatccatattgccaacaatccaacctttcacgaaaggacaaaacacattgagttagactgtcattttgttcgggacaaaatcaaaaactcaaccattcgcctcattccaatctcgggtactcatcaactagctgacacttttaccaaacctctatcatccacagtcatcaacactcatctatccaagatgtccatatatgatatatatgctcca

SEQ ID NO: 118843 - DNA, 582 bp, Cannabis sativa
gatactcacaccacacaacacaccaaaaataagatctagccaactatttacaaattttactaatggtaattaaattaaaataggtaaaatttctcttaaaaaaaaataggtaaaatttctcttcaaataagaggttctaaattggaatgtcgcctataacaatatattatatatattatacatgtatagaataactattcaaacagtgtatttcatccatgtataaaataaaagagttactcgtataacaatctgtttgaatcttattttcaacgtgttaaatttctttaaaagtttcaaaattttacaagatattttaaataattacaacatacacaactataaaaaattagattaattttttttttttcaaatactaaaatagatatgggtatattggcgcattccttttaagagagtgcaatacttttctagatacataaccaaataaatgtgcatctatccacacatttcaagggcatctattcaaaaattttcctatatataaaaaaaaaagagtaaataccattttggatcctgtgttttgcaaaagttacagattggatcctgtgttttgttaaa

SEQ ID NO: 118844 - DNA, 880 bp, Cannabis sativa
gtaaaataatttccaacacgttcttcatcatctccttcccctgttaaaaaaaaaaaagctccaaaattggtttaaaatcattagctaataaggctaagggaaaacgtcctattattgaggaggaagactctgattttgctcctccattaacgaagcatgcgagagctcctcttaagaagaaatcaaaggtcggtgtgcaagaaaaaatagctgaatatgttgctagaaaaaatgagaatgttggtggtgttgttcgaaccgaggtttgttttcagtttcttttttgttttccccttttttgtagatcttcttgtatttttcgttttatcaatttggtgtttcttgtttgtgatattctaggtttccattttaaaatttacttttgttttgtttggatttttagggcttgaattttttttgatcaattttatttgttcttttgtgggtttggcatttttgtttgtttatttttacttttgtttcattttgttgtgttttttgttctgtttatgttttccagttttttaaatatttttaaacttcagtttgttttagtgtctcttctcggtgtgttttagttttttaatagtttaagctatttatgtatgttgggttttgggaatattattaggtgtagttgtttgctgttcatttttaggtaacaatttgattttagatctttgtagtttatatccgtcgagtagtttttgttggtcagtttgttttaagttttttttttttttttatatagttttattatagtttgtatacttttttatttgccatttatatttatatttgccatgtttgttaaattgcaggtctgggattacaaatttagtccctctgatttttacagatccaaatgtgtttgtactag

SEQ ID NO: 118845 - DNA, 1314 bp, Cannabis sativa
atctatgacacggcgaagataacattttcatctcacacaatcacctaattacatgtgtcattttcttatatatggctaaggttaaagctacatatatctacttattgtaccaatattttttcaatacttgtatgtctatatatgcttgtggtattttgttacccaatataacatatccacacaacaactctaatcaaattagacatcactatagtgaataagagctaagatcaaagcaaggataacatgtttaatcctccacctggaccgccgccgccgggcggccaccaccacccaccaccacctcactgtcctccacacgagcacgggcctcctcctcctcctcctccaggtccccatggaccgcatcatcatcatcctcctcctcccccgggtccccatgggccgccgcctcctccccccgggccacatggaccgcctccgcctagaggccctcacggaccgcatcatcatcctcctcatcactaacacccttaactatttatatgtttagatatgaaaggctcataagcctatattatgtaataagaagataataaataagtaattatgtatggtgtaaagtggctacttgatgttatagtactatagcttattcgcaatttgattgcattatatgttatagtaattatatatattgcagcttaatacattcaaccatgtgttacatatatgtttgggttggtaaataattatgtattaaaatattcattaaaaaaaaaaaaaagcagagttatatctctttattttggaaagatagtcttcaaccatatgtaatcatactagtggaagtagcacaggcaaggcatgtgctgtggttggattttttaaaaggtatataaaattaaaaaatgaaattgatattttttttaaaaaaagtaatagtcaaactgagtaactatatatctaataatgccctctaaaattaagtgtaaaaataataaaagattaaaagtaaactgagacaagtatttttttctctccatacaagaaaactgtttcggtctatagttgctataatatatacattccaaaaatatattaaagagaagcaactttttattagaagtgaaaagttatgggctactattattatagcagttgatgtaaaggtaacaaaaggttaaagctaattgtaattgttagaaagtctttcattggtaatgtatgaaaatataatataatatataagagaaattagctatttttcctattgctaattagcgttgaaatggaacctcattcatcttattcctaaattctaacatagtatcaaagcaaaaaaaaaaaaaa

SEQ ID NO: 118846 - DNA, 545 bp, Cannabis sativa
ttaaagtttcacataatattatataaaaatatgatatataatccaattcaatataatacaatataatacaatatgacctaatacggcgttacaaacgaacccttcaagtctttaatggcatgtttgaatcaatattaaagtaatcattccttaaatttgtttacttattatttagttttatactaacattttagtaattaaataaatacatattaggtttttttgaaaaaatacaaattatattgaatcaagcatttttttttttttttgaaacaatattgaatcaagcatttagagttgataatacatatcaaatacatacccataatttcttttttttaataaataacactaaatacagcatttaagagaaattacttcatatattatttttttaatttttttttcaaattttcagtttaggctctaaagtggttggagctctaattgcaatagagatttctatatgattttttattgcaatttaagttgcagcgctagttgcaataaagattttgtatagaatttcataaaaatatataaaa

SEQ ID NO: 118847 - DNA, 1114 bp, Cannabis sativa
acctagaggccattacaggtaaagatggtgcaaaatggttgaatgccattcaagaggaaaagttgtcacttgagaagagaaaaacttagattgtagttaagagaccattgaacaagagacgtataagacgtaaatggattttcaagtggaaagaaggaattccaagagtggaaggaacaaggtataaggtaaggttagttgccaaagggtttactcaaaaggagggtattaaatacaatgatattatttcacccgtgatcaagcaaacatcaataagagtaataatttccttagctgcagaatttgatcttgaggtggattaaatggatgtaagaactttattcttacttgggagtttggaagaaagggtctacatggagattcccgaaggcttttagaatgatgatccagataagatttgcattttaaacaagtcactttatggtttgatgcaggctccaagataatagaacctgaggttcgatgaattcatgataaaagttgggtatactagaattaactatgacacttgtgtgtattttaacaatcaaatttacctcttgttgtatgtagatgacatactaattattggtaaagataggaccaacattgataatcttaagtctcaactcaagagtgagtttgagatgaaggatctaggtgaggccaagaagattttggggattgagataaagaggaacaaaccccattcaatcatgttaagccaaggcagctacctcaagaaggtaatagagaaatttgggatgactaatgctaaaccagttgcaactcctctaactcaacactttaaattgtctcaagagaaatctcccaaagactgagacaaaaagaagaaagatggatggtgtgccttatgctatattgagcgggttaaaaataaagcaacccacccaattaaaccaacataacccgaactaaaccgaactagaattttcgtttttatgtttttaaaattttaattatatatatttattataatattaaatataaatattaaatataatttatataaatattaaaaatataaaactaagaaaattaataatccctaaatcttaagactcatctccatctcctatattctcacttgtac

SEQ ID NO: 118848 - DNA, 1252 bp, Cannabis sativa
ttttcaagcgttcttacgtttatatagttcattaatcttgacacttttttttattagatacaaaatgctttttatatatagttttgtacttttgtttttgtaggtggtaaggtatagtgtttagttcatagatctcccatattcctgaaaatgggcgatgttgctaggagacactactccataatactggtcacatatcttctctttgtaaacactttgagcaatgtcaatggtgggatcacaagcacctttgtacgctcagagtttccagccactgatatccctcttgaccatgaagtattcgcagttccacctggttacaatgcaccacaacaagtaataataactaataactatatttaattatgtatacataggaagattataagtttagttagaagaatcacttttgtcctgtccttgctgtaagaatgttattattatcataacactgcgtgtactgtatagttatataagcctagttctaggactgtaaaatattaattaagtccattattgatgactataaatgatgattattattaatgtaggttcacatcactcaaggtgattatgatggtaaagctgtaataatctcatggattacaccagatgaaccaggatccagtgaagtgcagtatggaaaatctaacaaaaattatgagtttacagcactagggactgctcccacaaaatacactttctaccaatataagtcaggctatatccatcactgccttctctccaaccttgaggtaatttttagtatttacataatgttataatataatcttgagggtaggtgtgtaagaattttttttcttcccttcttttaaatattggtttaaatcttctggttcatacaaacaagaaattttggtatattttaagtagagtttggtaacatttttatttttaaagtttttaattataaaaataaagcaaaatttttatttttaaaattttgtttttgaaaaataaaaatgtgttttataattacttttgtttttgaaatttaaaaataaaaaacaaaagtctgttatgaaaatttcatttgttgatattattcgggttcgaggccgggaccgagagcggatccaagtctagggcagggtccaagttcggtttctaataaggtctaaattgaggtaggagtccaaaatattaattaaaaaaactgtttaaaaaaattttaaaagtaatttctttttgtttttaaaatttagattcttaaataaaaaattgaaaaata

SEQ ID NO: 118849 - DNA, 631 bp, Cannabis sativa
aaactgtattttgtagttttttgttatttttatatttttgtgaaacaatccctcttaaaaagcctaaaaaatatgaatcaacctagtaccaccctcatgtatttacacccgtctttttatacgtaaaaaaaggtatgtccatcctaaaacttaattataaagatctcatgacatatataaatatgattgatcgtacgttacaccctaaacaaagcttgtcttgtcaaaatatatgtatgctttatatatataaaagaggaaagctctccatatcccacccttgaagatatgtgtataaaaatataatataatatatatatacatacatactttaatgaatggtaactatatcctatacttaaagttcataatgttattaggtcacgccaaatgcgtactaaattttttcgcttaagaaatacgtactaaattataaaatggttttatattatattctacatgttaattaaaaaaacaaaaagcaacacatctcttgtcagttgtcacgtgtattatccaaatttaaaaaataaaaaaaccaagttattttcactatcttcatttgttagtatatatatttattctatataaaatatggttatataacagaatttttggtttatgaaaaatt

SEQ ID NO: 118850 - DNA, 1470 bp, Cannabis sativa
  modified_base (1419)..(1445): a, c, t, g, unknown or other
tcatgggccagaggaggttattggcgttgagatggacacagatggtttgaataataacacaaaaaacttgtttgaggcgggttctgtttcacaggcccaccaaaaattatgaatgtcttaaggcatctttagaccggatgattacatttttacaatatttttgaatagagatggggttaatgtgaagccaagataacttattgttcatgagaaaaaagaaatggcaagctcctacaccatcaaagttactaatcaatgtagatgtgacgattcgtactgaggatgggtgatgtatagggatggttataagagatcacacgagacatgctaaagcctccaaatgtatatttattatcttctttactctcctctgattgctaagatacatgctataggggccaaagctcgttttcctgctgaaatgaatctccataatttgtgataaagcggttgctatgttgggtcatccacttgagaagagtggaccgaggagctgttgatttccaaagttgcacaagacatcttcaaagatgagattttttggaagttcactttattccaaaggataccaatatggtggctcatgtaattgcaagtaaaggtgttcatcaaatagtcaatccaattcaatccgcacgatccaatctaatgtggggatatctgcactttgtagatttgattggattggaaatctaaaatctgcataagtatgttgattgacatgtaaaagtaaccgatccaatccaatccacacatatttatataaattttaaaaaaattatatatataactaatattttatgtaaaagaatagtaatttaaaaatctcacatatactataaatatattctaaaaagatcaaatatatattctataatttcaataatttatttatttttacatacaatttaaataaaattaaacatttctttgtacatacaattattttttcttcatttgaatttgttacttattttgtttactttaattcgttgttagagacataaaacaataataatttgttttattttgttgttagttatgtgaaaaaaatatttttttttggataaaaattaaataatttaatattgaaaagtaaccaatttaaaataattgatccaatgtgtacttttgcgaattggattggatccaaaatataaaattcacatacactatgagcaagatagtgctaattggattagatgaacacccctaattgcaagaatactcttattaattataagagttcttatttttgggatgggttcccccagtgaatttctcttgtgtagttggagatttgcctctcaattacttttgtaattaatgtgatttccttttaaaatattaaaagaaaaagttatataaagttatataacttctaaataaatagaggaaattgttataaaataatataannnnnnnnnnnnnnnnnnnnnnnnnnnaagaagaagatgaagagagaaagag

SEQ ID NO: 118851 - DNA, 2891 bp, Cannabis sativa
tataagagaggtaactagtttctttgtttagtgttatttgattatactatcgatgaaccatcgatattattgatggtttattgatggcaggatgacatattttttcttggtattttaattgattatcgatggtttatcgatagtatatcgatggtttgtcgatgattttgccttatgtgattaattttgctatatctttttttggatcgaaatagtatcgatataccatggaaaaagtgtcaaaaattgtcatctcttactttttaccctaattatcgagaagatgttgacatattatcgaaaaaacatcgataattatagaattataaatattcaatgtaatagttttaattttaaatattcaatgttatatttaagtttactattattttaatttatttattcaatgttatatttaatttatttataattgacaaatttgtatctattcttcttaaattaaatgaattttgaatgtaccgtgcttagcgtgtcgtgcctttaagactagtttattcgtatttacatgctatgattgtcgtgcttaaacatatatttttcgtatcatgtcatgcctaagtttatattttttgtacctaattgaactcgtaccttccggactcatgccaatctcgtacctaatttcgtatcgtgtcaacaaatttagcatttatttacactgttatttacagtgcaccaatttaggtccataggattcaccacatattatttttcttttaccaaccactttttataactccacatgttatttaaaaaaaaaaaaaaaagtagatttttccaactctttcctttctttaacacatgtttaaatacaattgagaaaaccccaatttctctctctcttaaagtaacacatctaatttattcgggtattcaactcaaaaccaaaacacccaaaagaaacctaaacccttacctctctcacccaaaatcagcaccaaatacaagccatgggggtgaagatattagatatggaaaggtttgtttgttcttaactttcaatgtctatactcatttatttcttaacttgtttctttgctcaaacttcttggcaaatcataccccattatgggaaattattttgttcatattataaagtaatcttggttgtgtgaaatgtatagttatacccatttatggtgttgataaaggttgataaattcatacacaaatactgaaatatagttgagtgttattaccatttcaatctaatactttgttttttcactacttaacttgtttattattaaggttgataaatgcacttctaactatgtttcaaatattacagcaaacttttcatgaatttgaagagtacttattgcttatttgattgttttatctattagaatttctattatcatttttaaggtatcaaactactctaaaatgacatttttgtaagttattatcggtaagaatttataatggataactaattgatatggtataatctgaaacttctttgggataatttatatgatttgaacattcttattagtaatctattacgactcttttgagaggtccatttgagttggtaaacatgttttctctctttaattcttttattttttaaaaaaattctatagagtatgcaatcataatttaaaagtgcttgtgaactagttaaaattagctttgacatacctgcattttccccaaagatctaaagtgaaaaggaagaaaaatagaacatagatcagacaaataatatgtaataaccttaactgctcactcattatatatgaatagaatctgttttggcataaactttaaaagaaaaaaaagacagacagatagacatttcatacaagcacttaatattagaattggaaaagatatatacttatacatgtatatatacatataaaaacatttattgtctaataattattattgtgatcttattttggacattgtcccacattgaacaatgataaagtattgagccatatacattatataaaaactctccattcattactaattggtattgagatgaaatccaaaagtaaaacatattttgatcaagttaccctatcttgtgccagtatcttttattgttttttttttaaaaaacaatgttttacttttattacaaatcttgtcggagctcgactcacccacccgccgcatttttgtcgagaatctccccgtggaggtcgacaaaaatgatatccaaagtcgttttagtgagcttgggatgatactcgaggttcaagtataccagagaacactacatagcatcaatgtcatgtagtagtatcaaaacaatattctatgatagcatctatttaactctaatagtatagcatacatttaactccaatagtataacatccttgtattttgcaaataagcaatccacataagcacacattctctaaaatttaacctttggagatgctctaatagatccaatggaccactcaatttaagaggtcgcaccaacatagccattgctagggcttttcataggttgggctcaccgattaagactattttagtaggctaacccaataagattgacctattagatttgaactcattcatattaaattttagttgtaaccaacccctacccattacattattacattattacattatgtattgagttgggttacaacccttattttgttacaattaattttcaattttatagtttttgaggtataagtttgcaagtttgcaaattcaaaaaaaaaaattattttattagaaaaaagttaaaaaaatatatgggaaaaacaatataaagtaatttttttttttgaaacatgaaatatcaactttattgaaataaagcattcaaattacaaattggcatgaaagtctgccaaaacatcaacatcatgaatgctacg

SEQ ID NO: 118852 - DNA, 1199 bp, Cannabis sativa
atattcgaacccctttcatgatgattgcaagatcctatttatagaaagtcatgcactgtgggtcgaacagatctaggctcaactagggtttgtgaatagaaaatggcccactaatggggaagatacaaggtaaatgcttaagttaagtgtaggcgtattggacctagtaggtgaagcccaatccttgtaagttataattgttgttattcattgtactgttgatagtgacagacgtgcatgagccgtcgtttggagcatggggaaaggttatgttagagtagtggatgtgacaatcccaaaggggattgtatccatttgtcgtggccttttggcgtgttggtagaggggacatgtccctaaatttctcggaattgtgtcagtagtgtggcatgtagatattgtccgaaatggtagacattgtcaaatgccccttcgggttccattcctggatagccttgtagaaggtatctatgcaagttgggatcccctaaggggtctctagccagcttccgaatatctatgatagaccagaggaccatggcatgtttggatcgggggactttcccagatacaagatctgggtgttttgatacttgataaatactattatctttacacttcttttggatcgaaaattgggtctagcatcctttggacttttctaaaaaggctaaatgttactcggaagaaaatgcgtacaacaacttgatttcctaagtaatttctttgtataaataaatttcatctctaatctccaatgaaatgatacacaatttttctaacttcaattcttcatttagttttttctctttattacattctaaattctaatcttaattttacggcttttttttaattaaagttgaatgtactttatctttttttttttttgaaaggttgaatgtactttatcttcaattaaatatacttcgacttccaaataattaacaatcgttagagataaacataataccttcaaaaagaaaacgatcatcatctttgcttactaatgttgttcttttcaaatgaatgtagacaaagtaaacggctcaagtaaattactttggaatgattcaaattttttataactaatagttctattagtttttcaataaaaattaaatttggaacaaaaaaaaaaggttttttcatttttacacttcaaaataattttgcttgcatttttacgaaattctata

SEQ ID NO: 118853 - DNA, 2086 bp, Cannabis sativa
acaggtcagcttcctgtcaatgattcttcttatactgtgttgtttgattctggagctacacattcatatgtagcatcaagagtaattgatgaattgggtaggacctgtgattttattgatatagtatttagaaccctactacctaacggagaatgggttatctccaaaaggtgggttaggttatgccaattagaattgtgaatagggagttaagtgttgacctagtacagttggaattaactgagtttgacattgtacttgggatggattctctgtccaagtatttcgccagccttcattgcaaacagaagatggtaacttttcaactagagggtgaggaaccatttatgtttgtcgggtccgtttagggttcccagattcaaattattttagtttgaaaggtaaggatttactgcacagtggatgtgtaggattttcagtagttatggttgactccagcagacccaaaacatttggacatgaggatgttagagttgtaagataatttctcaatgtgtttcccgaggagttaccaggattaccaccacagtgagaaatagatttcatcattgacttggcacctggagcatagcctttttgaaaggcatcatatcaaatggctccagaataactcaagcagctgaaattaaaacttcaggggatgctggatctagggtttacctaacccagtgtgttgtcttgggaagctctggttatatttgtgaaaaataaggatagatcgcttccgatgtgtattgactatcgggagtggaatacactgacaatcgagaacaagtatctattgtccaaaattgatgacttgttcgatcagctttagggtaaaaaagttttctccaaggtatggtcattgtgagttcctgatgatgttgttttggttgacaaatgatccgacaacgtttatagatctcatgaatagagtgttcaaggatttcgtcgataattgtgttatagtatatgatatattttgtatcgtctcatacaaaagcgaagcacgagaaacatctccgaatggttttgcaatgactcaaagattacaagttgtatgcaaagttcaaaaaatacgagttttggttatcacaagtttccttccttgggcatattgtctgaaagatgaaattatggttgatctaaggaaaatagaatcagttaagaattggtcaaggccaaggatagttatggaggttcgaagtttcctctgattggcgggttattatcgatgttttgtggaaggattttccaagatttctatgttgttaacaaagttaaccaagaagaataagaggttcatatggttagaaaaatgtgaattgagttttcaagaattagagcagcgattgatctcggtaccagttttagcatttccttctaataaagaaaagctgtaatatattttgatgcaaccaaatagggtctgtggtgctttttaatgcaaggcaatagagttattgtttatggttctcgtcagttgaaggagtatgagcaacgttacctaacacattatttggaacttgttgttgttgtgtttgctttgaaaaatttgcagcattatctaaaagtttttattcacttattcattgggacgagactagaaaaaggaaatatttaggtctctatctgaaataatggattttggagttagagatctgaagtttacttcaaagttttgggtaagtctaaaaagggctatgtgtacaaagctaaaattcagtataacttttcaccctcagactaatggacaatccgagatgacgatacagatactagaagatttgttaccagcctatgtcatggactttgagggttcttggagtaaatattttcctttgatagaattattttacaacaacaactatcaaagtactattgggatggatagataggagattttgtttgttgggaaattaatgtcgttcactgattcattgggataagactagagaaaggaaatatttaggtcttgagttaattcaacgaaccagtgaggcaatagaaaagattaaggctcaggtgcttgcttagcaaagcacgcacaaaagtttgttaaccttaagcacagagacataga

SEQ ID NO: 118854 - DNA, 7650 bp, Cannabis sativa
  modified_base (348)..(354): a, c, t, g, unknown or other
  modified_base (7544)..(7549): a, c, t, g, unknown or other
aaaattataatcggtttttatgaggtattatgtattatgaggtattttgttgtggaactagtttatttttaatttatgtttcagtgttttaggaattgatttcgtctttgttttttgattgaaagcagtttgagttattacgtgttacgtgtttgcatgcattatattatataaccggtttgagctatttcgtgttatttatttttattcattataacacatttatagaaccggttctattttaattataactcttgagttattttatgttatttatttttattcattatgttacaaaaccggttatatttcaattataacccgtttgagttatttgtttttattcannnnnnnatagaaccagttctatttttagttatatctaagacatctatttctggtgacttttccagtgattttttcggcgacggtgactttttcggcgatagtgactttttcggtgacttttttggcgcagacaatttttccgatgccggtgacttttccagtgaaacttattattacaatgtttatgaaaaagtcaaaaaacggacgattgtgcgccggtttctattatatcggacccctccacacaagaagctcagcaaactcttgaaatagcggaagttaacttgagtaaagctgaaggcaagagacaaacaatttattgattattttatttcacattttaaactttaattattttttaatcccatatttttttgtattatttatttatgtcatataaaagtaaaattttctatattttcccatatatatatgaaaaaactccaaaaaaaaaaaaaaatggtgtcttacaaaaataagggagtttttgacatggtgattagaaggaaaaggaaatttattaaggcctttctaacgatgtgttaactggacttttgggtcgtagccccgttggtaattatttttgggataattatatgaaatattaatttttgtaaaaaattacatttctacgtttaaagtttttttatatatatatttttacaatattctataaaagtacaaaaaaaacaataaaaaaattacataaaagtaacatcaaagcaacaacaaagcaacataaaagaaataatgataaaaaatcaacaacaaaataacaagaatacaacataaaaatacaccaaaagactattttatgtaaataaaatctaaaaaattgtaaaaaatattaaaaactctgtatagacagtatttttgtaattttttttgttgtttttgtatgtttgaaattatcacgttattttatccataattttagtgaggtcttttgttcttcttgccctgtgattgataatgacttgtttgaacttattgatcttgttgtcaaaggtgttcgcggtacgggcgatgtgggttgtgacttatttttcaaatcaaaccacatatgtttgttattgtaatttctcaaactgcaaccgcaccgcaagattttaaaactattctctaactgtaccaatggtacatacctagttgggtcataagcatcctcacttctaggcacgtatctggtaaaattattggcatcttcattctttctttttgaattttgatcaccaccaccatcgtttctccttgaacgtgatgttctagtggtatggggtctttgagatcccattggctcttttctaaggcaacatgtagtttcttcaaggcgattttcatcgttttgattgttatcagccattgaatatagatgatttctgtttatatggagggatttttctgagttttatcattgaggctctcaatgaaagaaccaaaccattaacgcagattttcattaaccaaaactaaatagccttttagtaataaatattttacaaaaattaataagtaataaaagatataataactctagatatttttacgtggttttgtagttaaaatctacatactccacgaatccttcttcttagggatattttctgaatttagggtataacaacagtcattcccattggagttttagcaatctttgaactttcaagtccaaacttttttaccaaattcataatatatatgctttgagaaacaaatatattatcatctaactgcttgacttgtaaacccaaaaaatagttcaactctctcaccatactcatctcaaattcctctttcatcagtttcacaaaaacctgtacctcattgttagaagtataactaaaaacaatatcatctacatatatctgagcaatgattatgttagatttattatttttgataaataaaatctactcctcccctcttgtaaccatcagaaactaggaactgagttattctctcataccaagcccgtggggcttgtttctctaatttgtaaacatgatcaggtgcatgaggatcctcaaatcctttcagttgttcaacatagactttctcattcaagattccatcgagaaatactgatttgacatccatttggaataacctaaaaccaatcaaacaatcaatagacaataataatctaattgattcaagtctagcaacaggtgtaaaagtttaatcaaagtttattccttccacttgtgtatacctttgtgccataagtcttactttattccgaataaccatgccaaactcatcaattttgttcttataaatccattttgtaccaataatattgatatacaatggtctaggaataagaatccacactttgttctctaaaaaattgctctaactcttcctgcatagctttaatccaaaatgcattagttaaagcttctttcacattcttaggttcaaccaaggataaaaaaaacaaacaaattgagaaacactactaaaccttcttcttgttaccatgtcatcttttggatttccaagaattatatctcctggatgattcaatttaactttacttgatggctctttttagactttatctgagatgatatttggaaacttcttttctgttttctcagtatctgtttcatcagattcatgatctgtttgaacagacacctgagttattgcaagaggagagttaatgacagtattattttttttttcagtaggtgtatcaataaacctatcaatattttcttaagaggaaaactcagataaatccctagaatcatcaatgacaatattagtagactccattacagtttgggttctcatgttgtacacacgataagccctacgttagtggagtatccaataaaaatacccttatcactcttggcatcaaacttaccaagatgttctctatctctcaaaatgaaacaagcacaaccaaaaacatgaaaataagccacgcttggtttcttacctttccaggcttcataagatgttttaaaaatacctggatgaagaaaaacaaaattaatgatatagcaagcagtattaattgcctcagtcaataatcatttggtaagtttcttgttatttagcatcactctagccatttcttgaagggtgcaattttttctttcaactacctcattctgttgaggagttttgggtgctgaaaactcatgagaaatacctgcagacttacaaaaatcatcatacacagagtttccaaattctttaccatgatcacttcttatgcgcacaatcttaccaatattgtaatccttttcaactttcaattttaaacaaagatatctgatttttctctcaagaaatctacccaggtaaatctagaaaaatcatccacataaacaaatatagacctttttctatttaaactctcaatttgaattggacccataagatccatatgaagcaattctaaaacttttgaagtatttatatcaaaaacacttttatgtgtgatcagattctttacctagtttaggtaaaccacgaacaatacctttatgtgacaactttttcaaagttctgaaattaatatgaccaagtttaacaagccacacatcactattgttattcacaatagattgacacataattgaaggcaacatggtatagcaattatcattagatctaaaaccttcaagcatattctcaccatttttgttcaaaataaagcagttgtctttatcaaagttaacagtgtaaccttgatcacatatttgacttatgctaagcaaattagcttttaagtccttccacaagaagcaacattttgatcttaggtaacccttcaaagtcacgagtacctattccgagaacattaccttcaactctattttcaaaggttacggatccacaatgcatagatcttatgtttgtaagaatagacctatcacctatcatatgtctccagcacccactgtcaaataccaaaaatgtgaagcacttcctctatcatattcagaactaaaaccagccaaacatttattctttttaacccaagtttttagaacattttccctttttactctctttgattttttaaaatatttaaatctctcaaattttggcaaagttcttcagagtaaaacacttaggtcgaatatgacattttctgccacaaaaatggcaggttggaatgaatttttcaagcttaccattatttttacctgctaactgtaactaatctgttaacactacaaagacagttgatgcacaactttctaagaagttggaacagacatattagcatgcagacttccacgagaaacaaaaaaggttttctttgaaatttgagactttgacgctccaagtcccacatgattcctttgagctgaattctgtatctcctcaaaaatagaagaaccaggattaagcattctacatttttctcaattgcatttacatcttttgacaacttactaattttatcattttttgaaattatttctttttcaaattttcatttaatgcaaaaagttgcttgatttcaaataacaattctttattcttacttaccaaggtttggttttcagaacaaattttcaacaaagaatcatacatcttcttgtaagattctcttaaagattcatcattatctgaattttcttcatctttggagatattattcaaacacacaaaatttttacctttggatatagaattcgggataacaaaagttaaagtaacattacctttctcatcttcactactctcggagtcattatcactccaagaggcgattataccttttttatttctcttcaaggtatttgcacattctaactggatatgaccaaatctctcacactccatgcactcaatatttttcctgttagattgaaaatgtttaaaagaagaataaatacattttgaggtcttagcattagacttcttatttttaattttttttatgtgtttctgaaaattcactgcaagcaaagcctatcaatatcttcatcatttgatgcttcattttcagtacttttgaaagcaatagtcttttttttccttggaggtactcgatttctcctttgaaccaatattttaatttaattcaaaggtgcgaaaagaccccatcaattcttctactttcatagtactgaaatcctttgcctcttccatagccgtgattttaacattgaacctgtcagaagtactcgtactatctttctcaccaaaatagaatcatcaagtttctcaccaaaggcaaaatattcattagaaatgtcagataatctttcatggaattcagataatatctcagaattagtcattcttagatcatcaatcctagtttgtaacatgatgaatctagatcttttaacatttgcagttccttcaaactaagtttgaaggatagtctatgcatctttagcagaaatacaagcgaaaacaagtttgtttaaactttcaccaacactattaaagatagcatgaagagctttattgttataactagataacttctcttcttctgtattccataaaatttcaaattttacctttgtgctaccatccttattttcctccgagggaagagaccatccagacagaattattttccatgcttttttatcttgtgctttaatgaaggctctcatcctcactttctagtagagatagtttatgtcattgagtagcggaggacgagataccgaacttccttctacaaagaaagacatttcacacgaaaaaacaaattaaacaaaaattaaaaaaacaagatttcactaagagtttagtgaactactctaataccaattgaaattccatttttataattaccaaagtaaatttatcaaacaatttaaataatgtaaaattgtagtaaaattgtttagacaaaaattatctttgttctatgagacactaaatctgacagaacagacatatactgcagatagtaaaaaatgcaaaaaataaaatgacacaagatattttatatgtgctatcaacaactcttttgaattgtttctagtccacggggccatgtttaaagaatgaaatttattagatgaatctcaagtgattacaaaaccaaattgacttatacaaataaagactccctctttgaatttactgcaattgttgtaatctattcttctaatcaaatttctaaagtgccgagaccttgaactcccttcaaatcgtagcacttgcacactttatcccgaagcgtgactcacaagtaatcttcctaccgaagagtgtctaacttccaatcttcccctcgaagagtggctcacttacaatcttcctcccaaagagtgactaacttgcaatcttcctcccgaaaagtgattcactttcacttttcctctcaaaaagtgactcacgaacaagatttctctcgaagcttgatgaacaatatctaaagtgttcaacctgcataatttcaacaagaagcaatacagaatagcataataataaaatactaaatacttgttggactcaagttcttcacacaacaaagaaaacactctctaactttaaagtaatttaagaaatgatacaccaagagagctaaccaataccaacaatataagagtgtatttatacactttagaaatcctctaggtcgtggtcaaacaatcaagaaataatcatgtcaataaataaaaatctactgaaataaaaaagtcaaaatctgtttaaacacacagtcagtccgttcaaacaggtacattgaacctggacagtttttcagcaaaatttccataaacaaataagacaactttgactacattaacacacatagttgtacacagtttcttggtcaagaaatcagataaaaatgaataaaatatgattaagaatttccttaaaaaacaaagataaaattaaatattctaaacaaggaaaactcatatttaattcacatcaagtcaaaagagaataaaatatgattttgaaagctttttcacaagaaaatgaaactatattttcgaaaataataaataaacaaataaaaataatttcaaaaataccacaaatattgtttttgtcttatattatcaaatatgtcaataaaaaattttacaatatatttttttaaaaaaaaaaacaagaaacaatcatttaattttaaagatccaaatttagatagttttgcttatttcttgttggattggggatatgaaaattacttgtgaattatttgagtgggaattatgttatattatattgttatnnnnnnagatagattaaaatattaaaatgagacatattatatattaataggagattaatgtatataatgtgattgagagttatatacatttaatattcacataaatt

SEQ ID NO: 118855 - DNA, 608 bp, Cannabis sativa
  modified_base (69)..(71): a, c, t, g, unknown or other
aaagtttaaaaacgggatcccggtacttgtaaatacttttgtaaattataaagtttaatatttaatatnnnagttttaatttgacacatttttcgaaaaaaacctttgactagcaaacatagcactgtagcgtgccttagcattagggcgttacacaaaatctgagctcagaaggtatgaacacaaagagaagtaattaattagattctttataaaaactcaataaattatcgaaataatgtctaaacagatatggaaagtttgtagatgaaatccttatctacatagtcagcattgtgaatctgagcaatcaaagtcagattgatctcacaatttattaatggccactaagtgaatacatgttgacctcaaaaattgctaagtaaaaatatcgagatcgtaacaaaagggaagaagaacaagtaagctcaagagacatcacgggcaaggagcctccttcccttcaacagtgttgtgctgctggaggttagaagtacctcttggttgttagaaattattttaccaggatcttagatctactcagaagtatgttgattaacaccctaaatatgaacttctaaaatgattataaataaacacatataaag

SEQ ID NO: 118856 - DNA, 1899 bp, Cannabis sativa
agtcgatagagaaacaaattggttatgttttattgtttttgttgccctactttgaatttttttaagttgtttgttttatttttattttattttattcttttttgttttattaagcaggatttattttctaaggatgatgatgattttgttgatgctggtgctactatggcttccagtgttcaagctattgagaagatggtatttaactgttattttaaagttctttctgttttgtttttttattttctctttttgttgtttcgttatttttgacattagttattttattttagatggagtcttcctctattgttgttgttgctggtcagtcttctgtttcttctagtttttaagttttggttgagtatgatgttcgtaacattgttgttttcgatgagactccaatcttaattcttagaaagagggacagaaagaaagaggctattttgaagtctccctttattgaactagcttctgttgatgataaattagattcagtatctaattctcctaatgattttgatttaaattgtgaaatatgttcatgaattatgtccattggatgataagattggggaacctgttgacccaaatttggaggctgactttgatgtttggttaggataggttatgggatcaaagaaatcaacgtaactatttttttattattatttgtttgtctaattttattaacttcagatttattgttgctaaatttatatttgtttttgttcttgtttcagcaaaagaacaaatgtttactagaagggcaaggatgggatttctccttccttttgatttggtgttgaggaagttgataacaagatgtggtttcacaagcttagttatcgtgataattttttgacttcttcagtaagtggttttttacagttttttttggttgtttgcatgttttcattacctttgttttgtgttgtttcttagttttttttttaatcttccttttttttttcttttttagcatattgaatcattttctactacctgcgtaaaaagaacaagtatgcacaggagccaaaattaaaggttaccacaacttattgcatgtttagtgctagcatcacaaatctatatgataggtttgttgctaaacaaaatgatatttatgttttatctctagatcatactgtggcgtagtacattatggggaaaaaattttatgtgctactccatggcacttggttgatgatgttatttttcctattaatatgaaagtctaagagcattggatatgtagtcgcttaaatgtatttgagaggggcatatttttatacaacttcctcaggactggtaggtttgagaaagctacaaaggaggctttctgtgtatgctttcactgctccaaagaatgacaggttgtacttggcatcatgtgttttgaaggttgttcagtaggtgatatccacagtatgcatgtgtaatatctgtgtatatttctcttgcttctttgattaggctctcatttctatttgaaattagacactgattttctcttaccctatatgcttcttttaattttttgaaaaacaatttccaagatttgtaattttctgaatcggcaacacagaacgcaagtgaaaatatgtttcctgctgcatcttgtgtgcatgcagacagcaatgttcctacgtaagctgctttcaggaatgtaccgtcgaccactattatcggcctgcatgttttccaccattttatcgaagcatccaaagccataaaaacaaatagcaagctgttatcttttgttgttttcaaatccacaattaatccaaggttgtttttttccattatgtgcaaaaaacttggtattaggttgtatgatgttggatattattttaccaggatcttagatctacttacaagtatgttgtttaacaccct

SEQ ID NO: 118857 - DNA, 2149 bp, Cannabis sativa
attggtactacctatatcaacaaggtacatcttctttttcgataactcatcacgaaagaactctacggttaagtgtgcttgacttagggtaatttcaagatgagtgacctcctgggaagtttttccaggaagcgtgcaagtgaaaacaaaagcacgttggaaacattcgtgttggtttgtagggtcagtcatcagtccaggaagcagccagagtgacgtactcgtgtataagacccataattctgtgggtgtaagggcctaatagaagcttgaagcggggacgttacaaaatggtattagagccttgaaccagctgaaagtatggttgacgaggacatcagactccataagaggggtgattgtgacagtcagtagtcccgtgattcataagaggaaataccaggaaagttgtgcaatctcacatcgcttgggaaatgttaagtgtgatgattctgagactgtgtaggtatgagactacatagttgaagaggacttaaatagattgattggtactacatatatcaacaaggtgcatcttatttttcggtagcccatcacaaaagaactccacggttaagcgtgcttaacctggagtaatttcaagattggggacctcctgaaaaatatagactaaaatttactatttgaaatttttaaaatttacaagtagtccttaagaactacaacttacatgatcataaaaaatatagactaaaaaattcttcttgatgtcgaaacaaatagaggatatattgaaatggtcattttgacaggtaaactatagaattacccaagtatatgtacctgataaattattataagaggagtgttaattacaactttctatataacttcttaatataatcaactaactttggcatcatagtttgaaagttattattattaggataaatattattttggactttgtattttgtaaaaattaacgattagaccttctgttttgttaaatgataaattgaactttttattttttaaaatggtacaaaatagtaccctaaactaattttttgtcaaattaaacttaacaataactcaatctaaatgtgttcaaaaaaaatgtttacatttttaacatcttttcgtggtaaagaatagtcttcaagttggtcatattaaaaaaaaaatacaaaattgaactcaagctactattttagaaaatacagtattcattttgtcatttaacaaaataaatcattttattaataatttttacaaaatataaaatagtattaatctttattattattatttacactaggaaaagataaaagaaaaacatccaaattaataaaggctgatgtgttattaacctagaggaagtaaaaacaattaaataaagcaagcaaagtggacttgatgtgttacttcgaaagttacttttatgtattttcatgaaaaaaaaaaagtaacaattaataatgaataaaggacaagcttggaaagttgaagtaaattttatctttcatactatgtttggtattaaaaaagagaaaaaaaaaatgaaagaaatttaagagagaaatgaagtgtatctcttttgtttgcaggtagaaaaaaaaaataattaatttaaatttttgcatcctaaattttttatgttaagaaattttttttatgtcattcaatattttgagataagttgagaattactttttttatataacacattaattaaatataattacaaaataattttaattgataattaccctcatgtataattaaagtacaaaatataatctcacataacttattaaaattaaagtctctaatacacataatagaaatatgacttataaaacttggtataaattaaaaaataataatggaaaaataaaaattaataaaattaataaaaaaaataactatatagtgtaatttcctctaattatttttaaactcactttttctttttcttttttcttccaaatattgtttctttctttcaaacattttttacatttcaaggtacaatgcctcttttttggaatttttacacaaaatgctcaaaagtagcactttttttttttttttttatttacaggaaagtgaactttttaaatatttttgggtaaataccattggaccctgtgttttgcaaaagttacagattggaccctgtgtt

SEQ ID NO: 118858 - DNA, 1351 bp, Cannabis sativa
gcatccacatccatataaattattattagttttattaaattaaaacttgtgatcaacaccaataatatataaccctaatattaatttatcgtatatgtaaatgatgagtagtaaattacttactcttcaagtgcatcttggtaagtttggctttcattcataacaatgcgtttaaaggtaggtagatcgaggcgagtaactggcttttgtagcaagtctttggcgtactgctccaattttttcagattggtaagattactgttatccatcgcactaagatcttttggcaacgccgaatcctttcagattattgtaagttattaagtaagatattttataaattttagataatttaaagtatcgaaaacaagatttaaatagtgtacgtgttgtgttgtacacttcttttattctaaatttctttaaaattttgtaaaacattttaaataacttcatacaaaattgagattattataactattcgcatattgaaaacacgaaacatgtattacatgtatttttaaaagtgcaccgtaaaagaaccctatatagaaatacctgaatgcgaaggaaattttgatgataattatggaaaaacattgtggtgtagtaatcaatcatatccgcgtttgcatcacccatgatttcaattattggatggtcagcatccaaactcaactttaatggattttgtatccaattaagtatacacatccattaaccatatcagcattgtacttcccttgaaccttgtcagctcctgttcctaaggacagaacaagaagatcaccataatcatgatcttcactactctcaccatcttcattattattattattatctttttttctttttcttccttttcctttttccaaaggatgatcaaccttaattctttttcttttcttaacttctgtaatagcagctacagtctgaaattaatcaatatattaacaaacattagtcattagtactaaactaagaaaaatatatatctagacatagaaaatataagatagtctctaaaatcgagcttattatttttattttggagaagaattaggtggcgtttgataacacttttgttttaaaaaattttaatcacaaaaataaattttaaaaacagaaaataaaagtgtatcctataaattttatttttatttcatttgttgattttatttaagttgggttcgggtccgaagttgagatgggaggccatgttcggtctggggtcaaggccaaagtctgtccaagttctaaaatctagataggagtcagagtcgaaaatattgattaagaaaaaaaatatgtttaaaaaatttagaaagtaatttttttttttttcaaaatt

SEQ ID NO: 118859 - DNA, 1826 bp, Cannabis sativa
ctctctctctctctctactttgacaaaaactaaaaaccaccaccccactctctctctaagcttttgtcgacgctctttctctctcgatggtggaaaaccgggccacacccccaatcactcaagaatatttcacaattataatgggtaagttgtgttttaagcattttgttagatattagtaatagtatgtaatttgttttcgttatatctgtggtatttgttggaacaggtattttttagtctgaaatggtagatctggtagatctgttttttgtcggaatctgggttttctagaggttatcgatagtttgtcgacagaatatcaatgcaatgtcgatgatatgcgaaggaaggtcaaggatgaccattatcgacataatatcgacaaacatgtcgatgaaaaacaatttaaatagtttaatttatttggcaatgtatcgacactttgtcgatagtatgtcgacatttagtcgactgtttatcgacaatatgtcaatggaatgtcgatatattgtcgactttaagacaaaaactatgaaaatctttaaacagttgacaggaaacaagtgaaaatttttaaacataagtaaagactaaacaaatattaaaactaaccactaaacaatcatagcataacaatctgaaagcttttattgtgtcggtgagactcacaatacgggcaaaaagatccaggcttcaccagttcaccattgaaataacctaatatgcaacgacgacacccttcggggaaccatggtggtggacgcagccattcatttgttttgtgaaattttttttgaagttgtaggtacctccattcgtttgtgagcctttcattttcaaattttttaaaccaatctatatgttcttgcatttttagagtaatttcgtcactaggttcctgtttgatctcttcggcagatagaagtttttatttgttctctttactaaacatttagaagtataagagaagaacacttataaagtataagagaagaacacttatgaattagaaaaggatttgcttttatagagcagaatacttgtttaggatggtagaaaaaattaattaaaattaaatgtgtaattgtagacatgtaagacatgcaatgtgtatttatcgatagaatgttgatgcattgtcaataggttgtcgataatacgtgaataaaagaaatttaggctaaacattatcgatttcatgtcgatagtctcaacagatagaatagaaattggaaaggtgagaaaaattaatcagcattaaatgtctaattggaactcgatagtataattgagtgggagtgttaatcatagatgtggacatttataacttttatgttaaagtgatggtttcctttgagcttggataaaggcgttaaatgaatgagatctcatttaactaattatattagtttactaaaatatcaaggataaaatacattgagagataaaatggtaatattttttttttgatgaataaggaaatttgtattgctcacaacaaaatttttacaaacaatagcaccctaaacagggcctaaataataaaatatgtacatagttttctatttcttgatccactctttaaccaactacatattttccctctttttacagcatgtggaaccatacagtatcctcagtagaaactttctttggccagattatattaattctatatatcacttattgtttcacccttgttgtaatcttctctgcaaccggttttgtgccttcccacacagacagatgttgcaatattttgcacaagcaagtgtacgtatcgtttcaagtagtagactcactaggagtgaggtcgatcccac

SEQ ID NO: 118860 - DNA, 1523 bp, Cannabis sativa
caaaacaaacaaattctttgcaagggaaaaacttcgtagtttgtattaattaacttaattatgcaagcgacagcattttactaaaatgttatgcacctgttgcttggcatgatcaaatgcttccatccactttcgagcatctccagctgtagaacaagcaatcttcaaaaagcaaataaacattaaacattatcatcaaacaagaaaaaatgatgattggattaaaacatcggtattaaaaagaaaatgtaagataagaatacaaaaacttctaattcacatagactaggcaatgtactaaaagctggttgtaactgcactttaacagttgacttttaaataactatttcggccctaatttattcaaattgaaattatctccaaggaaacacctgttcataagaaaagatattttgaacaaggtctatactaaagagcttttgtccctggtaataatcttcatgtaattttatgagtaatggcctaaaatttatataacattcctcttttctttttataactaaaatctcttccataaaacatgaaacttcacccaccaataattgccacaaacaggaagctgtgaatcaaaagagctacttgtagtagtaaaataaataaaaccaactcagtattctccaaatagattaatttaaggtgaccattgaccaagccatttgtcctgtaatacttgggaacaagaatagtttgaaacagctcgaaatcctaagttaggtcagaatcaacaatttcaacttctaaaaggaatatgcagcacaaattgtcatgcaactttagcattcattgctaccaataatttacaaactggagaacgtaagctacaacttacctcgcctttcttctcctcatctaagcgattataaaaacgcaaaacatatacatccttatcctacaaaataaaacattaacaatactttagcttccacaaatctcatagacagcattagttatattctcactaagtagctacttaaagaagaaaaccatcagtggatatagataatatatcaaataaaaaactgaaaaaacgtataagaatataaaaatgggagaaagaaacagtcttaaacactaccaagaataaagatcagtaaacagagataatatatcaaataaaaatctacagaaaagtataagaataaaaaaaaagagagaaaaaaacaatcttagacagtaccaagaataaaaataagtaataatttctcagaggtaaagtgtcttacccctcggacctttcgacgccctacctcctccaccataagagtaggcccaacaacacccttcctgataggtttctagccaaaaagaatgaattacaagcattaatttgatattatatttgataagaaattaaaaagaaaaccattaaatggtgaattccaaaagtaatgttattcatctatataaaattatggaatagaaatgcagacacaatctaaaacaagcccaaaactgaatgttacgatcatgttgaatcataattctatatcatcagttcaatc

SEQ ID NO: 118861 - DNA, 1054 bp, Cannabis sativa
aaacgaaagtatttgcatagccttagtgacgttgagattattgcttaatgttgattatgtggtagtctaactcagagatgattagataacatatgatttagggcttaaaagatctgaaaagagttaggttaatttttataatctgtcattcacatggagaaagagaatagtaattagcattaataattgggcaattaaatcaacatgattcttttccctaatttttcatccttgattaaatacttttatttcataattttattttcttgttaatttttatttttatttcaatcacaaattttcggttaccaaatagaaatataagtttgatttagtggtattcagttcaattccctgtggaatcgatcttgtgaagactacttgattacgtacacttgcgcaactattcatatttttcgtaacaaaatcaaatagatatttttggaaaaaatattatatagttatatatatacctataatatatatagttttttaaaaataaatgcttgacttatgccgctgagttatgaggatatttttttttaaaaaataaatcagatatataaattttaattaattaatagttcattatatttatttacaatatttgaataaaaatattagaaaaataaaattatacgactgaagttaaacataaaaaggtaaatatatatgattttttattaattaataattattaatttaaaatattagataaaatagtatattagaaaatataaaaatatacgtatatgaatatttttattaaaaaaaatataaaaaatgaaaaaatatggagataatacataaacctatttgaactaatattagactcctacatcatttcttttcctttatatatatactagtaggcggatatataaaatattttaaattatatatgaaaaaaaaattgcatatttcaattaataataattacttaaaaagattatataaaaattttaactttactattaaaataattgtgacataaatacttaaaatattaaagttgttgctaataaataccggaattcgaaaaatagcatcataa

SEQ ID NO: 118862 - DNA, 1874 bp, Cannabis sativa
  modified_base (1806)..(1809): a, c, t, g, unknown or other
tattattattataattattaaattatagggttttttgttgttctgtgtcgtgttttttgggtttgtcgcgtgatgtgtcttttgggtttgtttattcttgcttatgtgtcatgcctttcgtgcttctcgtgccatgtcgttcttaaacacaaatttttttgtgttgtgtcgtgcttaagcccatattttcttatgtctggtcgtgctcgtgccttctgggctcgtgcagtgtcaaaaagcgcactcgtatttactacactaattgtaagaaaccaggccttctgggctcgtgcagtgtcaaaaagcgcacccgtatttactacaccaattgtaagaaaccaagccttaccaagtttgagtgtaagaggttgcaatttaaatataagcaaaaacactatttgttgcaagcactaataatgcatctgacaaatcaattattacttctgcggatgaatttgccaagttttcaaggtaccaggaatcactcaagtcctcttctccttttgtcattgcaattgcctatttaggtaaatataatgcatgcattgtttccacatcctcaaaatgggtcattgattttggtgcaacaaatcacatgacaggtaattccattttccactcttcaatcttatagtcccacttcttctgttaccgtagctgatggatcaccattatttgctcttggatctggcactgtaacttctacaccttctacaccatggtagtttaaggcttgatctccacatgatatgtgaagattgaagaacaattaggagacattttcacaaaggctttgaatgaggtgccagttgattatctttgtaacaagctgaacatgattaacatttatgccttgttctagtctcaatgggaggtaattaaagaagatttgatgaaagttatcaaggcatttgaaaaagatggcaccatccaaggaagcatcaacgaaacatttatttgccaaatccctaagaaactgaacagttgtagggttagagattacagaccaatcaaccttataacaagtatttataagatcattgcgaaaatgctttcaatcagactcaggagtgtattgggagaaactattcttgaaactcaatcggcctttgttgaaggaagacaaatactggattcaattctcttcgctaacgagacagtggaagactacagaagtagaggcaagagcggtttgattttcaaaaatgattttgaaaaagcttacgaccgagtggaatgggacttcttagacctggtcttagtccttcttatttccattatctcccttcctatttactctggtggcggatgtgctagggagaatgatgaataaggcagtcaattcaggcaactatactggatttctggtaggaaaggagaaagtccaagttagtcaccttcaattcacagatgatgcgttattctttattgatgacgagcagtcgctatacaagttgttgcggttagtagaagcattttgtactatatccggactaaagattaacttgggaaaaagtcaactgttgggaatatgtacggatgagagtattgtttcaagtctggcatgtagaattggatgtgaagtaggaagatggccacttcaatatttaggattgcctctggggggttcacctagaaaatggagtttctggaaaccagtactgaacaagtgtgccaaaagattagatggatggaaatgtgcattcttatctgaagggggtaggttgactctcattcagtcagtgctatcctctcttcctttatatttcgtgtcactattcaaagcacctaagtcagtaattagannnntggagaaaatgatgagagacttcttttaggaaggtagtgagtctataggtggggaccatttagtg

SEQ ID NO: 118863 - DNA, 1465 bp, Cannabis sativa
tttaataacaaaactgaaagttgaatctgtactacttaatagcccttttaaaataacacgtgcattatgtgtaaatctgcatctgcaaaaataggggcattccgagaatcgaactcgggacctctcgcacccaaagcgagaatcataccactagaccaaatgccctatgctgatgtatgatgtatacaaatgatgtttatgcatctttgacagtcattgtgtatatttgactttgaatttgtcatcaaatgcttatgagcaatataacagtttgaatatttctgctttattaattggtttctattttaaaataataagtttgaaacattatttttaagtttgatgatttgaaacactgtttgaaagttaaaattttgtgttttcaaaatgttggttggttcattgttatttgggaaaagcaaaagttaaaacaccactttataaaatttacgagtctcacactaagcaagcttctttgatcactggctcatcaccattcaagttaaagtctattctttttgagagcatcttcattgaaatgctgctcgcatcgcctaataaagaataatcaaatgattaatagagttgtttttctaaccttagttattaatgttttgttgtgatttaatagaaaactgtgttttttttggtatattaactgatagatcagaagatacaccaagtaaaggattattagtcctcgtcgacaagtatccaaattttgatacctaatactttatagatattccaactgttcaggttcagtaatcaattttagctcggacggctttatagtatttttgaagatctataaccaatcacgctgtttagtgtgtctcacatttttattgttttttgatttgtgaagtcatttccaaatcctttaccagtcagtaatttttgacatgattttatttctgcagtaccaatgaggatagaggctaggtactacgatgtcatatatctctataagtttgggtgttatttcatatttcatttagtctgtccgaaataaatgtacattgaagttaagttttagcttggccacataataatcagcatctctagctttatcttgtttgtatgcttgtcttgtctcactattcattaaagcttttttggggtaaaaatatgttaacatataataaatatataatggttgtatttatcaatgagactgaaaatggttgctttattgtggttaggtagtaactactatcttggcgtttatatattagtgttattcctatttgtcaagtgtctaaattaatagatgtacaatagtgttaattgctcaactaagtcaaagttccaacttgcttaaatatattaaataaaatgaaagatctgttttgcctcttcctaataaaatattatatagagacttgatgaagtaaattacaacagcaaaaataaataaataaaaaataactgcatatgtaaggggcattccgagaatcgaact

SEQ ID NO: 118864 - DNA, 1912 bp, Cannabis sativa
ctgtggagacgatactcgatttatcactttattacttgttacgattgcgtacacttgcgtatacaatttttcacagcaaaagctattattcatgaattgataattgagaagtatatttggatttgattgtatgcgctgaagagcaatatcttttaagaaattttgcttttatacttcttaatttttttatctaattaacttcatatgtatcttgtatgagatattgaacattataatttctttttaatttgtttatattttttagtacaatgagaaacaactattattatatttttaatttctacatcaagtattgcaattgttatattcttttttttttgaataatagttgttagtaatttttttttaaaaaaattgttagcaaccatttagtaacgatataaaaatataaaaacaattgtatgtttaatttaaggaatcaacaaaatttaaccactgaaattcattgtacaaacaatgtgaaagtaatatgctcaaaaaaataacgaagttaaataacgtgtttataattataaaacaacaaacaatgatattactaaatataagtaatttttcttcatatttacaatctcttcctatccattcccacacttgatttaaaattaacataatgtgtgttctcttattattttctattttttaatgtaagagataagataaatttttgttttaacatgtaaaactatattcttttacttgttgaacaactatagtgtaatgtataacaattaattcgtaataaactttagaacaacatgaaaacaacttgagtttatataatattttcacgttgaaataagatattacaaaaagaatacaaaataagcttcacaataatatgaaaataatttaattatccttttgtagatattgtgtagtttttgttattttccaccaaaggaatatcgattgatgaacaaataattaaagcaaacacacaaaataactcaaaatcaactactgatgttgttattgcatcaatatatataaattttcttcatatttgcaatatcttcctataacatgcatcgttatatttgtgttgttattgtgtcgcgtgtcattttatttttatttttaggaagatgaaaaaacaacgtaaaggaaacttaaaaacaacgtgaaagcaacatatttatgtattgaaattttaacacactcattgttcttattaaattttttcaaaaattcaatgcattggttttctttcagattttcaaaaatcttaaaaaaaaatactgaaaatatatgtaaatcaaccaacaacaacaaataatttacaaactaattgaagaaaacacactaaacaacatcaaatttattttttttattccaaaaaaaaagaatcagattttttttgaaaaaaaatacacgtgtgggtatgaaaattcaaggagatctctccatcgttgatattcgttgattccactagatcttcccctagattgttgaacctttcttgtcggtgaagatctccccatggtgttcctgctgccatggcagaatatcaaaacataacttgccagcgttaatggagattagcccaaagttcttagcgggcgttcatgaagatcgcaaaaagcttctacattgctagtggttgttgattccagatctctatcacttgattgttaggtaaagtgttgccgaaaatggagagcaactcatttgtttttccttgtcaagaaggagaagttttttgggaaagaaatctcctgtaccgtatttttgtaaaaaaaaactttaatttttctaattttatttattttctcatatgatatggtaataaaaaaaaggaataattacataagacaccattttttataaaataattacatttttacgttcaaagaattttttttttttacatttttacggttttccaaaaaat

SEQ ID NO: 118865 - DNA, 1380 bp, Cannabis sativa
  modified_base (1311)..(1344): a, c, t, g, unknown or other
ttggattttcaaaaaaaaaaaaaaaatggatgaatagttacgaagttgtaaataattaatttcgtagttaagaagttgtaaataatttatttcgtaagttactatttagcacacagtaacttaatcgtaacatgtaataacctaagtcagagttacaaaaattaattatgaataatttgaaatatttcaaaaatattggtaatatcgaggcaaagagtaaatatgaatcatttgtatattgccatactcattagactagattacaagagtttatatacaagctgatgagaaccaacatggcaaaagcttaaaaaaagattttgttaactacaactaactaatcctatcaaatatcttaacagactaaatcctctataataaatgtttttaacaggtacctcgtagtattttgtatgttgaaaaaagtcacatatttcgaataataaagtaatgaagtacacatgcttttttgtagagggcggtacaaagttgttccataattcgatttctcttgtggtggctgaagcaattgtggtctgagaggctttgagttggatcaaagatcattcgtggctcagtgtggttttagaaacggattgtctttctgttgtacaagctattcgtagttctgtggttatgcttttcttgtttggcaaagttgttagtgattgcaagagtttatttaagtactttgcgtaatgtttctttttattttgtaaaacgatcagcaaatgtagcgactcattcctttgcaagggcctctatatctcactctgattgcctttttaatttgaacactgttccggttgagctgttaccgagcttggtaacgaaattattcgtttaataaatgatgactttcattttaaaaaaaagaaagtaatgaagtacacatagtaattttttattttttatttttgtatattttatttactctttattagtcccattacttgtattattcactttgttaactctgtttttatgtgtttgtattgtatgagtgaaaatattgtttcccgttaatcacttttttctttttctgaaatgttccgataatcaattatttattatgggaaatttacacttattattgcctttatcaattttttttttcatttgtactgtcgcacggtcattttaacttttatactgttttttatttttaaatatttttgccagtatactgcctttggtaagttttattaataatgattttatggctttaaagtgtcatgctggggttattccacgttttttttttctactgtgtcattcagttttccaaaatattttataataataataatnnnnnnnnnnnnnnnnnnnnnnnnnnnnnnnnnnataataataataataaaataggaaataatgagtagt

SEQ ID NO: 118866 - DNA, 1767 bp, Cannabis sativa
  modified_base (1141)..(1143): a, c, t, g, unknown or other
aatatgggctaacacagcaaagaactatccaatcaacctaagttttaataaagccaacaaaatttaatgtaagcccaaataaaaagtctaacatctttgagattttttgagtgttcttcgctcaggctgagtattattttgggttcgtttttctggtatagttgagagtgtagaaaagaagaatatagaaccctaaccctagaactttgaaaccttgtgtgtgcgactgttagaagaagaaggagtgaaaccctaagtaccctagttgcatttttttctttgaaagagaagaagagaggtgcgattgaaaagtgtgtagaagttagggttagaagacatacatgattgtgacccttttatatcagggttttgcatttagggtttgttgtcttcttgggctgaagctagttgggtcgaacctctttagtttttagttaaagagagtgttgttaggctcgtgtttttggatctgtaaagaagattctaatatggtgagttataaaatatcaatttcttgttatggatgtctaacataaattaattgtaagaatatcactttttagcatttgtgttaattgtgtctttaaattgtgttaagattcttaacattagtattagagcaaatcattccgcaaataaagatataaattaatacattcaataagcaagtttggaagaattcaaaaatcaagaacatgaagaattcgatcttcaaaaacatgaaaatggtaatcaagaggaggaattagatgttagagatttggaggatatttattgaatgatcctatagaaatttctaaccctcaatttgatttaattcctagcaaatacaatatgagtggtcttaaaactaacattgataaatttgacagattaggtgactatagaatatggagaaggaagataagatccctactgacacattaagggtccttgaagaatccattgaatggcctgaaggaacttcaaagatacaacaagaagagtatcttgaaacagctacaagagttaccatattcaacctaagtgatgcaatcattaggttggttgataagtaagaaactccaacaaagatatggaggaagttagaagatcgattccaatagaagtcactaacaaacaagatctttctcaaagaaannntctttggctacaagatgaacagatcttagagtcttgaacacaatttagatgaatttttgagaatgcatatagagttggataatttcggagaaggtgaagcattgagtcatgaaaaccaaacaatcatcattttcaactcattaccagaatttaacaaggaagtgaagacaataatggaagaacttctattaccctagatgatgtcatctctgccctaaagtctattaacttagagatgaagaatgacaaggttgggagctctaatggtgagttgaatctgagtagaggaaggcctcatcaaaagaagccttggaacaataggagaaggagtaacagtagatgttcttcaaatagtggaagacatggaaatggaaaatttctatttagaggacacaaagatcgtaatgtctgctatcactgtgggaagccatggcatttcataagggagtgttatttttggaaaaaaaataacaaaagaataatagatggtagtgatagtgactcaaatcagggagaaaattatttctcaaagcaaaaggaaaagaagcatgaagccaatctaagtgatggctatgagagtggagttacatcactgtaactaaattcaaagatgaatggatttta

SEQ ID NO: 118867 - DNA, 1007 bp, Cannabis sativa
tcgttttagaagttcatatttagcatgttaataacttacttgttagtaaatctagattctggtaaaataattccaacaatcaactctaaatttcacccaagggagatacgtaaataagccataacttacacgaagcaggtccccccgtcgtgactcgagctccgaaaattgacgatcgacctcagaagttaagttttacccttagatcatcatctacgatcaaaaatagccaatttgtatttttttttttcatatttttggattattttattcatattttgaaggacctatttcacctataaaaggagagctcctctagctcatttttcatattcaaaaaactacctacagggtcagagtatctctctctagaaaccatagtttaacacttagtatctttctgtagtaccatctcgtgagaaataaaaaatcaaagtagacgtagctccattactattgcgatacagagagtgaactactataaattattgtatatctctttatttatacttaataaatatttcattctcgccaatctagcgagcgggtgaggcttaggaatctttgtctaaatttttgagttaacacaacctcacacatgaataaaaaaacattcgatatgtatatttaaattattaactaataattcaacatttaaacatatatgaaatcgttcacttacattcataattaaaatgtctttacagacttttcagggcataatcataacagtgtggtggctgatttgtttcatgtatgatattgatggctgatatgtgccattattgttagatggttgggccatgtatgctagttggaagtgccatgtaagatggctaagttgtggcttctgagattatgtgagactttgtagacattattttgtttttaaaattttaaactaaatttaaatttttttaggtacaaaaagactatttagggtgcgtttggaaagccacaatgtaattggaggtaattacacaatttggcatgtttgtctgaccatg

SEQ ID NO: 118868 - DNA, 980 bp, Cannabis sativa
attcttctcatctagtttggttacaattattgaaacttatcgaggtatgaattttaatcatatagcattgaatgagcccatttgatgagtgaagctacattgttttctttttctattcaacttatgatactattctaaatacagatcttaacatatttttagttaataattaatgagattatgactggttcacaaaaataatatactgaatagtgttttaaaaaaggtaatataatatcaatattattctaacggtattttccgcatatgcgtttcatcaaactcttcttcttttttaaattgtttgtatttaattagagataggcattaaaaaactcaaactatcataattggcaaatgatagtataacttctcataattggtaggaataaaagtcaaaatatggagacatgtaaagtcaagcatcacatcaagtgtgtgttagacaatgttttgagtaaattggcaagaaaataagttagagattaatccattctaactactcacaaaactctttctagacttcataacaacttcaatttattatgtttttgtctagataaattatggactaggggcatcaccaaacctatataaactactacttaagtaggaaaataaaaaagaaacagccttcaaaacttcatcaattattcaaattatttaatagcgtgcaacatcattaaattgattaattgaatgtactaataagtaggaaaaattgaagatgaattataggagatatgctccatgagattctctgtttgaaatatatgattttcttcacatatattttagaatttggatagatttgttcttttttttttttgatattatgggaagaggtatacattatgacatatggtagtagtttgatttttttttgagtatagctatttaaaaatcaatttatagcttctagcttaaaggttttgaattcgaacctatgacctctcttttttttcatccttctctcatca

SEQ ID NO: 118869 - DNA, 1375 bp, Cannabis sativa
  modified_base (1172)..(1174): a, c, t, g, unknown or other
tatattgaaataaattttatttaaggcataaaacccaacaaatacgtgttagtaaatgagcaaagtcaccaagcacacattaattaacaagggatccaaatacttgtgcaagatcaagttacgagaaaatggccaactaggaaagtttagccggaccacaccttggtcagccaagaaagtttatgtgcttgccagccccaagccaaaggtaggtcggccagcactgataaagagaatcaaaggaagctcgattaaatggtggggtccacaatcatctttctagacaggtcacaactcggtttcagttacaggacaggtccaacaaactaccaaagtagggattaaacctcaaattatcttcctatctctagggatatcaagtagttatttttataacttaaatagatgataaaagagtatgatctcctatttttgagggatattagcttatttgaatattgatcgtttgtaagcccctaaactatatcaagggcattaggcaaagtgaaaagtgacttgaattctaatccctgaagctccatagcactctctctcactctctcatacacgtgaccctagttctttgacacttagtctattttcccatctcacttgttcataatcaatcatatctcaattctcactattgtaacattcaaagagagtcatagctagaaattgcaaggttcaagcctgtaatctacttggtttatctctagactcaatacaactaaaataggagtaggtcattacttgacaaacaagggagccgaacctctataaattgctgtgttaactttattttttgcttttataatttacacgtggtgatagtcagtaataaataaggttctgttgtcagttgaccaaatttgaggtcaacattttagtgttttcattgagagcattgtttgttattctgaacaatcatcatggttgtaactaggagaaccactatctccacttcctcaggtcttcctcaagatcctatgatggctgatcccgatgttcatgttccccctactatgggaggttccacaaacctgaccgatgccacaaatcttgccaatcctgcaaaccttgctgttaagtagtcaaaaatgtatatttaatagtgcaaaaatataaaaaaaaattaattctatacaatattttcatgaaattaatgtaannnatttttatttaaaaatattatagtgttgagttaattttgtaagaaaatagaacattttatgacacaaataagagaaacaaagaaataaaagtaactaagaaatatattgtttttatttaaagaaatacaaattaattagattttaaataaatattttcattaaaattattatgatatatttcatgttgaaaatattttgtt

SEQ ID NO: 118870 - DNA, 1074 bp, Cannabis sativa
tgacattgtcctgcattgtaaatccattagtagtgaaatgaaaggagacgggagaattcttagtaaggtaacttactgagactatgttgtatttgaaaagtggagcatataaaacattggttaaggtaatattgttccctaattcgactgttccactttgatttacagttagacaatcattattggggagaattagtttagttgatgggatcttacatttgcattgaaacatcttgacattagaacaaatgtgtctagtggctcctatgtcaactatccatgaatcatgtaatggggaaacaaaattgtgggataggatgatacctatattacccatggaagtactaggatcattacaattcataccatttgtttgagaggcctgtaagttcagcagttgctgatattgagccgaggaaagctgagggagaacagcatgactctcattcgaagcagggttattttcttccccagtgtgtacctggtttgttgaagcatccttgggtatgttttgtctattgaaacctgggggatatccatggatttcgtagcattttttgatggtgtgaccatcgatgttgcagtgagtacagaagggacaatttcttctgggaggatgagattttcctgattgattatcatccttttggtttcctcttttgtccccttgaaaggcaaaggtcatggctgagttgttgctgttgagatttgaagcagtgcctctttggtgttcttcttgagttacaaggtgaaacacacagttcacttcgggcaaaggatccatgagaagaatgctttctctaacttgagagtatgagtccgagagtcccatcaagaatgacatgatgtactccatatgataatggtcttggagtcttttgactcctccacatgtgcaaccattacaagtacatgaaggcttgtaatttgttagttattcccatatagttttaagtctagtaaaataaatgcttatggtctaattttcttgtttaagattcatgagatctttcctcaaattgtatatatgaggaccatttttctgatgaaaacgagtctttagatcattccaaa

SEQ ID NO: 118871 - DNA, 755 bp, Cannabis sativa
ttattagatcaaaattcgataatttaatatttttaaaattaatattttatagttaaatttgtttagtaaccatttatgggtaatacccattaagaagtatctagatactaaagaaatataagagaataagaactataatcagaatttaggtgacgtttggttaaaacgaatgaaaatatagaaatatgaatgagaatggtaataggaatgagaatggaattgaataaaatataaattacataaaaaattgataaaaaatcgtaagatttttttttcttcatattacattggaattatttttccttccatttcaaaatagaatattcattccactaaaatagtagaaagaacaatccattagaataacattccaatacttttaaacgcaaccaaataaatgaaatgaaaagtgtttcttttgtatttcattatctctaaccaaacaccacttttaatcaaactaaaaacatgaaaactctttaaacacttttttcttgatcgtaaaattactacttatggcaatctaatttattaaagttttgcaacttattaatctttggagatggaacagaatgaaatatatggtatatattagtaatattactatttaatatctcttgtaaaatattataatgattgtgtcaattaatctaaattataatgggctattttcaaaaatatgggaaaaattattaaggttatgataaatatggcataaaaagtaaatgccactaaatatgacattatctaaccaa

SEQ ID NO: 118872 - DNA, 566 bp, Cannabis sativa
  modified_base (529)..(540): a, c, t, g, unknown or other
gacccagacccagatctgtacccaaaatcggacccgaatcgtgatctagccctgatctaggactgttacgagaacccaaacctcacactgtaataggaccaaaacctacacccaaactcaaaccataacccctactaggatttggacccagatcgagacctaagacttgggacctaaaccaaaactgggacctcgaccaaaacaaggacccgaacccagacccaaaaactggggccacagccaggacctaagaaccaaactaagacatgggatcaaaaattcggacaaagactaggactgggaccgaaactcagacccaaacccaaactaggacctggactcggacgagacacgagacccaaacctgaacttgaacacgaacttggacccggactgggacttaagacccgaacatagatgggggaccagactaaggaattggggccctaaaccgggaccagtacatgggccttggaacttggattgggatctgggacacgacccagacccaaacctagacctagaaccnnnnnnnnnnnntgggatccgggactcgatgcttggac

SEQ ID NO: 118873 - DNA, 1860 bp, Cannabis sativa
accagtgaacacttaacacagtatactgcagtatgaaacttataaaaaaaaatagtaaaaaagtaaaaaaataccgcctttagtatactatgtaaatttctctaaggaaattacatatatatatacgcactttattttatttatttgaaattttacttttatttttatattcttttaaatatacctactttataaatgatgttcttattttacctcttagtttaatgtaaattatgtgttaaacttaaattgaaaataagagtatattggacaatccacttactaaagtaggtatattttaatgtaatataatatgaaagtatttttgattaattgatacagaaaagaaatattccttaacatatcccaaaataattgttcattgctgaaaaaaatagaatttttacaaaaatataagaaaaataatttaatttttaattgttggcataaattttaattttatgccacaaaatagtagaatttatacttaacatctgatttgtaaagttgtttttagtaaaatatggcagatttaattttgtttattttttatggcattttattatttttgagcattttttttatgggtttagatttgcgatactattataaatgattttctcctatatttaatgttttaaaggttatttatctcttagtttgaagcataagccagagaagtcaaagatatggttcattgttgtcgatgccaaccgcagccaagcagctagggatgttcacggattggtttggtctattttcataagttttgaaccaaatagtttaacggttttttcaatattagtaaccaaatcaaaccaaaaaatttctcaaactaaaccattaagaacggtttggtttggttcgaaaccacggtttatgtggaattgataattattcatattttttttagtaattgtactatttttactaagtttttaattttatttttcaaaatatatatttaacatgatacgtatttgatctataagatataaataatgatataaaaacattctcaaaagtcaaacataacataaaaatctaaaatttatgcaataaaaaatttgacacacaaaaaagttctaaattatacatatagtcatacatgaaaaatatatataaattaattatttattataaacggtccggtccggtttaaccgttaattatatattacgaaccgcaactgaaccattacgacgtaaacggtccggattgatcaaaccaccaaaaacggtttttccggttacggtttacaatggttcggattgtagtggtccgaatgtaaaccgcggaatcaacattgtcaaaaattcaaagggcaaaattgctaagtatttttttttaaaatgctaatcgtgctaattggcaatttctactgtaactttattttaaaattttcttaactaacaatatttctagtaaaaacagttatgctaccgtattatttcttttttaaaagagaataatgataaaaaaacagttaacaaattaatgtctaatatgatgcgtgtttagtccaacaaatgattgtttagttatttgtcttgtgtattaatgtgtttaaccaattctgttagggaaatttgaaattccatccttacaagactttaaaaatttttccttacatgcatacttaataatattggtcatatatgactacattcctaatatcccacaaatacccctcccatttgaaaaaatcaaaaaatcaaaacttctctctccctctcgccgaccacgcacgaccctctctctccctctcgctgaccacggcttctgcgcctgatcaccacgcccagccaccgacgaccacccaccaccaccgacagcagcccccgaccacgcacgaccacc

SEQ ID NO: 118874 - DNA, 1642 bp, Cannabis sativa
tcgccagtcacgatcttgaacaggttgactaccgagaacttcaccgatttctctgcgagctgggtccagagcaggtcgagccggtctatctgcgatcaataagaaagtacatgttaatcgatattataaggtaacatgaatattaactaagtattgaaaagtgcaacgtactaggttgacgattaaagttagtcctaattcctggtactttaaaaacatagaaccatttagatttctaatctcccatattagaaaccatgccttccaccctgttgatttcagaagaagcccacttgctgaagcaatagaaaccgttatgaaggcccacattctttatgtcataaagctgaaatcctccattgaaggctccctatgcgcgtactccatgtacatcgcataaaacccaagagctatgcgatagctgtttggggttagttggaaggcagatacgtcataccgcttaagaatagcagtgatgaatggatggaagggaagcgatactccacaatgaataatgggtatagaaacaaccacattctcagtggggattatcgcaggattggtgaaagaaagatgcgtctgagtagagcggggatgcatggtgctaagtcatagcaaattaaacctcgtaaaggtggtcaggtcagatttggggacttgtgaaatcaactcctcgcatgagaagggctcgttcagttgagtgttatccactgaatcagttccactcccttcagtgtcctcctcctcatttggctcgcggtcaagaaccccccagtcctcgcccatatcctctacttcaatgtcaggtgcatgcctagaatgaaccatatgctcacgagcagataccaaggatttgctatcgcgaatctcgattgtccccggttcagcgagctcctgaaccatcctttctatgtcctcggaggacagcagacccaaagtcgccgctctaaggactggagtttcttcctcagagatcgaggttggaataaagctatcttcttagtctctgtcaccagcaaaaacatcacgaccagagccgagcatttggctgtccgataagtcgctcatctgaaagatagaagatcttttcagtgtggtgaaagtgcgagaataatacaagtgacctcaccctcacacaaaatataagaattccttggaaagctggtttggcttctccaaaaatggctaggtgtatcgcaccatttcgagaaatccagccaaccctcccaaggcgtaaatcgcacgtgtgcaattagctgagtgcctcaaaaaatggctgggtgtatcccagtgacccaagtggcatgcgttattaagcatgaccatggagttgttgagaaaaacccaacattttgagaaattcagctaatcacaacctgcaaacacatcgcacatgtccaactagcggcgtacctcaagaaacaactgaggagtctcctgtatcccaagagacatgcctttctcgcataaccattgggctaacgaaaactcctcactgttttcagaaaacctactagttgaaacacgtgaatgtacaaggaaaaagaacactggctttatgtcgcaaatggctgggggtttcgcagtaactcaagggacatgcgatcgcacgcatgagcattgggctacagcgacacaccca

SEQ ID NO: 118875 - DNA, 1892 bp, Cannabis sativa
  modified_base (1848)..(1853): a, c, t, g, unknown or other
aaaaaaaaacttaagttaaattattttgtaaaatcactctttaacaattttatttttgtcgtgttaatttcaataatctttacttactgcaaaaaaagaagtaaaatactattgttgagtttatagtttgtaatttttgttttagtgtaaaatttttataaaaaaattaaatatataactaagtatacgtacattgtaattttaatctaatatgtatatatatatttacttttaaaaaatagtgggcttttatttttattttgttgatataaatttatttaatctataactattgtataaattgaattaacaaatattgttacattacatatatttttattataattattattttgacgagagatttacaaattcaacattttaaagaaaaaaggctagccaagaaaaaatgttgtatctgtatatgtaaaagttgtctactaatatgattagttttttaactgtataccaactataaatatagtattattatttttttatttagaattaaaaatagcattattaatctattataattattattttggtattttatttacaaattcaattggtgttaaattattttaatttttataattattatttcagtattagatttacaattcaaaagacatgtcttaaagtttttaattactataattattttgatgacattagatttaaaaattcaaaaggtctttaaaaaattaattataaaataaaattcttattttggtattatatttacaatttcaataccaaaaacatattatatgcgagattacctctatgcaagttataaatataacatcattattttattattttattataattattaatttgtttttagattaaaaaatcaaaaggtctttaaaaatattaattataaaataatttttataaacataaaaaataatatatattttattaaatatagatttcatttttgttaatttttataaacatgaaaaataatatatacatatagattacatgaaatatatattttaaattctattcataaagtttacatctcaataaaaattattagttttttcgtatttttattatttttttataaatttatttatcgaaatctttatttttttttttcagtaattattaacataaatataatttaacattctaaagtttaaaaaaacaccatatttttttaactttaggcaatagaaaaactgtttggtaactttggagactatttttcaaaagataacatatattaggtacaagctgataaagataatgatagtataacatactcaattacaaacaccatagataaatgcctacttatgccacaaaatatattagtaataatttaaaatatttttgacaaattatttgattaatagttaatttatataattttgtaactaaaattaattttagtttagtatatatgggattttaattaattcttatgtggagtttttataattaactagtattcaatatatttttataaaatatgtatatataaatattttttttatttaagtgtatatataatttctgatttagtgagagtataggaggttttattttcattttcttttttaatttctattttagattaattaaaaaatttaaataaataacttatgttaaactatacaaattaaaataaaactaggcaatatagctgctcttcgcgcggctattttaattttattttaagataataattaaaaaaaattacttatgaaaataataaataataacttaaaaacttaatttaatatataataatttaaaattatactaacgaattatttattaaaaataaaactcaaaaaattttattttatttagagtaatttgcgnnnnnnatacctaagtttaacttccagttgtaaataaatacataa

SEQ ID NO: 118876 - DNA, 1932 bp, Cannabis sativa
tgtgatacgtggacagattgtgtccacttgctgaagtgtgaaaggtcaagattgaccttatgtttgtgtgtgtgagttgactttgtgtagggataggactggaaaatcccaacaatacactccaagtataataggcattcttcatgctatttatagtgaagattctcaatgaagactctgaactataaaaaataaaaataaaaaatgcatgataaacaaagtcttataaatttaaatgcatcattagttttcttttcacaatcaaacaaatttttgatatttatactacataaaatcaaatcaaatttcaatataatataaattgataatacgtcaattttaccgaaaaatacaaatcaagcgaattcttacaaatttaaactatataaaagaaagaaaaatatcgatttactatattgctaagaataatattcatatagatgaagttgtgagaatcgatttgatttggcttgtttcaccttttcgtgtagatgaagcagagagaataaaatgaaattgggaagagagtgagtgtggagtaggtgaagcttaattacttcaaccgcacgaaaaataataaaggctgatcaaattaaattcaaagaacaaattaaaattagaaaccaactattacaattctttttgtccttcattttataaataatattattataaagtattattaatttaatgagatatgaaatgatgagcccttaaatcttatagtatgccagtctaatggctacaattatttcaggatcggtccatgattagaattaaaatggaatcctatatattatatatgaacataaaaataaaataaaaaaatttaccaatcaaaaaaatgaaaaaatgatataaaattgacattttgatagcaatatttgcaattaaataattttaagcaactttaataataatattatgtagtagtagtacttattaattgaaatgataataaattatgaatgacataacttaaaattataaatggcaggaaaaattctgcagctattggtttgcaggaagaagctgccatggtggtgtgggtattctggcatgtcctgaagttggtccggagggggaagtgtcttttagcagctaaggtggttcgtttggcacgtatagtccttaattaatgaacacatgctcaatcttaaaaaaaaaaaaaaaaaagtatatatttacttattcctttgggaatgaatgaagatgttgagccttggactgaagcaaaaagcaatacgattaagattaatgtcgacgagcctatctttactcaagaaagaaaatttggtattggcttggtggctcgcgataactccagccaactagttgaggcagatttaatgtgtaagttcggacaaattgatctgacaatggtagaggtactggttgggatcaaggaaatactaagttggattaaaaggcaagagtgggacaaagttaggcttgaattagattctttagtttatgttcaagcgattaatagtgcgatagatatgctttctacttttgctcaagaggtacatgattgtaagcttttgctagcactactacaaatagacttttagtgtcagttcaaatgatgttttttttaaactgagaccaaagaccaccccaaatatttgatctcaatttatagttgacacacataatgacttttagtgtcggttagtagactgacactaaaattttaactgagaccaaaataaatttttaaaaaaatatacatacagattgagcataagtgtcagtttataaccgagactaaaagatcctttggtctcagttataaactaacacttacaatgtatcaatttaaaacaaaaaaatccaactaaaaaagcccatttcaaaaccctaccctagtaatataaaaccaaaattaaaaatcctacccacatctcaaaacttctctctctctctctc

SEQ ID NO: 118877 - DNA, 963 bp, Cannabis sativa
atgcatttcataattattaattaacctcatacataaatcttaattatttaataatacatggtatttatcatatgcggtctttacagtatgtatcaagcagtactcacataagtgagcaaaccacaaggaattgaaattgactactacttaattagatttatatttttatctggttaatcaaaataatgttggaaagaattaaaaataattgacaaaaaaaataaaagaaacaacttttaatgttgtttgaatatggatgaatgattaggaatataaatcatgttgtttcagttactcaattattaatgtaatttatcaattttctttccttaagtgatgatagattatagaaataaccctatctcttctcagatcattgaagtcctaaatcatatattatctatttgcatttctaaaataaattagcatatgatcttcattaagtaaataatctaaatatcacacaggctatgtaaatactctcattttacatcaaaatctatgtttgttctattagagcattcctaatattcacttctcagattttatattaggatcataaattatatttaagatggtaattctaaaatatgtattaaaataaataagaacaaatacaataatctagagaagaaaactattaatcacatttactaaattggaataacaccagtcaatattcatcatatccctaaattgggaaattagtgcataatctctaaactaaaatccataattaaacttgaaatagaaattaacacaagaaaaataaaaaggaaaaagaaaaaaatagatggtgaacttgattcaggttgccacactcgcttccttagcctccttctttgtttctggagttctttttttttgaataataatgaaatttcattaaatcaaatcttccaaaacaaaggaagcaattacagtaggtaactcaacaccactaaaaacacggtcagcctcaaa

SEQ ID NO: 118878 - DNA, 1460 bp, Cannabis sativa
  modified_base (1401)..(1424): a, c, t, g, unknown or other
ttgtctacacactggtgtagattagaccagtacaccaacatatgcagagaatggaatttttctattccttgacatgatgatgatgtaatccacaattatcacaattttttgaaaattaaattacatgtcattattcaatccattatgactacacatcatgtatgttgctttacagctgattagactgtaatgtatggtatgtaagcttggtgaaattgaaaattgcagttaaggttgttggcctagtgtaacaattttagatcgagccacatgcatgcttgttcggaaatagtcctttgaataagtttttcgatagtgaatttgtgtttggaagtggtccaattcaggttgtgcttgagatggaagatgatcttgaatccaatgtggtgtaatatatactttcactttcatcatcatgttgtcatgttgcattcaaggatgtaatagcttgttatattttgtatgccagttatttttgtaatttttgattttgtgaaggctcaaaacatgctttatgacttaattagctatgtactagttagaaatgagaaatgatggatgctaaatattattttggtgttttatgacttattaaatctatatatctagtgactacataactgtggggacattattgttcttttattatgatgagtggtcctgattttagttactaatatttgttgtataattataggagctattcctttaattttaaatatgtaattttgttaaataaatcaaaaaatcacttataaaagttattttccaacaagggtcaaagtgtgacctttgaccacccaaattacatatctgtcacgacttaaggcccaggtcatgacatcaagaatagaaatgctaagagggaacaactaatctttaattcatctatgcatgaatccaattcaccatgagaagagtgtacatattgacattcgataattttagataagagaaaaaaactaaaggtgacaaaatcaaaatagagaaagttaacattaagaaaaatcaggttctccctatgaacaagttcaagtaatgcatgaacttgttcaaaaatggtcactaagcattgcttgactatggaacaccatcatcatcccttcaagtagagcaactgtcaaattgtgacaagaagaaactacggtggaatttgtggcgttagttcatcctatccattattatagttacccttatctaattaaccaactgatccatctaactacctatttttttttttttgaaatgatctaactacctaaattagttggtcttagtgcctataaatacatgttctactccactataaggattaacactttcatcagaaagtgagttcagcaagcaagattgagagtttctacccaaaaaaaaagcaagattgagagagagagagagagnnnnnnnnnnnnnnnnnnnnnnnnagagagagagagagagaatacaaagagagtttggga

SEQ ID NO: 118879 - DNA, 2459 bp, Cannabis sativa
ttgactaggactagacaatcatattgaatacaatctattgaaaattccacagtcaaacaccacttgatcgcttttagcagagctttagtttcagcatggatttggggcaagtcaactcgaaattgaagaataacatcttactatgacttctccatgacaattttaaactatagctccaaaaccaattcttgagctttattctctaactgaaccattaacacttatcttgaaacttccagatggaggcaaaatagtattttgaggataaatagccttcgcttaaagaggagagggaactaaaatgtgaggatcctaattaccactcttactgtaattggaactagattgaacataattagtctgagcattgcaatagtcttgcaaaaaagaattcacccaaagttctatatctgtagtgtagggatcattagcagtaaagagaaacttgttttgacaatgtcataaagaccatatattaccaaaaaacaaagacaaatcttccttattcaaactttcaaagcctctcataagaaattctttaatctcactcttgtaattgtttttgaaaaacaaggaaaacttagtcttattccaaacattagctgctctggaacactgtaggagtgaatgagaaacaatatctatttgattagaacacatggaacaatagggattatcaagaactttatgattaaaaagatttagggttgaggggagaacatggttaaaagcctttcagataaaatgtttgattttgggggaatttcagaggtcctagtagatttccaccacctcttttagaaagccagaattagtagagcaaggagaagaatgaaaggatttagctaagtgataagcagaattgacagtaggactgcctaaagggtgttcccaaatgagacaatcttcttgggaaggatcaatgagaactttgagaatggaattcactacctttttagggaaaaagattttaagtctattgatgtctcaatacccatcatcattgataaaaaagagacaatgtcaataggggatgagtgccatagttgtaattaagaatgatgaactcaggaagccaattagaactaagggtatggatagatttaacattccctacttttcaaaaaagctccttacaaaggagatctcttccccaaagtaaacttcatcaagagaaagacgagcaatggccttgagaagcatggagaaaattattatatttaaaatacttagctttaagaagtttaccctgaagagaattaagattagtggatgttctctaagcttattttgcaatcattgcttgattatgttgaatgatagcatgaaaatccaaatttagaatcacaaagaaaagaccatatttttcattgatttttttttttgtgatttcctataaagccccaccaaaatttatccataagcttttcaaagttcttacaaatagatagaggcatcctaaacatgacataacatacgaagggatagcttggatagcaaccttgagaagcacttctttaccagctcttgaaaataatttactattcaacacattaaacttactagtagccttttgtatgagacaatagaaagaggctttcttaaatcttctaaagcattgatgaaaacctaaatatttattggtaaaaggcttatcatccaaacccaaaaaactattgaaaaaaacatatcttgggaactaatgttggggaaaaaaaacagaagagttggcaaaattcacagtctggccagaggcctaattataagtattaagaatatccctaatagccctacaattgtgagaattaatagtagtaaacagtaaactgtcatcaacaaaaagaaggtgagaaatagaaggggcatagcgacagatagagataccattaaactgcttagactgaactttgacatgaatggcagccgagagaccctcaaccacaagaataaaaagatagggaaataaaggatctccttgactgatgccctagaaaaatagaagacaaatgaatgttaatacataatttaaaaaaaacagtggaaatacatttcaaaatgaaggagacaaaactagcaggaaaaccaaatttatgaagaatatgctcaatgaaacttcattcaactttatcaaaagtttttttcatgtctaatttaagagcagcccaaccaaccttttcacttttcctattattaatagcattgatcgccacattagcaataaaaattattataaaaaataatcctatcacaaagaaaaacaccttgattcatagaaataagattattaaggatagactaataggcctatactctctaatcctagtagcatttttattcttgaggatttaaactaaaatagtttcattaagtaaagacatattagattgattatttaaaacctccaaaatagcattgcaaaattcattaccaatgactagccagttttttttttttttttt

SEQ ID NO: 118880 - DNA, 1782 bp, Cannabis sativa
  modified_base (1134)..(1134): a, c, t, g, unknown or other
atatatatcaatataaataaagaaattaaaaaatttgcaatatattaattcacatgtgaacacatgtatacgagtactagtaaacggacactagtatattttatatattatcacacattatttatatagtttcatattttaaaagacaacaaaagatgataaagaataatgctaatattttgccctagatgagtatttggaaacatacatagttgaagtatgttttgaggtgaccgaggaccaatcacttctaggagatggtgactaaaaagaatatataaacaagtgaaaagagttgacccgacataggttaagcctattttattttttattaattagttatttattttgttgtttaattgaattgttttttttttaattattattttcctttaacttgaccttctcttctgcattttcctatggtgatggaaaattaaatgccatgatggggtttgcacatggaggctgcggatcatcatcatcatcacactaaaaatctaattaactacctaacaacaacttactaataaagcctaatattactactacttaattaaacaagctaattaatttaatgtctttgatagtctctagttctatagtacaggattaggaataggagtatagtagtattggccattggaacatgttaattgggtctttttgagcctaatttttctccacaaagggtgttattaaatgactcaaaacttgacactataccacacactatagcattgaggaagacaacaaaaagatagctatgtagaaaaatttatagttaattattagtattaatattctaactgcaatattatatcgtcttaatatcaaattagaatgcaagtgatagttagattgaaactaaatttataatttctagacattatttatttatttttaatctcaaacgtataattaaacatatcatcgtcataatattcactataaaaaattgctacatttagtaacaattttttaatcacaacataaaatttttctgaataaatatgacttttagtcacaataaaaagttatttatgattaaaacataacacttaatacaactaacttagttttattcaaaacaaatattgtgactaaaaatacatttaatcacaacaaattgtnatttttgtgactaatactttttgttacggactttttagtcataacataaaaataataattgataattaatcacaatttttttaaaggaaaattttttatagtgattatttctttccttttgataaataagtaattttcgtattcacttcaaaattcattattagaacaaaacggcaaaggcaaacaaaaattacaaagctccaacgagcaaacctgcacaagatcttgatctttttttaaaaaaatatattctttaacttcatgtactgtaatttactacaaataatataaataatgttctttacaattactgaaaactgtatggtcccataaaactctattttcgccctgccaaacaaaaatagaccaaagcagatattatactaatgaaaatccgcctttcgagaactaattccttttcagtaaccaatttaacaagcctttaagatcacaccctgtataagctaagccacttcaaatttttatttccttacggacactacaaagaattttacttttaatcacaataaaatttgtgattaaagataaaaagattggctaattataaattattattattgtattgtgattaaaaagtccgtggctaaaagtattagttacaaaaattactatttgttgtgactaaat

SEQ ID NO: 118881 - DNA, 964 bp, Cannabis sativa
agacagaagtattttcatcacttattgtgtcatttggttcatgttatcatttatatgtttatttgatttataaattcttccaaatccttatcacatttatgttaataaacctacaatatgggcctgcaactgaataataagttcaacaatcttggccctagtttcactcgaggccttaagcccccgatccgaattgggttttgtagaatgtagttagagtaaaacttgaaatttataaaacagaaaaaaaggtaaagcaatatagttgatataaatcacctttcttgaaaaaattctcaaatctcaaaaacccactttgtttactagcatatcttgacgggattactggcaaacgacacgtcccttttccattctcgatcagaaacgacactcggccaagctcccaaccttgacggtacaagagtttttaatggatgagatctcagagcatgagcttgttcgctggaatcagagaaagccaatgctcccaagagtttttaatggaggagaactcggagcaggagcttgttccctggagtgggagaaagccaacgctcccaacctttcttaacagagaaaatttattttttatttattattttaagaaacaaaaaaataggataaagaaatgaggaagaaccggttgtaactagtacacctactcaaatgacattaataccctaattatatcacacatataaaatatttgattatttaggagaaaatctaataaatgaatgggtccatcccattttttattttgactggactttagccaagccctcatataaaatagtaaattatatgatatgcaccactatgcttaccatgaatagcttttacattaaatctcttatccttgtattatcaaaattttaatttatctcttcttctattaaaaagggataaagttttaattgttagagattttattacaatagaagaaaatcaagatacattacaa

SEQ ID NO: 118882 - DNA, 1827 bp, Cannabis sativa
ctacagtggactaagcagaacaaaatctgactgaaccactataattcatcgtcttgtttactttttccagccttgttgtttgttcttgcattcccctccgagtactcgccattttagggtgaatactcgcacttgtcatttctcaaataattctctttcttatcgattaaattatactttttggtgttgcgaaatttgctcgacaacacttgctgaggaattattgtcgtgctctgcagaactagcctcgcaattcataactatcccgagttgaggaactcactcgcgatcttgagactgaaaaggagaatgggaagaaacagtatgatcaggctatttctgattacatttacacgactttgtccaagctgcctgactttgacttcacagttcttagagcgaaagcagctaaaatagtcgaggcttttcgtgctatgtcgcctacccaaactcaaggatgtgggggaaaccttttacctgaggatgccgagaacgcagatgcggaggaagtcgctgatggtgctacaagcaaggtcgtagacgattccatcactttagcttcttaatttttctaagttcctttttagtattgttgaactctaatttcttttgttaatagtatacgggtactcacgctttgtacttcaaataagttttaattattttgttatcgaacactatatcctttcgaggatattttaattttgcatacttattaagcggtacatgagtacttgcataatttaagctgctcttttgttgttttcatttacagtttttttatgattacatcttggtgtaataacttagaatataaaaacttgcgaagaagataaaaatttctaaaaactttgaaaatttcattataataatcattagtacaaattctatacccccttatacttagtacatttattgaaataaattgactaagtataaatacatgcgagtactattgatggtaatactttaagcttttgccattccaagctctcttgattgttgtaccgtcgaggttggataattggtaagtcacattactgattttttagtgattaagtatggtccttcctagttatcactgaaaactccatatgctgagttacgtgtgttatagacaaattgtttaccattgtcaaaaattaatttataagggataccaaacctgcagatgatggtgatatagacaaattcgcgcaatttggaggctgttatggtcgcaagaggtttggcttcagcccattttgtgaagtaatcgacgacgactacgacatattttacccctcgttttccttttgggagttctccaattaagtctatgccccagattgcaaatggccatggacttgtgataaaatttaattggcttggtggtctatttacataagttgctattgctgacacttgttgcatcttttggcgaagctagctgcatctgctcgcaatgttggccagtaatatccttgcctcatgattttaagagcaagagaattaccaccagcatggttaccgtaaattccactctgtacttctcggagtatgtaatcgcattcagtcccatcaatgcactaagtaatggtggactaaaacttctacgatagagcttgacgtcataaatgacattccgagcagctcgatatcgcaattttttggcttctgttttatcgtgaggaagcactcctattttcaaatagtcaattatcagagtcatccaggtgaccttttagactgtatcaacctccatcatctcatcttgattgatagttggatgagtcaatatatctacaggaattacgtcgagtaattttgcttctcttgttgaggcca

SEQ ID NO: 118883 - DNA, 2840 bp, Cannabis sativa
cttactcatcgatcgtgtcctactaatagactttgtctttgagtggctcgtagatttaatggttcccatactttcttgatcattagctcgttgagtactttctcctcttcgagttgatcgacggtgggtacttgacctcctcgaagttacacttgcttcttcacgctctattctttccccttgagagcagtttgtcttatttccccatcagggtctgtacgagtcctcgctctatgggtttgggaagaacgctggtgatttctagcaggtgacctccattttcccggttgagtcccaagatcctcctcattgccatggggatttctcgttcatcagtttccagttgtctcccatctcgctattcgttctaatttttagggggtgtctcattttccatgggttgttcttcctgggcattttcctgtctcctggttcgtgagccacgaggtctgccttgtggtctcctcactctaggtttaggttgagtttgagcattcgtcctctgtgccaccctagctgatgctgcatcacgttctaactcagcgtttcaacattgcgcctcttccagacggcatctcagacggcagttttccgtttcataagtaccttttctcatagactgggcacctatatgattaagctcttcatccctcgtctcggggttctaaccactcccacgctgagttctcctcgagcgtgttgtttgcatactagaaccaacgtcgggtgtggttctccaagaacgtgtggtccgtgcactggggccaccctcaggttgattcctcctggaacgggtggtccatctggaccgcgggttggtagacctcctggagcctatgggctctttcccaagaaggtgattagtttcctcatgtggggtgttaacattttctggattttcagccatgaatgaggtggtttttcttcagaagaagggagggtttttctaaactttttcatagaggctctcaatgaaagcaccaaactgttaacgcaaatttttgttaactaaatttgagcctcacagcagtgatttcacacagaaaatacgaaagctgtaaaaataaaaatttgaacacagagttttctacgttgttttgcagttaaaattcggcatagtccacgagtcaatcttattcatatttttgattcttgtttagggccttccttgtatgagttttgtcgtcccctttttgatcttctttgtcactatttataattacatagtggacagttaattaccaagttgactgtaatatgtttacaacaatcatccctaaaatcatgggatttgactacatatggtgtaatgtaaatgcagtttatgatttgaaaatcatatagctgtgattttcctgcttttactaggtcaaaatgatcgtgtttcaagcacgtctttaattattgtttctagatttgtcgcgagagaagcttagtttcagtgatctcaatagcaagtcgggattatttttccttctgaggtcaacgatgcatgtcttgtgtcgatcgcggttcttatttacaaagagttcttcgaagctcatttgaatgttagcttctcgacttgccacggttgtgagcctcgctaatgctaacgggatgaagttatatgaggtcttcccctaacgagacaggcacctcgcttacttagtcttgagtcgatccgtctgtaacacttagtttgtacactaaggactttcacaattgatatatgtccttttcgtcttccaatgtgtactgtccttgatgcctcacaattcgcattcagcgacatatggtttctcactaatatgctaagtaccagtttgtatattagttcctctcctaagaccttagagtctataggttacaaatatactttaatacttacgtaattaatgggttattccataaaaagcgattgcaccgatccatattcccattattttaacacgtgtcatccactgagatggcagccgaattttgaatataacattagtaaatatagttctatacttactaagggtacaattctatatttatattagagtaatcatagaattaataaataggattatttggttgttgagattcaataaatattctagtttattggagcatagaattttaggtctatgttctgtggatcgccaccttgaaacaccgtcattgatatagataaaaattgtataaagatgtttgaaaaatttattttaatttttgaaagtagtaattatttattttttaagaaataatttattatttaaataaattagggaaaagaaaaagtattatctagacaaaggcaccaccactatctggttaagataagggtagcgccactatcacagtgtcttgatacagtgatagccgcctataagatatggtgggggctagtagatttgtttttgggttaattaattaattcaaaagataaatatttatttcaatttaaatttaaaatgtagttatagatatttaagttggttgagatattatcaagttgagagattctttccgagtggttgacattctctcaattagttgagagattctttcaatctattattggaaataaatatctataatagattccgttataaatatttattcaaataattaatatgatttaatttaaattttttaatttaaacgtttatttgaataaaactttttattgattttattatatatatataccgtataaacataaaaatattatgaaatattagtattatataatattataatttagagtaagaatatagagaagagatgagaattttctgagtgttttattccaataggtgatctcctatttatacacatacaaagtcaaatattaagaaactaagagaaag

SEQ ID NO: 118884 - DNA, 1221 bp, Cannabis sativa
tttttttttttttttttgagagtattgaatacacatattataattttaggatttgatgttacttttttttttattttagaacacttatcacctataactctttctctttctcatagaaagaaaatcaatgatgggtcacacgagagactaaaaggtaattatactctgtcattacacaaaacaatgaataaatttttactatttcaaaagctatacataaatatcattatagatcaaatcaaaatattaactgaatttgaattgatgttacttttatcaggagacatatcacctataatcctttctaattctcatggaaaagaagtcaattatgaatctcaagggagactaaaaggtatttatacccctcactactcactcactacaataagggcaaaattatgttataattattggaaaaatgaataaaattgtggttagtcatgcataattttttaccctatataatttcttaataataagggtgagcttatgttaatgcgggttaaaggtgcgtgtaagcccatttaaggcccaaaaataatgttttatttttaaatatatattttctttaagtaatttactgcgtaaatacttaagtttaactcttagttacaaataaatacttaaatttaattttttggagaaataatacataagttatatttctggaacttgcgtaaacacataactaagtgtcaaatcaatatccaattattatttttttactagtatatctaaatgaattcttatataaaggttaaaaaaatttagtgacctgaaccaatcaaaagtatcatatgaccattgaatttacacttaataggtacttatggaagttccaaaaatattactcatatattaatattgtcaaaaattaaacttaactatttatttataattagaagttaaacttaactatatatactgcaaattattttatatatttttttaaaaaaatttaaaataccacacattatttttaataaagggctcaataattttttttaaggtccacttgtgctagttattgagtttcatattacttaagagtttctcgtttttcatttataatatacttggcccaatataaaattcttgtataaaaaatcccaaacagtttttaaagagaaatttacatggtatactaacttttactattttttttataaaaatactgctaggcggtattttttatttttttactgtattttttataag

SEQ ID NO: 118885 - DNA, 1835 bp, Cannabis sativa
tcttcctggggtggaggtgttctgcttcatgtgttgaagattactcgaacacagttcgataaactatggcttgcaattttgattaggaacatattgagagttacacctttgtttctgctgtttttggtaccgagaactgatcctaaatcttccattctttccacggaaagttttgatgtagaagaggagaccgaaatagaagagcaaaagaatgttgaattggtttcccttgtaaacaatttcgataatggtagatagccaaaacagaacaatttcaccccaataccaacttgaaatttcactcaacaaacttttgctcactctcactctcccacagaaagaagaaagaaagagaaatggttcatctaacttgatctcttcatttaaatagatatcaagtatattttgttttaattaattattattaccattgttaatgttgatgttattagtataataatttttaatgttaatgttatatggaagctgcctaaatgagaattttttgttcccataaattttgtagaattttttttttttttgaaaataagcgtagtgatgcattaaataaaacacaataattagacttcacgctcattacaaaacaggttttttggcaaagaggagactggaatacaatctttcatttggtgggtaaacgtccacttagccacagtataggcaatatagttacacgatttactaacattcttaaaattacaactagaaggagaggacttaatacaaaatgagacatagttctcaaaaacccaatgagactcctttccactgagagcattgatagctagtctcgagtcactctcaataattataaacttgagacctaactcaaccgccacaaaaatagctaaataggaggccatagaaattttgtagaattattttcattgtaatttgaatacattaatactatggttagggaagcttttagttgttacgtgaataatatatataaaaaaaaaaacatctgaagttcaattcattttctaattaagggtcaaagatagtcgaaattatctaatgtcaaaaccaaaaacagaagatgaacttaaaagaccctttttcactaactacatgttaaaaacaaggttgtcttttgacaaaaccttcatcaaaggttgttattaagattgaaatgcatgaaaatgttaagttcattaccaaaaagttatttataaagtatacacaaaaagtgttacagtatactgtatagtccaaattgatcatcatcaatacacaagagaactcataatgagataaacacaatttctcaagagaaggggcaacccacaatttctcatattgagtaattttaagtatatttcattaatgagataatgctcataagattctagttatattgaagcaatggttccatcgttatttcttcggtcttgttctagatgatattgctacattttgtaggatgattcatgttgttaggtttgctcattgtcctagactttataatagtattggtcatactttggtcaaacttactttgttgataaataatagtgttatttggtggcctgaaaatcctaattgtattcagaacatattgatagcagatgctatctttgaataaattctcacccccactttttttgagtacttatcgctcttggtgtttgatggttgagactttctcttaaaaaaaaatagttatttacgaagtttttttacctaaaaatttggaagtatttagggtgtgattggtttaggatttgaaaactattttatgtttttgaaaattaaaatggtggggtccacataagaattcttgattggttgagtgtttttaaaaacaaaat

SEQ ID NO: 118886 - DNA, 1020 bp, Cannabis sativa
aattaacattacactctttagaatactacactaaacttattatggggtttaaaaaattaaaaccctcataacaaatagaataatctttaatattaattaccattttcttccaaatattaaccgattccaaatggtctttaactaaatttatagtcaattatatattatttaggtaatattttttatatttattaattaatatttataattgatgaaaaaatttatataataaatattggcatattatttgaagagatactttcataaatacacaaaataacaaaataatttaaaaacatggacctgtaatttttttaatatcttcttttccaaaaaaatacaagtaagaaacttgtaaaaaaaaaattcgtcaaaagaaataaagaagaaaataaaaacaaattttccctcttgagaaaaagaaaaagttgcttagtagtgtggattcttctcttattttgtctttcaataactttggcatttaatttgtagtttagtctcagtgacatttgcgtccccgttccataattggagaaagatcagtttcatgagcttcaaaagacaaaaaaatagtattaattatgaatttacaattacaacaaggtcaaattaccctactacacggaagatatatagaaacaatccctatcagatgacgtactggtcttgttgtataatattatttgtgtgcacacattcccattatgaaagtaaccaaacataatctgtaggacccagtgagtgagggtaatacgggtaaattaatgcaaaaaagaatctacctatgtattatattggatctatgcatgagcgccgtcaacagaagcaatcaatgccctttcgttgtcgtaccatacacactattctcctaactattttacaaattgactcattaggattttttcggtctaactttaacatctattaaattatactttttaaattttttgggcctttaaaaatttctcctgaactattgacattgttagatttaagaacttttgtctaattttattcaat

SEQ ID NO: 118887 - DNA, 1149 bp, Cannabis sativa
ttgaagataagggaatactaagtactaaactagaatccctattattaaacaaatctcgtaccaagtcaacatcccaggctaactctccaggaaccatcaacacactaacattttgattcaacaaggtcggatgagtagatgtagctttaggattttcagaatctggcaaccaaggatcccgaagaatactcaccacagacccattgccaactcgacatcttactccttcgcgaaccacttcttgagcttcatagatactacgccaaacaaagctcggattaccacctaaccccgccgagagaaagttaccattcctatagtaacgagctctaaaaattctattcaccagagacttcgtataacataaaagacgccaaccttgctcacataataaactaaggttgaagtctctcagatttctgaatctcccataccccctttggacttatggactgttaatctgtcccaactcttccaatgtatgcctttattgttcttagtagaggattgccaccaaaatttgcacattaattgttccatctcctcacaagtctccacaggcaacaaaaagacattcattgcgtagcttggaagggactgggcaactgtcttgattagcagttctttccccgccttagagaaaagcctccgttcccagctttgaattttcttcctcattctatcctttaaaaaccccaaaagtccagtcttgtttcggcccaatgtattcggtaaacccaaatagagactattgtcacctgcttcattgatccccatcattgcacaaatcctgaccttctcatcataggctatgttcggactaaaaaagagagaagatttctgacggttaacttgttgacccgaagcttcctgaaaacactccaacaaattaatcacatttctagctccctcctctgaggcctgacaatagatgtaacctgtcatctgcaaaaagcatgtgagataccaaaggagttcccctagccactttacaaccccgtatcttgcctcttctctcaaagttgtgtaagagagcagaaaagccttcagcacacaacaggagaagataaggtgataacggatcaccttgccttaagcctctcgtagggacaatggggccaacaggtatctagatttactaccatgtat

SEQ ID NO: 118888 - DNA, 2656 bp, Cannabis sativa
  modified_base (2583)..(2603): a, c, t, g, unknown or other
cataatactaatattttataatagaaatttaattatttaatttattttagatactctaaaatcaagtaactttcattaatgatttaattaaaataaatagattaaaatatattatattttttttgaaaaggtgttctttattaagaagagctatcgctcgaaaggataaacaacaactctaagggaaccctattaataggaaacatacattcagcgaaagacatagagtgatgggcaacaaaatgcgcggcacggttcgcagaacgcttgacaaaaaatatagagacatttatcaaactcttaagaatggtcttataatcctctacaatcaacccgaaacctgaagtaatgcttgctgtgctccgaatagcttcaacacaaaccaagctttctgtctcaacctcagcccgtgtgtatccgtgacttttaagccagctgagggcctctctaatgccaatggcttcagctagttcaggggagactcttccaattttcacaccagcaaacgccgagatcaactccccattagaattcctcaccacacacccaaaaccgtgtttaaaatcacgatcgaagatagtcgcatctacgtttagcttaattcctgttaacggtttattccaaagctccgaaccatcaccatctttaagaggcgacaacaaagggatgttacctttaccttgagcttttacatattgatcaagacttgaaaacgcaaatgcaactacatcactaacacttcgggcacgatccttccaaattaaatcattcattaccgaccatagagcccaacacaacattacaagtcggcctagcttctcactgtccatacggtgtgcgttgaaatccaaccaatacagcagggaagagttatttctgctagcatctccaacagcagccgcctcccaacaggaccaagcaaattggcaagtcaccaggagatgcaattcagtttcggcatagactccacacatggggcaagtgttttcaaacaacaccttttttgtacagaggttgaacttagttgctaaacagttagaagccgccctccatatcaaatctttagccttgggaggcaccttgagaggccacaacttcttccaaaatacatgaacatctgacaatgttatggtggtgttcgaagttatgcattacttaaagaggaaaactaacgaaagacagggatacatggcactcaaactggatatgagcaaagcctacgatcgggttgagtggggtttcttggaacctgtcctccgtgttatggggtttagtgaacgatggattggtttaactctcaaatgtgtcaagttagttcggtatcatgtcatgaatagtggtcagaagctggggcctatcattcccacaagaggcattcgtcaaggttgtcctcagtctccttacctctttattgtgtgtgctgagggactttcttcgcttattaaacatgttgaagctactaaactcatcatgggatgcaaggttgcccgtagtgcaccacctatctcacatttgctcttcgtggacgatagttatgtgtactgcaaagcttcggaggaggaagctaatcgggttctcactctcttacaaacttttgaaggagcttcggggcaaaaggttaacctccataaatcgtctgcattcctcagttcaaataaaggatgggtactagaaggcgtatttgtgaggtgttgcaagttcttgaagccggtgaggatagtttgtatttgggacttcctagcattgtcgacagaaataaaaatgttgttttggggtttctaaaagaaaggatgagaaagcgaataaatagtttggaaggtaaatttctctctcgggctggtaaggaggttctcatcaaatctatgctccaatctcttccttcgtacgcaatgaatgtctttcttttcccaatcggtacttgtaaagaacttgagagattgatggcgagtttctggtggaaatcaaacaaatataatagcaatggaagtgggattgtgtggatgaactgggatagaatgacaaggaacaaagctgaaggtggtatgggcttccgtaatctgagggattttaaccttgctatgcttggaaaacaaggctggagattcatgcttagacatgattctttggtcagtaagattttcaaagtgagatattatccacaaggtgactttttgtctactgaattaggctctaacccaagtttcatttggagtagcatctttgctgctaaggacacggttaagctgggactaaggaaaggaatagggtctggtttaactgttgacattacatctgatccttgtttcaaatgaatagccgaaactgggatgctgaggtggtccgagatctcttttcacctgttgatgctgcaatcattttagggattccaattaaccaatcggctgagggtgattcttggtactggtttgatgaaaaagatggtatgtattctgtccgcagtgcatataaaatgatacaagaccacaaaatatattatattttagttaaaaaattagtaattagtttatgaattatctagataaatattcttcaggtagacttttggtatttttctagatatannnnnnnnnnnnnnnnnnnnnatatttaagttgattttattctagacacataaatatttgatatttttcttaag

SEQ ID NO: 118889 - DNA, 1073 bp, Cannabis sativa
acacgagccctcacacacacacaccacacatgcacgtgtcgcaccatgcacacacaatacggctcgcatgcgagcccctcacacggctcacatgcaaacccctcacaccgcaccctgctcatggccttcttccatgtctttctctattcacaagtcgtcacgggaccgatccttgtggtgtttcagattaagtcaaaaattataagtgcgctattttcggggttagcacttgcctctagtctacaagaattcttttcagtattcatgttaactaagtgaattagggtcttactcgattaaagttcgagtcttatcttctccatatttttcgagaatgtgcccactatatatagaggacctcccttgcttgaatttctcttgacaattggcaccttggagtagtggtgaattcttctcaccttgtctaagaggtactgagttcgactcccaaggtcattctttcaactctcatttttattttatttatttattattttttgagcatatatttatgtaaatatatttgggcacgccttacacttatctttatcgtattgcatgtttttcttttgatcacgagccagtgtcttgatgcttgaattctggtttatgtggcaggcgtctctcttgcttggaagtaattttctcttttgctacgatttctccaacttcatgaggtattctatttattcctatattctttgttttcattgttcatgcaccatgcttttagaattcttgtggttacggttcgtgtgttgtcttcgtggtattagtagtgtcgcatgtgccagtctcggggtgcacacccccatgtgttatgtctagtgagctcagtgttgggattttatgcccaaaataaaatttatttcaatataatttaacttcctatcaatagaagattagaagtcatttaagtttatatgttattttcatgtttacggtttaatatacagtttttataaaacatatagtcattcacaattacagtgatgtcttcacagtgaaaagtaattgtgattatatgcttcaaaaattttagtcttatgatttatcaatgcacttgatttaca

SEQ ID NO: 118890 - DNA, 1116 bp, Cannabis sativa
aaaatggtacgttataaatatttgtttctttctacctattctactggattttggacactagttccaatttcttagaagtcaaattaccaatctggaggaaatcactcaacccatttccaaaattttgtcaccttattacttttattttcttgctatatatttagatattgatatggagtattagtagtttttttttttttttttggaataaatttagcaattttattaactagttaataataatagaacgcacttcgttagaataattttccaattgaagcataagatctggagagaaacaaggatttctggctaaaacatgagtcagcttgtttgcagatcgtttgacaaaatacaactcaatattatttaaagataagagaaaagtacgaacattatgaactaaaagaccaaaagatgatgacaaaggaatttgaatattagtagtatttagtattatttaaaagtggcgttttatgtcacgatattttttaaaaattattatcttaaattatataaaatttaatatttaattatatcagtattaatatagggatatgattttgtgccgttattgtactttcacggattgtaatccgtgatgtacgacagccgtcagatgagggagttatttgatttgacggctgaaattgatttaggggtaattagggttaaaaaatagaaacgtaccctgacactaatttaatgtaccctcagactcatctaatgtaccacggactacattctgtgaaagtacatcgggacaaaatcatatccctattaatataatattaaaaaaaaatattagacagttacattttaacatttttcatatatgtactgtcaatttttattacaaagatggatcgaattggactatttcttttttctttcacgctccccaatttcaatcgaaatgtcccaatcatcatcacccatttcacctaatcttatagtataaaattcaataatttattcattgaaacaaatatatatggatgattttttaatggagattatctataaatggttactaaataaatttaattaactgtgtaaatattaattttaaaaatattaaatcattaaattttgatataataacgaataataaaa

SEQ ID NO: 118891 - DNA, 2163 bp, Cannabis sativa
  modified_base (2101)..(2117): a, c, t, g, unknown or other
taaatttctccattagttgcaataggaatttctatgtgaaattccgtaaaaaaaccaaaaaaaaaaaaaaaaaaaaaccttttttaaaatgtaaaaatgaaaaatccccaaaaaattttctttgtataataaaatactaaattacgatttgataatcttatcatcctttcctatatatttcatcaaatataaaaatatatttttatatatatatacatataaggagtttttacaccacatattgaaatttttaagttttttacttttttattgtgggacagaattttttttaaaaatattgtgtaagttttatactgtgtacagtattaatttctcactgttgttccacggtggttttttagttgttctaccgttgttttaattgttttgttgtttaaaagacagtatttttgtaaaaaatttcatgtgacaataaaattgtaaactcttaccctaaatctagtatttttataaaaattcctatataactgtggctatttaatagttttattagtttaacaagatattttaaaaacataagaatattttattaaatttaacgatgttagtagggttaattttataaatatatataaacataaatattatttattttaaattaattgaacttatattaatattattatgtctagatttctaatactatttgaagatgctattaggttgtaaaatataaatggttttggattaatgaatacactgctgattcataaaaaaatttaacttatataattttaaattaatataaatatataaatattaatatattatttattgttagttttaatattgggatttatgtttaattttgatattcttaaactttatatttatttttctcaaatttttattactttaaatattattttttcaaaaataaaaaaaaaaagaaaattaaaaaattaattttttttgtttaatttataaaattttaaaaatagacgtaacaaaaataaaaaactaaaaatataactaagtgtatatgcacatacaactataacctagctagtatatatctgtactatataaaatgtagttatgtaacaaaattttttgtttaacggtattttttgattttctatattaactttaacataatatactattccataacaaaatattccatattaattttataatatttttataaatatttaaaaataaaaattatgtagatattttatataagaaaattttaatttaaattcaaatatttaagaataaattacatatttttattactaaaatatttatacttccagtttaaataaataaataatagaaaaaaagagaatcactaccatatactatattttaattttttttattattattatttttacgttgtttttaagatttgaatagctccgttaattgcaatctgggtggttatttgaattgcgatttgaattgagttacaatttaagtgcgctccgtaggttgcaccgtatactcactataaatacaaaaaaaaaagaaactctttaaaatatataaataaaaaaacccctaaataacattatattatattttgcatataatttatcatacaattaaaataattaaatttgttttatgtaattaaatttacatttatgtttacatttctttatttaaattggttgttgattatttggttccaaaaaggcatcattcttaccttccaaatttgtttgagatgtttggacaacacattaggcatttataaccaatatttataacaaacttatgactaaaaatgaaaaaatcgtgattaattataaatcattatttttatattgtaaccagaacgtccgtggctaaaaatattaatcacaaaaattcaaatttattgtggctaaatgtatttttagtcacaatatatatatatatatatctaaattagcgacaacttacatctaaatactatattctagttaaaaataactttttgttgtgactaaaaattacatttagtcacaaaaaatctatattataactaataaaaggttgtcactcaaggtaactttttctctttatatatttatatatagagaacttttagtcatcacgcacatatatatactagtaaaaagttacnnnnnnnnnnnnnnnnntaaattttatgctagttttttttacgttattaaaaagtgatacaat

SEQ ID NO: 118892 - DNA, 1622 bp, Cannabis sativa
agataaaaacagtacaaaaatccttgaaaaataatacttgataggttcagccctttagagagaaggaggagcttcttctaatgtaattttttagtgatgagagaaagtgagatgtgatgaaaagagaaaaaaaaaaaagcttttcttccaaaagtacctatatagtacatgtgggaccctttcttcacttacttcacctacacattaaaaaaaaaaactaaagtagtgcaaataagatcagacggttaaggcaaagtgtttcaaaagattaaaaatgtagcaagttttattcagcaaaggctacaacagtgtcgactgcaccaacatagttgttaaagtccatgttcgtacaaacatctacatagggacttagggagaaaattttatcccgatttttgacttcctgatgtggcatgcgtacaagaacaaaatcagtgccacgtggcagtacaactcaccaataagaaggccaagccaacacctaagcaaacggagaccccgacactcaaacgggcatcaagtgacataccagctccctcacagggggtggccgaccctatggccgacgaaccttgggactgcaccatggttggctagcctatcctccacaagggcctggctagccaagaggagttatgtagggttttatgtgcacttctgcacgtggacaacatcctctgggttgggaattgggccataaaagcccaacagaatagctgaataacatccaagttcaagagcatttttgtcttttgtaattaactaataaaatatacgaatatctagggtttcaagttataatttaggatttaggcttcctatataaaggccttaactctagcctagaaaaatctaagctcaattaagcctaatacttgcctccaagctctaagcctaagtctgacaacttctctcttcttcacttcacgcccatacaagcactatcacttgagatttaccattcttgattcatacattgtatccttaagggtgctatagcagatctcatctgtagtgatctggatagtattaaccctcagtattgattaactaaaaggggaataggtcattacccgctatcataggagggcaagcctctataacaaatcagtgagttttctacttttcgttatgtttgtgtaacacgtggcaagcatcagattcatatgatctcgctgtcggttgatcactttttgaggtcagtcacaaatttgatagggagggagcttcgatcaataatttttcaagtcaatctagtgtgatttgtaacatataaataacaaattaaggttaggtagtacagatcataccctgctcatttcgatttttgtgcttctaatgtttcatacatgtttcgaatataattttggatttaataggaagctccgattaacaatttttctactctttattatatgatctgcaacactgaaattataatttaagcttatgttgtatagatcttacccagttcattttaagatttgtgtttcggatgtatcataccaatttttaagcaactttgttctatggggttttgttattgatctattgatgtttttgatatttttttttgtcaacctggctaatccaataaggaagtttttttttttaaaaaaaaa

SEQ ID NO: 118893 - DNA, 1072 bp, Cannabis sativa
atgattcaagatgttccaaaaagcgaagaagaacgataaaaaaactttcacgttgagctcgaagtccagttcttctgcttttaagatcgtccaaatttgcaattaatttcttccctgtaaaaccgagcttgccgagttccactatttttcaccaaaatatactaacatcccttgaaatgactctaaatgcatgattagtctttaaaatatcttaaataattaaaatcacactaatcaataagttgaagaatcagtttaagaatattaatacataaattatctatatttataagaaaaaatacctaccgacttatcaaaacaagatagatcgaacagaatatggaagtatatgtggatgacttgcacataatccgagaaggctggggggcatagagaggatctggatgaatgcttcaaaatccttagaaaatacaacatgaaactcaatcacttaaagtgtttgttcagggtcagctcgagtatgtttcttgggtttattgtcaatgcttagggaatagaagctaatacaaaggaaatacaagctctcctggatatgaaattgccaacaaaaataaaggaggtccagagcttaacttcttcgatagtcgcactcaacgggttcgtttcaaaatccacgggcaagtgtgttcctttcttcaacatcctctgaggtaataaaaagttcgaatggatggaggaatgcgagaatgcttaccaagaattaaaaaggcaactcgcaaagcctcccgtactctcaaaacccctacatagagaagaactgggaatatatttgctatcaccgaatacgctgtaagtgttgtgatgataagagaagaaaataacatccaaaatccagtctactatatcaccaaaggactcgttgaagcagaaggtcaatatccttttttctttcattctctcctgattaccctctctttatcttctctttgtgcgtcactgcggtacaacaacaaatcctgccactgccagtgctagtagttcaaacgaaccagaaaacaagtttcccctaccccaaaaaccccacccctctccctcttccttgtctctctct

SEQ ID NO: 118894 - DNA, 1530 bp, Cannabis sativa
  modified_base (26)..(34): a, c, t, g, unknown or other
  modified_base (95)..(113): a, c, t, g, unknown or other
tttatacattaaacataatcatgaannnnnnnnngtgaaccatacaacataaaagcaatttttgatcttgtattaattagtaaatctaattatannnnnnnnnnnnnnnnnnngggcataaaacccaacaatgtggacccttaataatgacctataaatatatgtccactggtggaggcatcaactggttctgataattgtctgcttgggtgaccctttggttcaggtcggccttgacacacttctgtaaatacgagttattctttctaatcaaaaacttaatttccctcttcagataattacatttgtttatgtcgtggccgtaattcgcatgaaaacggcagaacttggatgtatctcttttacttacatcctttttcatgggagatagttttttgtacggcaccataactgagttgttgcatagattgtctctaggtcttctattagaactgagaaggcagtaaattttgaggcattttccctggggtgttgttcggcattgctagtgaattttcccttctttctattactctgcctgttactgttgttagacctcttcccatttgaattcaagctattgaggtattatggattctaaactgatgttcctactgaggtgacacattgctagcttttcttttgtctgatagtatccacacgccaatagcttccttaagcttaatgaacccatctgctcaatctagaaatttaatcattgaccccacggtcatccttttgatgtcattccatagctctctgagtggctcaatggccccagtattgcggacagcctcccttcttcggtcagccccttcacttttgtagcttcggtcataaacctgctgatgtaagctcggaggggttctcctagtatttactttacttcgactaggtctttaaggtgcgaaggaagttgacaagatgaggaaaagtgcgcgtggaactccgatgagaaggcattccatgagttaaaccttcttagaggcaacttgaaataccattgttgtgcggcctctgcgagtgtgccaagaaagatcctacactgtacatcacctcttaccccttgcaagtccatctgcatctcaaaatacttcaagtgtgataaaggatcttcttttcttgtatccatattctaggttggtattttgaactttgaaggtaattcaaggacttcaatttcaggggagaagggtgatccacgtgcctagtctagttcgagatcagtgagtatttggccggtcaggccttgtaccatgtttttaagttaatgcagttgtgcttgcacaaatggatgagggcttgtcacattgggatctcttggaactggatcttgggttcgaatgcctggtcagacagttggtggaacatattgttcgtccaggccccttctacgatttaggtcagtcctgaggtcatgtgcagcacccaacctatcaaatactaaagtaccgggtggccttggtgtaatatcccgataagtctaatggtaaataattagggtttatatttatattgtgagttaatcag

SEQ ID NO: 118895 - DNA, 2048 bp, Cannabis sativa
  modified_base (26)..(33): a, c, t, g, unknown or other
ataaaatggattacattgaaatggannnnnnnntagggcataaaacctaacaccttttccttccaatagcaagtgttcctcgacttccatatgtggtacgtacaccagactggtaagtgcagcagcataaaccagcttacgaaacttgctggtttttgccttccccagccaacgaaccaacacagcaagggtcttgccttgagttctccattgtagccagctcttaatgttttgtaaccaaagatgagtgattggacactcaaagaaaagatgagaatgtgtttcgggtagtgaattatagagcatacacacctgatctgtagtaatccccatttcatagccaatcagtctcttgtcttttgcctctgctggatggctagccagcttacaaaaccgtgttttgaggtgttgagtctcccccaaatttggttactccaatgcactttaattggttcttgatagaacagcttgtacccttgtgcaactgtgtatttgccttgtatcatcctgtcattcgtggcagctttgaactgctctttgagcctcactatgcatgtccaataccagctagcttgagttggaaccgcatagctccaccagtcctcattgtgtaaatacacactattaatccatctcaaccacaagctatcttccttgttagccaaagctcacacatactttcccattgcaactttattccaagctgagacctctttaaagccaatgcccccagccgattttgagtggcaaagaacctcccaggacacaggacctggcccttgatacatggtatgacctttccaaagatagtttctacatatggcctctataccatggatcactttctttggaagtttaatgatctggctccaatatgagtgtatggtcaaaatcacagaattaacaagtattgctctccctgcaaatgataagtttcttgagctccatacttttatccttactgtcattttatctattaggacggtacattccttccttaaaattcttttagagcagatgggaattcccaagtaggtgaaagtcagatattgaactgaaaaaccagatgcttgaacaattcggttcagctcagtcttggacatatgactgctgtaaatagctgatttggaggggtttggctgtaggccagaggttatcgagaagagcttgaggccctgtagcatgtataggacacttttgaaatccccattgcagaagagaagcacatcatttgcaaaagcaagataatttaatttgattccagcacacctatgatggtatttaaagtcatgtttctctccaacttttctcataattcttgaaagatattccatgcctaagacaaaaagtaagggagacatggggtctccttgtcttaggcctctccttgcttcaaaaaacccatgcaatgtcccactaaacatgagtgagaatttaggagtgcgaacacaattcatcaccagagtaatgaaatattgaggaaactgaaattcttgaagtatttcttctataaagtcccactcaatagtgtcataggccttctgaagatcaagcttgataatacaactagccttgtttgatttcctactataatgcctaacaagatcttgacatatcattatgttatgtccaataaaccttcctttaatgaagcctccctggttttgggaaactaaatcaggaagaatcactttaagcctagagcacaatagctttgttgcaattttgtacacaacattacaaaaagctattggtctaaagtctttaacagtgtttggacatttcatttgaggcactatagtaacaattgtagaatttatctctctaagtattctacctgtttcaaagaaggatgtaacaacctgaaagacttcctctccaaccacctctcaattatgttggaaaaaaaaaacttgagtaaccattcgtacctggtgctttgtttcaagggattccaaacacagcttctttcacctcctctgtaaagaccgctcagtttaatttggaaattagcagttaatcatgttttattatgaaaattatttata

SEQ ID NO: 118896 - DNA, 953 bp, Cannabis sativa
tgttagtttgtaggatcagttgtcattctataaagcaactaaagtgacatattaatatgatggtcaagatttttttttttcttgaaatgggtaaagatccttttcaaaaataaaaaataaaataaaccatcaagataaatttcaaaatagttcgcattattttcaagaagaaatgtaaaatttatgctatttggcacaaattttgtaattgtgtcaaatttgcaaaattgttgacaatttttgtgcaaaataatatatagtttagcaatacacaccgatttacatctccatgcttagtatttttattgtaaatgcaaataattaagtaatacaaaattaaacatatctcacgtagcgaaagatgtattacaatagtgtgtaaatagtaatatcaatttacacctagtaaatattgtgtcaaatttaagatataattacaccataaataggttatttttttatttactttgctatgacattaaattataaacaatttatatatgtgtatatatatatatatttattattttacacaataaaacaataaaattattatctcttacatttttaataacacatttattaaattttgcacaattttttgcaattatatattaaagtataatactaaaaattgatgtaagtgcatcacaaaattattttttgtgttaaatatattataatttttacattttttattggagtgggtgatggtcttaattagcttattattgtccatactgcctaaattatgtacaccacgtcgcaaaaaaaacaatgtgggttgaaatcttttattgtgcgttgtggtttatatttttttacaaatcacatagtaaaatacaatttactattgcggaatagaaagaagagagaagacttcattaattgtgatacaaattgttacagagcaatgcttgaagcagagtatatatatgaaccagactaactaa

SEQ ID NO: 118897 - DNA, 1838 bp, Cannabis sativa
gtgtagacaccatttttagtttggcttttaggtacaaaaatctttcagtagacaaagccttggttaatatgtcagcagcctgatccaaggaaggaacgtatcgaacagaaacttggttgtctaaaatctggtctcggacaaaatgaagatcaagctcaatgtgtttagacctcgcatgaaaaactgggtttgcagctaaagcagaagcgctttgattatccacccaaatgataggagtgtgcacaatagagacttgaagttcgtgtaacagagaatggatccatttgagttcagcagctgcattagccaaagctcggaactcactttcagtgctggaacgagcgacaacatgttgctttttcgcggaccagctgattagattctctccaaggaataccaaataaccaccagtagaccgacaatcatcaaggcaactggcccagtcggcatcggagtaggcttgaagagttggagaagaagacggtctcaaccataagccatgtttaatcttcttatataacattgtcatgcttcaagttctttaggaatggagttccttcgtattatggagaacttattcccaaaatcgctacatcgaagcaatagctgtacaacttcttccatggaaggcctactaagaggctgtttctccgtacacctgatcccaaccatgaacaccccacacatttcttctatattacatgactcctttactctcgggtccaaagcttccgcaatcggcttgtcttcttggatgtgacaccatgcccagtctgagagggagctttgcccattgccatctccattgtttgcttctctaccggttaccaattccaaaagaacgacgccaaaactataaacatctatcttttcattgatttttgttgtataagtgtactctgcaagtttgaaaatgaaatgtttatgatttttttgataagaaatgtgagttagctattgagatttacctggagccatgtagccaaaagaaccagccacattagacattgtggtaagctctccttggttgaccaacaattttgctaagccgaagtctgcgagtttcgggttgaattcagagtctagcaagatgttgcttgatttgatgtctctatgaattactggtggcacaaaatcatggtgcatatagcagaggccttgtgcagcaccaactgctatttgtagcctcttgggccagtcaagggagatatcatcatgggcagaatgtgaggttgagatgatgtgttgattgtttttgccatgtagccatcggtctaggcttcggttttccatgtactcatagactaaaagttttgaactctcacttgagatgcaacacatgagtttcactatgttggaatgtcgaattaagctcagtatccccatttccgcaaggaattccttctcgagcttgtggctcacattcttgtcattccatattctttttacggcaacaacatcaccttcgcgattcacagggatacggtagacttgaccgaagcctccagctccaatcagattatggccattcaatccagaaatgatcttagcttcagtgaaatctattgtgtggaactgggtcaggttccaatttgatttaagtacatttttgcaacaatagcctttgagtatgaagaaatatgagaaggacacaattaacaagagaatagttgtccctaaagttatgatcaaaataaggtgtgtggttgaaattttgccccgcttgccgggttggggactacagagattgagttttgaattgttggaagttgtgcacagaccaggattgtccaagaagctatcggcatatgcaccgttgtcgaatgcacgtggaatag

SEQ ID NO: 118898 - DNA, 1128 bp, Cannabis sativa
cctcagaaaggtcaatgacctcttcaactggccccttctctttggatagtgtctcaccgcctttagttcttttgggcgaaggagaatggcccgagttgtcccccactcttttcttcaaggcttggagtacattttgagacatttctacacaaacaaaatgacgttgaagtaaatatgaagtaaaagcatagtatagaagaagtaagtgcaagttaaaaataccctgcaggtgggtatgagcatttttctgaataagcatagacaggacaccattgtcttaagagtcttcctcctgctccaccaagacggctttcccttttgcctccgtaagggtggatggtcgagtaggcatatcaggttccctaatcctgatagcgtgttctactattgcttggtcagttgggagaacctttttcttcttcttgctcagctgtttcatgctcttaatattcttgagcatactgcttggctctgttgtctcccttcagcttagcctcacgcttgagttgaatgagctctttctcctgcttggtccaaccagcccggcttggctttgcctttttcttcttctctttcacgggcctcggtacaaagtcctctgggaagagtttttacatgacatagttggtctcactggccaagaaagtgatgtttagagaagcttctggcaattgaagaattttttgttccaaccccctgaacccttatgtgaaaaagggatggcagtacgagggaatctactggaattgagtgtagacagtatccatgccctgaaaaaaagtagtactcgtccaaaaaatgtcctattttgctgacatcggtgtctacagtgcccttcagccacttctcatccaattgagagaagtagaaataccccgacctactctgcttgggagttaacttcagatcgaaaagccagttggtgtcgtgcggggatggctcaccccatctttgtgaggcgtaaaagatgaacagggtggataaatatttgatgcccttcagactgaactgggtcgagcaaaggttgtagtagtatacaatcctcttgaagtacagaagcaaaggctgcattacaccttgcttggtatgagcgcccgaccaggaacaaaacccatgtcttcggctagt

SEQ ID NO: 118899 - DNA, 891 bp, Cannabis sativa
attatattatgttaagaagaaaaagattgggaggcctcttttgggggcttgggcaacggtccaccccatctttaacatatatagctttgattatcaatattcagatagttgaaataattttaatatttttatataatagtgtatactaattacaatcattgacgaggtcagatgtagccggatggagcaactgtcccgagcttagattcttaaatatatatgtgttgaagtgaagatggtaaaactaataatgagtattatactaggcattagtagtgttgaatattttttataagtggtactttatgattggtttacgatattttttaaaaaatattttttaaaattttatagtacctgatacttaattacaccaataacaatataatacggagaaagatactagacaccaataatacattttttttagcattaattctcactaataatatactaatgagcccatgatggttcattcatcttatcatagattagaggcgccacttttgattcgacaatattttgttcattaattacaccaaattcttttttctatgtaaagatcatttcctctaccagtacgttgccttatactttacttttattcagtctgcctttctaatagaagagtatatttagatagaagtatatatataattagctagattgtctaaagcatgaacagaattacctttgttctgaaggcctaacgagttcattttttttttcaaaggccatcagttcaaaatacgtggtttctatctgcccacacaggagttgggtggagacaacatggtggggattgctatcttgccctttcactctctattctttgatgatatatcatataaaatattctgtatactatttactaactaaaatttaatatta

SEQ ID NO: 118900 - DNA, 1198 bp, Cannabis sativa
  modified_base (319)..(319): a, c, t, g, unknown or other
caatccgtgaaagtacaataatagaacaaaatcatatcccaatatatatatatgtatatatatttacaatttttcatatatatatatatataataaaaaagatataatatagatgtgacaaaacttaataataattttgctgtacatgatttcaacatctttgaaaaatttgaagaaaaaaataaaagagaaactagtcgagatatataagtatttgtgtgtacgtacgtaatggccttcaaatcacacacgtgctgtttcaaaagacaatatgctcgctgatcagtcaacaagtgttaatctatatatatatatatanatatatatatagatagatataaatgttagttgttataatcaacttaatacaaatttatcctcaggctattaatggtatcaattagctccgtttgatcatatcactgggcgtaatcttttttctcatcaacatgaatttggagtccaaccgctcttctctcctctttcaaattttcatagaaaaaactatcatttttagtccatccaaagtaggacctatttttcagttacaaaatttatctctattcattacatatctcttctggaagatcaaaagaaggcactagtgaaataatcaataaaagaattctcatgcattatactgcttgcagcaagctatggcaaacaaactttttccacgaattatgggcgcaacaatggcaaaagaaacatggggcacgttgtaggaggagttctaaggaacagtcaaagtacgcacagttagattacaaaaacttagaaaagattttaaaaatcttaaaataaaagataatgagactacaaaaaaaaatactattttagaattaaagagaaagtaaatcaaatgggagcttatagagatataatttctgacaagaatgtagtccaaaagatactaatttcttgtacagaaaaatatgattcaatagtttctgtgatagagaaaataaaagatttggagactctatcaccaactgaactaatgggctctcttgaagcacatgaaagtagaagagaaaggcataaggaaagtgaagcagaaaatgcctttcaacctaaaatcaattttcaggctcaaaaatcaaaagctgatgggaaaaagacacaagaaaaataaaaagaaaataacgacaagtatcctccatgtggcatttgtaaaagaaaaagtcacttggagaaa

SEQ ID NO: 118901 - DNA, 1321 bp, Cannabis sativa
  modified_base (1268)..(1270): a, c, t, g, unknown or other
gtctaaattcctccaacaacaattgtatttacgtgtttttattgatttaattgttataattcaatgtaaaaacggattgataatgaattcaatctttgtgtaatcaaaagacacttgctttgtatataaatgagtgatccaatatgaaatggacaaaacaggaaatccttgcaatagtggactaagcagaccgtgatctgactgaaccactatattcctttgtgttctttttattttcagtacgtttgtgtgtttattgcttaaatactcgtcattctcggtcgagtaatcgcacattttctgttcatatctttattatattatttatcttggtgttgtctaaattcctccaacaacagtatggatatatgatttttattactacctaaaattctacatgtttttcgaataatttacgagccaaaaacataaaatatgtaaacaattggtaattttgaattttatttcggtattataaattatttaaattttttaaaaaataagtgagatattttttataattataatgtacacagtaataaaaaaaaaattgaactataatttctcttaatacttaaatttgtaagggtgaaaataaaagtaggactcatagtcatactattaagtattaccctagtattgtaagagaagagaagaaaagaatattggacttttggtgggttttgctttgaatgtggtctaaaatttgagggtttccaaattctaataggtaacttccacgaaaagaatatagtacaaaacaaatatgaccaatgagacaatggaatgctccctcttcccaatgcaatttcttcctcttgttactatctaatatcaatctcatttctctacacatttcatttttgtaacgtaacatcatttttcttttctttctttctttcaaaaccttacaatcattttcccaaaattattgtctttagtgtacagatagaatatttggtttcagccgtgattttcattggcttattattagtttagttaaagaaactctaaccattctatctatatacaatttttttagttaaaatatatagggagagaattctataaaaatgtaatggataatagagctgaactgatatcaataaaaatatgggctccagtgggaatacaacacaaactttctcatttcatgatgttgatggatggtattgtaaagaaaattcgaaagttattaatggatgattatgttataggattatcgtgagatcaatattgtgggtcatgttatattattttatataatnnnatatttagattaaataattaagttgtaaataattaagtgtgacaaagtatt

SEQ ID NO: 118902 - DNA, 588 bp, Cannabis sativa
agtttttcattccatgcatgtaatttttgccaaatgcgttccttgacatcactaaacatctcctttttatcacgctcggaaaaagcagggagaccaaggtaacgttcatgacattcactgattggcattccaagaatttgatggaagaaatttttcgctgcttgagttgtattgggggagaaggacatgaccgattttgtcgtgttcaatagttggcccgatgccttatgatagatatccaagaccttctggatggcaattgctgaattgttggtagcttcacagaaaaggagactatcatctgcaaacaataaatgtgagatcaaaggagcatgacgtgtcaactttaaccccttaagattatgattagattcttcgtgttgtagcaatctcgataggccttcagagcaaatcaaaaacaaataaggtgacaatggatcacattggcgcaaccctcttgtaggttgcacataaccaacctcttctccattcagcatgaaagagaagcgcgtagtgttcaagcaactcatgatcaaaaaaatccatttctggtggaatcccattttacgcataacctcttgaatgtag

SEQ ID NO: 118903 - DNA, 1317 bp, Cannabis sativa
  modified_base (1240)..(1251): a, c, t, g, unknown or other
attttttcctttttacgaaggctacttaattttagctattttatatctttactatgtttcatacttagttatatatttaatttgtttttcacataatgtattatcatttttaatggttataatacattataagcactattcttttaaaagaactatatatttaatatgaagtatgaaaaagaaataatttttaaaattttatgaattgttaattatttctttttttttcatgttttatgatgcatgtttaatatgaattgaatacgagttatgtgtttgtgttttgtgcactttaataagataattaaataataaaattatatcaactaccacataacaatcacatagaaatatatttaatcattatacttctcggtccaagtattgtaatgtgtgtaattttaaaaaataatttatatatttatattgatggaatggagggtgtcaaggacacccaatttattagaaaaagtcaaaaaccaaacacaacaacctcagtcgcaactagggcaggaacaaatcctgcaatccttaaaactactaaataagataagaaataaataaattgaagaaccacttactccacattcatatgcgcttgttcaatctagaccacttggcgatgttatgagccaagaagttacttaatctggggaccttaaataattcaccaagctattgaactttgtgaatagaacatgcaaatttttctggataaggttaatgtccttcttgtcaaagtcttgaactaccttggaattgtcataataaaataaatttccaagtaacagagctttctaagcagccaaacacagtgtcatagctcaccgataaaatctttcaaccactatatatgtaaaaaaaaaaaaaaaaaaattggtcctaaggacacaagaaagtgaagcacctttacaatttctaaaagttaacaattacaactcaaatccaatttaaaacttgcacttcagttctaattatgacccatataatttaaatctacatagatcttttgaaaaaattatatcacatcattaaagtttaaaaataagtccctatattactaacctctcttgtgtcagtatcagacatgttggcataccctttttattttctctaataaattatcaaattaataatattatatgaacgaagcactatagatgtaatttggagaaaaatatacacacatatttctaaatgctataactgttagaatttgttttaccaggatctagatttnnnnnnnnnnnngtttcattaacaccctaatatgaatttttaaaacaatgaaattgaacacatataaagtttaggaaa

SEQ ID NO: 118904 - DNA, 6311 bp, Cannabis sativa
gcccgcctatgcccagggccggacgtgtctacgtggacacagtgtacacatgacacaattctattcatccacatataatttaaaaaataaaaaaaaattgaaatataaaaaaatcaatttaaaacaattaaaataaatagaaaataaaacagatataaattaaaataaaaaaatataaaataaattctttaaaaaattattataaattaagaatatatttttattttttttgtttacttaaatgaataaaaagattaattttttaagaaaaaaaattaaaaatctaatatcccattattcctaaaccttcgaccctctctcccttctgcatctcttattctttctcctaaatatctaatcttcaacttcttcacccactaccatatactatccatagttatattttcaaactcacttcactattgaaaaaaatcaccaacaccaaacctgttattatcttttaaaatactataagaaaaaacccaacccagatgatattgaaccgaatcaatcaaacacaatggcaaaccttgtgaatcaatcaaattaaaccgtgcgaaccgattgttcctccatcatttaagagctctgcgaattgatcgttcccctaacattttagatttctacaaattgatcgggctaacgtctcagatctttattacttaccatcatcgggaaaatatgaggattgccaatagtaacaacgacgatgagagtaatggagacgaccacagaggaggagagtagttccgtcatctaaaaggtaagggtttgaggaaggaagtggtgggagtcacagtcatcggagttcacgtctccatggtttcaaacaagcttgggcatttggggcttccacactatcagatttggtttgtgatttttttggagttttattttgttttgcattttattggtgctcatttggatttagaaaatgcaatggtggttgtggggaaacagatttgagatttggttagagttttttttaattattttttctgtgattttgatattgtttgttatctcaaattttatttaccttaatgtggcatgtccacgtaagccaagacagaatacttgtggaatacaaccttgccaatagcaagacaaagtctcctcacaaagtatggcaagatcgtcaagcatcaagcaaaagaagttaaacgagtcgtcaaggagttgtaccaccatgtttggtcaaccaatgggagtctataggccggccaagatgagcttatatggttggtcaggatttaagcacaagttggcggaccaaaaggtgacttttagaccaaggaagagtatgtttgactaaagaattaagcctaacctttgcaaaaaaaggtgtccaaaggctggcctccacttgccaaagctggcaggaacatgacctgcaagatcctagcaggcacatggccgactagacactgataggaacatggtcggccagacctcaactttcagacattgtttgtatggccggctagctagcttgcatgcatcctgcaggtgcatggtcggccagcttttccctggcaagacattgatgcgtagctgtcatccgtggacagcaaacaaagctgggagttggaccttgacagcctacaaaagtactacaaaatatcagcaacttctctattttcaagggataatttagtcatttaaacattgttatttaaatatgtaaaaaaaaaaactttaaaaccctaagttatttaagctcccaagctccctaagctcttaacactaagtctaaaaccctaatattctcttctccctctctgctacacgcccaaagggctctctccctctctttctcacatacctccaaggctctatctctctctcatgagagacttgcctactcatacatacattgtaatcttaagagagctactttagatctcagcactatagtgatttgagtagtattatctctcagtatcaatacagccaaaaggggactaggtcattacccgctaactaagggggctgaatctctataaaatcttgtcttatttattttattattctaattgtgtaacacgtggcaagcatcagcactgaatagtactccgttgtcgattggctgaattccgaggtcaacaatttagtgcttttattgagagcaagttgtcaagtaatctgatcaaacgccatggttaacacaaggagaaatccgactacaacttctgcctcatcgggtcttcctcaagaccctatgactacaaatcatgatgttcgtgttttagtcataactggaatctccacaaacccgacagatgtcgcaaaccctgccatctcagcaagcaccacaaatctggccaccacaactggccaggtcgacaccaccatcccagttggcctcaatggccaacctctgccacctaggaaggactctacactagcacctagcattgaaggaatggccaatatggagcaacccccaggcaccacaactaaatctggcccccggtattatgctgaaaagataaggccagaaattggcaagccaacaaatggcgagctccatgtagacttgggagaagatcttgagttagccagacttagagaggtcgtctattaagtcggacaaattgaagaatcatgcgttgttggttgtgatgtactcgcacaacagagacacaaatttttgagatggatggatgactaagagtacatcctctgatctcactaggtggaactagaccgccgaacagagaagttagcaaccttacaaggcgaatcaatgcaagaactatcgaaagaggccaggatctcatcagagatcctctccaagggagactaatcgacagatcgagaagggtccatagacaaactatccaaccaagttcctctagaactaggacaaactttccccaactcaacggaggacaagccttccaataaagatctagtggcaagaatagccagactctggtaactattggtctagggggcccgccaggggtttttcgcacccaccccctattggccaacctttgaccgggcaacaccttagtggagcacctctggctacccaacagggtgaattcttgttccagagcatctgggagcgagtaacccaaatggcaatctttaactggcgaggccttggaacaggtggaaacatccaacacaacaacaacttaagaaatgaacacaatcacttcagacaattagattcaccaaactccaacaattggtgtgatctactccatgtcaacacacatgctccatcagccagtcaaggaggcatgggcggctaggccttgcccaacacaaggatggttgacatggacagctgctagactcagggttgtcctgccttgaatataccatcttataaggtatggtcggccaggctctggccaatcctaaggtgaaactcaatcaagaagggccaatcaaccaggcccctagagcaatagatccctttgtgcaagcatagttggatcaaatatgagacatgcttaagggcttggctggcctaaaaccattagaccttgagctggacaggtcaaggggctcacgtttatcggcatacatcaatttcttgtccttaccgaaatttaagataccaacttggaagatgtacatgggaaaagaagatcccttagtatacctgaagtactttgagatccaaagaaatctccaacaagtaactggagatgtgcaatgctaaatcttttcaaaaccctggctgaaatagcccaagagttatatttcaagatgccccaaggaagatttaattcttgggaataattctctcgagagttctatattcaattctctacctcaagacaaataccttaacgtctggaggatcttttcaaaataaagcaaagacaatacaaacctttaaaagactacattcaacgattcatggttgagacaatcatggtaaaagacctgacaaaagaaggtcgatatgcgaccatactcggaggcatcttactgttgagtcaattctagaaagatatcagaaggatctcaacgagccacatgaaggagttccttgagtgagatgatggcttcataaaaatgaaagaagctgtttggtaagcccaaacaagagagcaaataatgtcgaacaaacactgggcatcatagtgccctaagtactatctaacatgtcgaccagcgtggacgatctctgtcaattctccaacaatgaaaatggtggaggcaagcataacaatgaaggctctgaccaacataatggccaaagaggaaaattcaacgattctcttacgccatgaagtctaacggagaaggaggagaagtgcacacacttcattctcctaccaaaactcccaatacaatgcatgccaataagccacggcgacaggtgtcactaaaacctgaagcacctggctgaccactcaagtaaaccaccgagactcgaccaatataaggccacctgtcaactaaacatggccatcaaaggccaagctctcgcgagtttcatggctaaataaaaaagcatatgtccctaaatctctcaagatttgggagaaaaccaggagccaaagaagaagcgagagcaggagcaaaaataactcaagtagtataaggtgcattgactacctacatgatgcaggaatggccctcagaacacttgggggaaatggctgctcgaggtaataaaggtcaaaatcaaagcttttaataacaaggctgaatatgaagctccgattgctggcctcaagctagcacacgcttaaaagctccttgcttttgttcaattataaatatataataaccactttaatggagattcatagcatcattcaagtaaatacaaattaagatcgtaaaaacataagcttgtaatatagctacacctaattctagaccggttaatgtaagaactatgaataaaggatcaagatcccctacaaaaaaaatatatcattcatacatagcataatccaagcgaactcacttaaattcttctttataatacgtaagagactcccaaagcgaattcaacattccccaaaatagtaacataaagataaaataccactttattcatctgcacaggaaaagtgctaagcccgaaagtcacttcactctcttctctttcaatggcagcagctagttcaagttcaatgtcatccagattgctaaacactagcactaaagcccttctcaaaagcatgggttgaacacctagacatacaccacgactcttaactagtcgtaggtcatgtcctgggtgaatatgcagctcattgtaaaaagatgatggcctacttgagctaatatcaatacttgttaagttagctcaaaggttgtactaaaatgaaagtccccaaagatgatgcaacagtcgacgcactcgctcgactaggcaaacttagtacccgcttagttcttcaaagaactaagtatctttgtttcaaaaagaatagacatgttgagcaaccaacatggatacacttacaacagcataccttcaaacaaaaatcttgtcgaaatgtagggattagggagatggttatagagtgtccaatcctgcacagcataatgcaaagatgtggtatcccaatgccacctctaaaaagtgttaccaagaaagaagcttaatagctattgataggactgcataaaggctctacgatagtcatgccaggggtaaagtcaatcaagtgcagaagggatcaaattgcagcattgacctgggctttaaagggttggctgaccatgacctcaataggttgaccgcccataaaaccaaataacctagttggccattacctccacaggctggtcggtcatagctccattcaaccagccaggcaatggtccaatgtggctagccacctggtctataccctggctggcctgatccgccaacagtttactctcacacttctagtctaatgtgaccaagaagtaaactacatcttgctagcaaaatcccttgatgaaaggaaaaaaaaaaggaagagagcaagccaactcaaagcaacatgtctgcccataaagagctactaggcccttcgacaaatagatcaaggaaagaaattcttcttaagagacttactccctgaagaatattccttgacaacaaacaccctacatcaagcatgcttggacccaactgaaaaggttcgcactgagttacaagataataataaaggtgcatacaagcctagcgagtacaacaaaaacttagagttagctcctcaaccaaaatattggaatagagaacatctcggtaagtgctctcactagccaacttgtatagtggttattctattgtttcaccgtccagaaatccataaaagagctagtaccca

SEQ ID NO: 118905 - DNA, 1585 bp, Cannabis sativa
attcctattcctattctcattcccattcatattcctatattttcattcctcccaaccaaatgcctcctaaaattattgtctttactctttcaatgtattttatccttaaaatacttaattaatataaatgatatttcagtaaactaattataagaaatgagttttctatcatttatccattaataagctaaaaagaaactatcatttcacttcttacaaatagaagctatagatgttcactgccaagttcccaatttgtaagcattggctagttgataaggtaagcttgtaacaaagaaattaaagaataaatagtaaaattaacttaaagcttaatcatctcaggattcagatctaattgatatgtgataaactaagtgatattgccttaaaataattataacagtaacttatgataattgttctatttgtcaatatcagtcccgtcccgatataagccatatacatctaatgacaagtttatttcactttatgtcttagaaaaggcataccacttactaaaagtgtgaatcaaccttacaaatgaatatcatttcagtataaattcagtgtattgataaataatgatacttaaaatattcgaagcatataatcatattattttttactgtgataacatcactataattatgaataattatatattctggatttaataaaatttaagtgtttaacatataatcatgtcaaataaacacgtgaaccaataatttgacaaagtcgagaaatatttctaattcctttatttgtaaataataagactacgtagaataagttttatttaggacataaaaaaactataacagtttttacgtttcttttattgtttggaagttgttttggtgttattttgaagttattttttagttgaagcaacaagtgagcatcttcaatggagtgttaaaaaagtagtgtattgctatattttaacacatttaagaaaaatactactctaagaccatctccaatggagagatataaatgtagtgtattgctattttttagaacattttgctaaaatttaactctaatggtgatgtaaaatgtgtgtcaaatgtggcccaaatttagcacaaaaaatagcatgggtcaaattttagcccacaataaatactatttttttaattacttttttgccacttattaatacaattcattgactttgaatgagatatattcataagatattaaaataatataaataaaattaattattttgtatattttgaatgggcattaatgataatattgacttttatagctaatttgcatcttgtgcattggagcacaaatacaacaaatggaccaaatataactttatggtatattttgggccaaatttaacccaaaatatacaccatccattggagatggtctaatgttgttttgaaaaatgtgccaaattttacacatgttaaaaaatgtgccaaatttggcacaagatataacattgtactaaatttgatccacaataaattttacattttttatttactatattgtcactaattattatgatttattgacttacataactttatcttttttatttggaataattaca

SEQ ID NO: 118906 - DNA, 1358 bp, Cannabis sativa
gtaaaataatttccaacatagaatcttccctgcaacactaataggcctaactcaatggtgatacctcaaggtccccgatggatcaatcgaatcatggaaagatctagtggatgcttttgacaactgattttccccttcctcataacactaaatcaagcccaatgatctggtagatgtcaaccagcaggaagatgatcgcctcaaggactacatccaatagatcttagaggtagccgctaagatcaaaagtcttagcaaggatgcaagggtaatggcacttgcagctggactcaaggatatgagtcttctatggtctgaccttcgtctcaaggccgtttacaccatgaatgacttcctcgatagaacagatggctttgtcaagttagaaaaatccatcaccaaagctaggggttacaagggtggtaagaaaaagtcaccaaactccccatatcttgacattaaggcgcatggtaatgggaagaaatgaggttctaatggaaggaaaagagccaacaacggtggtaagctagataactcccctagtggaaagaagcccaagactaggggtaggcctttacgagagtatgagcctcggtttaccacctactccatcctattggccccaaaagaggagatttatatggacacatagtcaacagtgtcgtatcgcaaacctctccccttcaaagagtcagggaagagagacatgaacaaattatgtcattaccacaataatttcgatcatgacactaatgagtgtaatcagtttagggacgagatagaatttctcatcaagatgagaagataggaaagagaatcctgttgataggtttacctaattgttaatgcctaattactattccaatttttgttgtgaatgacagattattcaaattaacctagctcttttcagatcttctatgttctaaatctcatgctctctaattaatttcttaattagaatcacatgaaatttgcattaaacaataatctaaatcgtcacataagtcatgcaaataccttcgttttacataaatctaggttatccaaattttagcattctcaaatctcacttttcagatttcgaattgagatcatagaacatgcaaaaggtgatcaagctttaacatagaaataacacatataaggataatttctcaatcaaaatgaacaggaatggcaattaacattaactagggcaaactttaacaaacattcatcatcttccctaaatgggagattaactcatgttcaaattcataaccattccaaaaacagaaattaacataaagaaattaaaaaggaaggaagaaagaaactattggtggaatgattctgggtctccactttgctcctcc

SEQ ID NO: 118907 - DNA, 1512 bp, Cannabis sativa
  modified_base (1481)..(1487): a, c, t, g, unknown or other
ttttagtttccactttttatttattgttacaaaataaacttaaaaaaatatcttgctaattgctattaatgaaaaaaataattactttaaataaaaagaaaataagtgatttattttagagaatacatatatatatagtaaatagtgtacttgacgtgttggtatattctttactatctttttctttaaaaataaaagatatttgacttttgacttaagggggccaccaccatatatagtgaaatacatattaattaaaaaaaatacatatatgataaaatagaatatataaattcttggggggccatggcctctatatattgccaaatacctctgctgttgatgacaagtttttagtggtcaacataatattaagaagaattttcttttttatagtttttaacgtataagtttacaaaaatgtgacttattatcaaaaaaagttatattatgaatatttttttaaaaaaaaagttaaaaatatggagaaaaagtattaaggtaactagttactctaagagtacctgattacccctttggttaccttaaggtggcatttggtatgaggtaataaaatgaaattgaatagaaatgaaataatttttatttcattcatttgtttagtttcattttaaagtattagaatgtcatttttattctatctatgttttcattccttccaaccaaacaccacataatgtgatgtttgttatgtgaatttgagctgaagagagtagagttggaaagagtagacttagagagtattggaggggattaatattagtaccattttaatttaaaaagtagattccacttcgaaataaaccccttggttattaaaatttaatttagtttgacattcgcatccctatcaagtctaaacatcataccaaatgctccctatgggtacctagttaccttggcccgagtttctcatatttttgcatagacagtacaaaaattccataaaatttgtaatttcatctttgtatgttctttggttgttcacctccctttttcgctttgtagggatgaacccacacaacttttagggaggtggcaaccggattgacgaagacttatcagtctggaggctagtccttttgatacaactttgaacccgtcgaccccaattattatttaaagacatctgaggacttttgtaatgccatgatacttaggcgctacgtgattttctaattattgtgccaccttttctaatcaaagaattttctataaaaatcatgccaaattacaatttttaatttaaactattaatctttataaacatatatatatttacataaactgaaatcccgtgtgtaaacttttacaatcataataaaatacttttacagacatgttgcactatgactacaaaatacaacccaagtcgtcccgagaccaaacactccaggtcgcaccgtctcgaaatgtacatcatcccccgagctcggaactgttggtttttatgccctaannnnnnntccatttcaatgtaatccattttat

SEQ ID NO: 118908 - DNA, 2330 bp, Cannabis sativa
atttatatatttggtgtgattttggtaaactttttgaaaaaaaatgaagaacatgatttgagagaaaaaaatgtgtttgtggctatttaagctttagggaataaaataaaaataaaagtataataagcgaaggaaagacaaaaaaaataatgacaacctaaaatggagcgggtcacttccttttcaaatatttatatatatatatatatataaatatatgtatatattgatggcaatcagttcacctattttacctttatttaaagaaataatagagccatgccaataggctcctttggtgccattcggctcctttgatggtgtcattcagcttctcttggtgtcattcggctcctttgatggtgtcattcggctcctcttagtgaggagtaaaagcattcacctcctttgttagagccaattagctcccttgttttttttttttttgtggaccaaaaaggtcctttgaggagtttgagcgcacacatatttcttttatatagcaaggacacaataaaaaaaaaaaaaaaaaaaattgcttctaatttttcatagtgaaactttaatatacccaaaataaaccaaaaaataaaatgtttttcttgataaaattcatttagcttaaatcaaatttagttttgcacctaatttttgaaattgaattagtttttattaactggcctgaataatttatcaagtgaatttagcttatttctgggttacctcattatactcatgtttgtaaatgtatactctgatcattggaatggtgacagcagcatcaacgacgacctagcccgtctattctcaaactaccagtcacctccaaactagtcaaattcatcatcttcacccagtccttcagctactagtgagtcatctagcgagtctcacgggactgtctgtcctattcatagagtaagaagatcaaagaaaatacttccaagttggattttgtgcttcttacacgaaggagagtgctccacctctcgtactattacaaaaatggcccatccttcctcccaagacatcccaaggaaagtcgaagctcatatcgcccctctaaatacccctaagaaacgaaagaagcggactcaacaagaggacatggctcaacacatagtgaccaccttagagacgaaagcattatatgaccttagtacctgagatcccaacattataattgatcgctcaaacagcaatttgaagctgtctgatgtgcaggattacccctctcactacccttttggtgaaggggcgaagataattttggcagagaaaggtctaaagggtggctctctcctaaataattcatgtgcctggacataataccacattgaggctgtggcgactttgccgctccatgattactttcgagatgtggcaaactacttcgacgtttccctagttcaaattgctcctcatgggtgtctggctttatctgctttgttcatcctatatcactagaagggatgggaaagaccctctcctcacgaatccttacctcctttctttctggagttgcctatctacaaacatttggaatacttctacttcatgaaccaagagcagggtcggctgtatgtctctggtgttagtagcaaatctagtagagaaaaacatcaatcgttttacttttttacgaccccaatagacactacccatcgaactttcaccatatgggtacatatctcagaccaaacccaaccgaagagatgatacagcatgcaacggttttgatagccatgccaacagccgagaagtatgccccaaagattgtaaccatggaaatgctcaagttggtaggattgtacccttctgagcgtaactccactgtcacaagtacgattgatggacctgatactcttgttgttcccacgaaccgggagaatacttctcatgggaaccttaccacaattaacttttctaaacacatgtccctacaacccaccacttcgaggagggataaggaaatggtggttggcgttgacagcgaccccaagagtactacggtgttagatgattatgactctaaaggtctttctcttctttttttatatatacttttcacatttctgaccatattcatatgataatactgtgatgttgttatcgtgtgtattgcgatattaatgttgtttttctttctcttacaaattcaggtttgttccaccacctgcttgcgagctacgacgagactgaggatgtgaatacatctagagaagaggagagcgtccaaacccttccttgaatccctcgagcatgttctcagctgaggagaccttgccatgtggcggtagaaggcaaggagaatgctcaagcctctcctt

SEQ ID NO: 118909 - DNA, 603 bp, Cannabis sativa
aatataattttatttttaaaattatttcatttatacaagaaaaaatactttaattttctttaaaaaaaaaatagaatggtattagtatcagagtccaaaattaataaattaattttaaatattgattttaaaattaaaataaaaaatttgagggaaataattttattgaaataagtgcaaaatcttgtatttatactaagagataatttgtgctaggctataacaaattatccataaaagaagttgaaaaaatatgtggtgagtattaatatatttttcatatttgtctaaattttataactttttcacatattttttaaattattttggatgtatatttactatttagttgctaaggccaattttgagtttattattaccatgttttaatgaatagttggttaatatctagatttttttttaggaaaagtaatgtatttttataattaaaaactattgaaacttttttttttctctcagaaaaatatatttatgaagaaaaaatttagtacgtataatttatttttagaaaaattatttcatatattatttttttaatcattttttttcaatttacggtttaggttgctccgttagttacta

SEQ ID NO: 118910 - DNA, 927 bp, Cannabis sativa
ccaataaccgatccaatccaattagaatctaacttttaacattcaatccaatctaattgtaattgaatattcaactgtttgtaattggattgagttgaatcggttcgtttcaattggattatattagatgatgtccatcccttgtacacttgaattagcttatatcacttaattagccaatttattaaagaagaataaatgactactatttaatatttatgctctagtttgtattataattttgaagatatgttttttttttttttttttttgaatatttgaagatatgctttaaaccttagaagttacaggttatgttagtcaatattttactaaaattggtaaaagtttttacatttgtgaatagattatgatacttgtaaagtataattattaaaaaaaaaataccccgattactaaaatcttatctatgctatgtctactttgttggggagaattttatgctgagattgtaattggcatattcctaaacagtaattaattaaagtattagagcataattataatgtatggtaattactaatttgaaagttagatattgtccaaattacacccattcgtgtagaaacgaagcaaaatggcatgtaaagagatgatgtgcatggcttatgccagatggggtgcatgcatgcagtttgcaaagcgaagaaggtgtgtcaacgtggcatctatttgattttggaagcatttatagtggacacatcaacttaaatatcgtgtattatacacgacgtaggaaacgtaataccaaaacaataaaacaccattttagtatatttcttttttcaaataaaatgacttttttaatacaactagatattttcatatactgtttattttttttttccattatttatggttatattaatgtatattttttttaaataaatatagtttttttttttt

SEQ ID NO: 118911 - DNA, 640 bp, Cannabis sativa
  modified_base (580)..(592): a, c, t, g, unknown or other
tttagggcacaaaacccaacatcggcccctctgcggacctttccctttcgagaaatcaaagcatactttttacagaccttgggcttttttgtactttttggggaacgaggtaggatttctcttagggtttccttctgagggataccatatggggattggctccctgttcttaggccattgggtacttggtgaagactcttcttatgtttcctctagtcccggaggcatggcctagggatgcatgtgaattccagccgtttccatggccttttgcatggcgaccattatctcttgcatcctcctattttattccttttgcgcggctagtttgccctcatgatcacccgctttttttcttagtgcgagtaattcgatatagctaccatcatcataagcatcatacccttcttggttttcttcgtacccctcgtcatttgttttgtctcgctcttcagaacccacgtttactcttgaggctgcttctttgtccccttgattctgaggatcttggggggacgaggctgacgtgtgtggtttcgagtctccaccattgtactttatgttggaattattttaccannnnnnnnnnnnnactaacaagtatgttgtttaacattctaaatatgaacttctaaaacga

SEQ ID NO: 118912 - DNA, 1213 bp, Cannabis sativa
tgagatactacttgattgcgtatacttgcgtagtaaccataattttcgtaacatcaagtacttcatgctattcccactacagtatctgatgaaatgaacttctcactgctgcgtccttttactgacaaagacgtgttggatgcccttcgctcaatgagtccggataaaagcccgggaagtgacagtatgtctgcaatgttttatcaatattattgggatcatataagctcgaatgtcactacagtagttcttggagtattgaatgaaggccatgatatgagtagattaaataaatcaatcattactctaataccaaaagtcaagaagccgaaagcaatgggggattatagaccaattagtctttgtaatgtgatctacaagttgatctctaaagtgttactactacggtttaaagatgttctacctttggtgatatttgaaaatcagagtgcttttcttccaaaccgtttgatcactgacaacgttcttactgcttttgagttggttcatcatctcaaacacaagacacaaggtaataaaggttactcaacactcaagcttgacatgagcaaagctttttgatagagttaaatgggattatctgtctgcggtaatggaaaagatgggctttgctcaacaatggatctctctcattatgcgatgtttatcgtccaatagcttctcatttcaactgaatggagaaattgtggataatgtttggccaacaagaggacttcggcaaggcgagccgttgtcaccatatctctttttaatttgttcagaaggactatcaaggctacttcaccatgaagagcagctgggtaatttgttgggactgaagctcacaaggcgtgcccgtcgatatcccatgtcatgcaaataatagttatgctttagccatcaaaagaatattggaggtctaccatcaagcttcaagacagttacttaataccgacaagtcaatcatgtctttctcctccaacacttcaaatgatgtaaggaattttttcagccaaagtttgggaatgccaatctgtgaatgtcatgagacttacctaggtcttcctacatattcaagtcataacaaaaaggagttatttatcaatgtaaaggaaagaatttggaaactcctacatgcttggaatgaaaaactgttttctattggaggaaaagaagttcttttgaaagctgtggtacaatctattcctacata

SEQ ID NO: 118913 - DNA, 1763 bp, Cannabis sativa
aaatttcaagtggttaactaataatttaagcaattttggttggcaggatttgaagtaaacgctttaacatcttacgattatgcagccactattgaggcaagtgtactctaattaaaactagaatatatatgaaaaaataattagtgtagcatttttccaattaccattaattaattacaaaaggaagtgaaattggtatttaattattagttatgaatttcagtgtttggcaaaccctttaacagcccaatataatggagggataattataaacccagagatgaatgatggcttgaaaggttggtcttcctttggagactcaaaattggaacacagagaatcgccattattatcaagaaacaactacattgcaactcataatcgaaaccaatcaaatgatagtttgactcagaagctttacttggataagaattatctctacacattctctggtaacactttttttttgaaaaaaaaaaaataattcatatatttacttgaatgaatgaatttaagggtttttaaatttataatttttttttactcttttattgtgggctagaaattttttcaaaaatattgttaagttttatactatgtactgtgttaagtttttacttgttccacaattgttttttaattgttctatttttatccaaaatctaatatttttgttaaaataggtaactttataatatagctttaaaagggttattttggtatctattggaagataatttttttttagaaaattctaaatagtttatagtactgaaaataaaatttaaatattttatcgtatgttttacttttttttatatgcgtgttaaataactatttaaatttttattttgacactataaattagtgggaattttctgaaaatttacatagtatcttaaaaacttaagccatcatgaaaaaaataaattaaatttttttttgaatgctgaaattaattaggggtgcgggaggagtttgcactaaacattttttctaaaataacaacaatataaaaatgtttggtggtgcagcatgggtacaagtgagcaatggatcaaatgtgacagtaagagctggttttgaaacaagtagtggtttaaaattatttgctggttccacagttgctgagtccaattgttggactatgcttaagggtgggcttactgtggatgagtcaggcccagcccaactctactttgaggtaattaaagcaattaatggtggctgttatgtagtttaattaagcatttaatggaaaaattaattagcagtgaaatggatattattaatttcagagcaataatacagcagtggagatatggattgacagtgtctcactacaaccatttactgaaaatgagtggaagtttcatcaacatcaaagtattgaaaaggtatatatctatgtttttatacatattattcttgtaagcaattagtgaatatgagaggacatgagttccaacacaaaagattcattatcctacattcctatattaacaaataataaaaagaaaagtatgtattcttgtgaaaagaatgtatgaaaatttctgtgtttgaaagaggaaaggaattttttttatcaaaaaaaggaatgatgaaagattaatcatcatattagaaagcatgaaataaggtattagcacccaacccgacataaataaataaataagtagtttttctttttttttttttttttattttcgtttagaatatatagtatgtttttttttccttttgtttctttactaaaaaaa

SEQ ID NO: 118914 - DNA, 3272 bp, Cannabis sativa
  modified_base (2064)..(2065): a, c, t, g, unknown or other
agggcataaaacccaacaagtaggtcattgcccgctaactaagggggttgaacctttgtaaaatcatgtgttcctttacttttttgttcttattgtgtaacatgtggctggcatcaatattgaatacgactctgctatcggttggccaaatctaaggtcaatagtttggtgctttcattgagagtgagttgatatcatatctgatcaaatgccatggttaacaggagaactctagctacaccatctgcatcatcaggattccatcaagatcctctgactgcagatcttgatgtccatgttccagccacgactagaatttccatgaacactacagatgtaatgactacatagttaaatcatgggaattattagatagatttaaatattaattcatgattatgtgcctcatagtagaatttagggcttattgctagaaataggccttagaaaaatattttcataattacggagatatatttgaatgctaggtgtattatatatgttatatgtgaatttttatgaattgcatgttttatgcccggtaatagtggaatgcaacaatttggccattagaatcaattagagatggtgtagtaccttagaattagcgggacaagatgagtagacatctagtatgtcaggatttattgggattatgattttagaccaaattacccctaggattataagttttcttcatgaggaggaaaaagggcaaaattgtcattttactataagttagtaatggttttcttaaatttctatcttatccctaagattttaatgctgaatattgcttttaatagaaaataatagggtattatctaaaagattagaaaaattagaaagaaaatccttatctttctctctccctaggtttgacccttaggaaacccaaaagagatcacttttctctccttattcagaacagatttgagggtgtttgcagcaaggattcaagtgttgttgtagggataacttaaggtaagctaattcttctcttgttctctttgaatttgtaaggtttaattacggtttttatggtgttttttggttttaggttctattgagttttgttgttatttaaattgagttttggggattaaattaggtttgttagagctggtgttgggtaggttgtttgttgttggcaagatttgagctaggtttgacttttgagctcaaacttagctcaacaatggtagtttttgactcaaggttttatagttgcaattgtttgatgaaatagattagttttagccttatttgaagttctagacagtttgggataattttgtttcaattttgaggagttatgaaattttgggtaagttctgctgtaaaagtggcagatcgtttctgggaaaacggtctaccgtttttccaggcagaaaacccaaaaaatggcttactattttaacagttccaacttgtcgtttttagggtacttttctcaaaatctcatttttttagcattttctcgatagttagggttttgtcatgctaattatccatagggaaacttttagtttcaagtttaaatccccaaaagtgatttagcagatcacttaccaattttatgtaaaatgtgactaagggcctttagttgctgaacaactgttttcactctgagttaccagcacatttgcatttggaatcaaggtaagactagtataatagttgtatatatgtatacatatttagtgtgcatgttagttgccgtcaaaataatatattagggcatcagtaaggtgtacatagagttgtagcgagatgccaacagatatatgttaggcaaattagtagccaacagattagcatatcatggtatgagtgaggtatacatagagttgtacgaagattccaacatatatatatgctagacttttagatagtatgaattaactactaccacattagtataactagagtactgagtataggctagatttgtagtaagtcatactttatcgagaacgtccctgacccaattattagatcgtgagtaggtgtatgggtacctagttacagtctggatatatgtttatgattatgcttttcttnntgagtttgtcgactcacaattattgcgtgtatgtgtaggtaagtgctaaaactaaattgggatgagtctaaatctagtggtgaagagtgtacatatcaagacggttagacctagagtgttcaggatttttaagacaatttaggctcaccttttttatagttgtatgaagacaacttttgtgatgcaactattttgcaaacttatattaatttaaaggggatcccaaacttacataaattatgtttattattaaagtttaagttatttaagaaaatttttattagccatgtttttttaataaaccctttgattatcaaagttgtgcacaacaattaagaaatcgcggtaacacacctaatctagtaaggtgttacaatttggtattagagccaccaggttattctttgaagatcgtcaaaatatgtacaatcatcatcaaagataagcttgactcatgattcggtaagcttctacatgttttagtagttttaattgatatacatgatcaaaaaaggtatgatatggagcatgttagcagattaatagctaataggtgtatattaagttcccatgtaagcagtaagtagattacaatttcgatcgctgtctgatctagccaactcatgaatttgcaagcttgtcctatagatggatgccttgaaaaacatgaggagttgggatgatttagttgacactagtggcggatggagagaatgggatccccctagttcccaaggtcgagtttcagttcaagaaaggacttatgaaggtcgttatgaaaatccaccgcagtctccgctagaattagagcaaagatttacagagatggaagctaagattcaacaattaggaaaggagattaagagattaaggcaacatggatctcctattgtgccttcacctcaagtaccagttactttagttcaagagttccaagtaaaacagttatgggttgtacccatatgggaccattgtatgggaaatattggatgcaagaaccttcaatcattttgggatgtcaagatatgatgaaaacccctcgagctgcgagcgctatagagctggctcaagaatcccgatactactcctcttacttccaatattgtcaatggtggtgctagttccttggacaattagaagaggaaagctccatctatttattttaataaattcttggatcaacttaaatcaataattttttcattta

SEQ ID NO: 118915 - DNA, 2821 bp, Cannabis sativa
aaaaaaatcacattttgttatattgtagtactaattgttaaatttgacttttgaaatagtttgctctatgttttggtactttgaccaccaattttttttttcatcattaagtaaacacaaaatttacatattttaagagtaaatatttttttgacacaatatttcaacagtaaattttcaatttattgtttatgagacaaaaaaacgttttgtttaaagatttaatttttaattatatttaaataaaaatgttttaattaaaatagattaattttttaattgttaaaattaatcaaaacaatttttaataattttttaaattacttataagactaaaaaattaattaaaatatcgtaaaatgatttatgtaaatattaacctactgatttgtaatgatttgtaaggttacgataatatcatggagtaatctgattaattccaactgggtaatattaggggttttagaaaaaattccatacaaaatatacatatatatcgatctctcttatataaatattattataaaacaaaatattaatttttttttaaatactacaattcaaatttaatctagacattttttaatttattgttatttttttaaaactcattgcatatttaaaaaatagcattctattttttttttttttttttacatatatctaaaaatgtatttttctattaatgtttttttttttaaaaaacaacaaaatagaaaaaaaaaagtatttatgaaatgtgaccttattacttattgtacgtagttactaaaaaaaagctttcaagcttttctaaaagaaatacataattaaaataaaaattgtattacccattaatgggtattaaagatttttttaaaaatatacgtacaatataaaatgattacgaaaataacttaacaaatcttaattacaataatattttaccacgtcattaaaaaatacattaattctaaaataatatgcctaaaataaaactaatctcgaaattcttttttctttttacgtttcaaaagtaaccttttgtttacttatgatgttgtttaataaaccaataagtatttttttcacaaaaaagtatcacttctgtattatataatttgagatacattttagttacgtctaaaacttgtatgtatgcactttaataattaaataattatttaagttatattaatatatttgagtaactttcaagtttattttcaaaaataataaattgtcatctagcaagctttcattttagtaaattgtatttttagaaaatatatatcataaatttaaattaatatatgtattttatttagttaaataaagaatgaagttacaaataacttttaaattattacaaatatgatattttttttggaccaattaattataatttcaataagatacaattggttacttttgataaaatcatcaattttaaataaaaagttgatgatcagactaaaaattctataatcatatatgtctatactcatatatgtcagtcaaataaacttattagtttattttgacatattacttactttggcatattgaatttttttttcattctttattacatttttcgtacaatctaccattgtatatgctaataaatctattggtttattttgacatattgaaataagtttttatttttcttttagtatattggaacaacaaatcattttatttcataagcctaccattatatatgtcaataaacctactagtttctgtttgttggaacaacatttttttttcttttttttttaatacagagtaaactataatcaaacataatgatatacgccaataaaactattagtctatttttcgtatattggaacaacaatttattttttttcaggccgagacatcaaatttggttttatacaaagtacatgactgtaagatgtcttataacttacatattaaagttggataacaattaatgcacttgtcaaagatttgtatgatgagatgtcttgctcatataaaatgccttgcttataagtttatttggtatatatagctatactatgtctatacctatacatgcaaatagtttattttagcatattaaaacaaaattttattcttgatttacatgatagctttttgtacatagcctatactatcgaataggttaataaactaataagttatattaaaaaaaaaaaaagaagttaaaaaatttacatgtaaaatttgtacacatctaaattgctaattagttttatcaaaaaaaaattgctaattatttatattaaaattatatttttagttatcttaaatttattgtagaaactaattagttgtcatataaaataccacatatttataaaatagttttgtttagtatatactttacaataatattcaaataaaactatacaatacacatgtaatcacttatgaattataataaaacagaactcacataatattttagttaaatttgttgacatttaagttatcaataagttattttaaaattatattacagtatctttaatattttaaaaatattatttaagatatatttttgataattttaattttgttattgaaactaaggtgacaaatataattagtatcaagagcaactcaatgatttatttgagtttaaagatagtaaaataaaaagtatatgatttttacattttaaaatatcacattaaagagtaaacatgataatacttttctgaagcttaatcgagaaatgatgtgcatggaaataatagttttgggtgattctacaatgcacccccttaaaagggatgtactgatacacccttaactcgtttcggcctcgagaaaaattttt

SEQ ID NO: 118916 - DNA, 811 bp, Cannabis sativa
  modified_base (777)..(777): a, c, t, g, unknown or other
caccaccaccaccatcttaaattcatcattagtcaggcccctcaaatatggaacttgaattaaaataaaggaaaaatgatatatttatgtacttatgtatacataatatgatggaatatgtagtttactatacattttcatcaatctattaaatatttacttatatgttattttcattgttctaattattaatgtttgtgttcatctcgagttatgtaatatgtataattatttacatatgttcagaataaataattgttactatttgtgtgtatgtacttattagtgcctcgtccgacaatgaattcagtgcaaagaaattctaataagaatattgggatgattagtaaatctatgtatgcatattgaatgactaaagtaaatttgtataattatatttatacatgtaaggattcattatctattaaaatataaagttaattgtaactactttaaatgaaatagatggagaattatataattttataatacaacgactacattcaaatgtgcactttaaataaaatatatatgtgtcacctattactcgattggggtacttttcctatctttaagtttgtgcctagaaaaaacaatgttatggctgatttgttggcaaattggacaaggagaaattgtatctcgtgctctggttcacttgggaaaatagctcccaatttagttggttcctttgaatagagttttattaagcaagaaaaaaaaaattaatatatatctataactactataaaagtgagaatattgttttgggcttcnacatattaaattactaaaaagtcctcacttctca

SEQ ID NO: 118917 - DNA, 1689 bp, Cannabis sativa
agggcataaaacccaacacccttcactaatgggctcagcaggttgaaattcctcatggtgttccatggagttttcctcattcatgggggcaagtggtgatcaacgcttgtgctcactactctcaatgaaagcactaaattattgacgcagtttttcgtcaatgaatctaagaagatcgtattaatgagatgtaaacaagtatttgttaataaaagtaaactgatttatcgaaaagaaatttaacaaagatgaatacaaggttttacaacagttcaccccctttcagcggcaataggctagtccacttgtggttttattggtctcaatgcttgagaaaagttagttttgttggtctcaatgcttgagaaaagttctccagagttatgttctccaagagttcaatcctcaagtaagtttttagcatgagagagtgagagtttgtgagtcaaaattgggatccctttacaggtgacttcactccctttatataggttttcattcaggactcacttagagtttaaaatctcttaacaagagatacaccttctcttaactatagtggagttaggtttaaaatacaaaatgataacaaaatcatatttcaaaataaatatctaaaaaaatgacaattgccgaagatatctttaatccacatgtgctagcttatttttgtcacgaggagcacatgcatgttgatgaacaacacatgctgagatcatgatgctaatgagttgtgaaaaagcacgtgctaaggtaaggagcatctcggctagggtcgagatgatgactttgtgttgtgatctcggctaggaccgagatgttgacttgatattgtgatcttggctagggccgcaatgatatgttaaggttgtcattttggcttgggtcaaagtagcatgttagggttgtcatctcggcttgggccgaaatgatgccttggtgttgccatctcggcttgggccaagatgaagcctttggatgtggtgatcttggctagggtcgagatggttttgatggtgtgcatctcggccagggctgagatggtgcttggtgaagagctctaagacaatgccttcataaggaggccgagatgctgccttcttaaggaggccgagatgatggtgtgagacaaggacgaggtgatgagctagagccgagatagtgctcaatgaagagctttgagaaaggtgatgagctttggtctgagatgatgcttgatgaagagtacctcgaccttgaggaaggtgagttttggtacgaggtgatgaggcatggtggtttcaccacttaggtgtctaggtcaaatgttatctttacgattgctatttttgtaaaattagggtataataattgtcaataataaaattccatgattttattaaaaaaatgaaaaaatacatgtattttcaaaataaatatttaattattaaaaaaaataaaaaatagatctagctaaacaattatcatcgtatttaatcacttaaaacataaattcaaatttattgctgaaaaacagtaatccccaaatcaaatcataataaaatattaaaagtgtctatctaacagcattttttggtttaacatttattagtttaacagaatattaaatttacagaaatttaacgattaggtttgatctcccgttaataaataaatccaataattaaactcaaaaaattaaacaatctt

SEQ ID NO: 118918 - DNA, 797 bp, Cannabis sativa
attatttagtcatggcgaatatttgtgctagtttggtattttattatattctcttgttgttgtagtcggtcaaaatcattgttaatttattttatgtagttttaattaagtaatatgagtgttattgatgtcattattatgtagttttcatttcaatgaagtttttattttagttatttattgtcttatgttgttgcttaggaataataataaaggaaatttgtaacataaatactatatgttttaagttttatacacttaaatactatattttttttttcgacggactaaatatcttatgttatatttttgttacttccgttactacttatatgttaaatataccagaatttaatttatatctgttgatcaattattggtccatataattattgttaattcaatatttaaactaataaaattataataatataaataataataattgtctctctcctttcgatccccttctctgtttaccaaacattcactcaaaacacttcaacttgacgcaataatcaaacaaatcatacaatcaatttcttcaaaactcaatgattaagcaaataataaaaactaaaatttcacacttgatgcaaaaaaaaaaaaaaaaatcttaactttactaataaaattatatattaatccataaacaagaacacaaaaaatatgatagtgggagatctagagcttgtttggatgtacagtttaaaaactgttttctgttttttaaaattgaaaataatttttaaaaactattaggagtcgtttgtaaaaaaatttaaaaactatttttt

SEQ ID NO: 118919 - DNA, 983 bp, Cannabis sativa
  modified_base (926)..(928): a, c, t, g, unknown or other
taaaacacaataaaatcttttgaccacttaggtagtgatctttaataatgtaggtgtagcttattaattacatgtagtcgctttcttttggctttagttggtcggctttgtgaatttgtatgccaaatggcagccacaatatgtctctaatgacttcttttcattaatattagccctttcatgttttcataatcataatattcaaacccaactttgctttcttttcttaaagatgttttgttacaaaaatttacatttaaagtaaggcaaaccataaccaacgtagatcccaaaaaacccacaccattttttttaaaattatattatatatatttataagtaaaaaaaagttatttaacaatttgtgcatcggataagaagaaagcttaggcttgaatagagtaaggttcaaggtttaataaatttgacactttgtgcagtcatatatgtcgtattaccattattttatttatttatttattacaaaaatttaaacttaagagggaccaagacaaacaccaacaatccctttcgagggaaaagtagaataaaaattgagctacttacttgggataccaattacaccatgtgaaatgagatttgtttttttttttttttgcatttctttaattatcactataaataaataaataaaacataagagtcctatagtaagatgtctttgtattcattctatttgtgctatctgtttttttggctttttaaattatctcacatacctctctccacaattgggagatagagaatcctaagtgaacatattattatttatttaatttattcatatgccatgaagggggaaattaattttaattaatgaagggatgtattaatatatatgtatatatgtttagtatttatatacagtagaacctctattcaagaatactctattcaagaataannnctaatttgttataaaaaaatgaagtcccaacttgggtcagttataaataagaata

SEQ ID NO: 118920 - DNA, 1404 bp, Cannabis sativa
ctctctctctctctcttattttgtttttttttttttgaaggggttcattcatatccttgtatgaatattttattttattcaacatttttttttaaaaaaatattttatattgttttgagataaaattactctattttgaaaatttgtgtaatgatttttttaggagggtagtttttttttttttgacatattaattacatatttatttatgataaaaaaattatattttacacaatttatttatcgttatttttctttttgtaaggttatttattgctaaatttttaatattataatattatttgttgaaaaaacatctctttctctctcttttgtgagaaaattaagactagtagtgtagaattaaaatgattaaaattttaaacaatcaaataattatcaatgacaatattaataattaagaacaacaatcagataaaaataagagcaaacagaatatctaaatcaaaaacattaaatacaaaaatatagaaatcaataccaagatatgtacaggttcaagtccgataggttgatataatttatagctttactctagttctgaaacaccaccgtaattttttctttattgattaagcaagaataggtacaatacattcgacacaagattctctgctgagtcctcacaagtgtttcaactctcacactttacacttaaaaattttcttcatctaagcaaaacccaaactatatctctctattttctctgcacctctttctctacctcacaatctttctctctctcaaactctcaacctcgcctgaatagagttctccagctcgtttttcaatcatgtcttcaaatgttgagtcaaggtagtatttataagcttaggatcaagatcttaaagtcgatggctgcaagaaacgagattgttaagttaattagatataactaacttaaccaactccttatttggtgaagtttccacgtcagcgtaagcaccagggcctccgagatcatgaatgagcttccaggcttgaggaccacagacccttgctgaagacacttccgagaataaaatataagactacggagtcaactattcgaaactatcattacagaaaggataactagccagctggaattcattttcaagaaaaaaaactaattgagagagtgaacctatcatttggcccatttaataattaaacatttgagagcaaagcaattatagggacatcactcaattataggtttacatgacatttcactcctttttaaaaaaattattaataatttatgatgttaaatttaaaatttaaattaagtaattgcacatatataaaaaaaaggagaattacctcatatactattttttttaacttgtttttttttttttaaatttacggttaggttttctaaagtggttgcagctctag

SEQ ID NO: 118921 - DNA, 1105 bp, Cannabis sativa
ttgctggaagaagggatcttatcctaagtcacaacacctggaagaccttagcagaacggtgttgtagagaaaagaaactgaaccttgtttgacatggttagattgatgatatgtaatcatcactgccactgaacttttggggatacacatagctacctacatttttaatgtagtaccctgaaaggcataagcaatactctaacggaattatagaatgtgataaaaaccaattttgaaacatttccatatttgggattgtcttgctcatgttttaaactgaagactggaaaacttgttcctataacgattgtaagatattaagaggaaattcaatgaaattagaaatagtcaaacttctaaaccaatggttttagcaccattagttgaacaaccaacaacagttaccacagttcctaaaaaggaaatcccaattcatcgttgtagtgggaggattttgtgacaaattatgcgctacgaacatgaagcacatgttcttgtctctcatacaaacaaggacgatccattaacttataaagaagcattggaagaccctgactcaaacaagtagaacaattccatggatcaagaaatggatttcatgtgcaccaaaaaggtttggaaatatgaaactccacctgaggatattaagcccatagggtgtaagtggatttttgagaagaaaagaaatgctgaagggaattagagccctttaaagataggcttgtagccaaaggctacacacagtgagaaggggcccactatgataaaaccttctctcatgtggtaatgcctaaatccatttgcattcttctttctatatctgccacttataaatgtgaggtatggaaaatggaaatcaagagtgcttttctaaatagcagtattgatgaaacaatttatatagaataaccagaatggtatgtgttactagagaaagattgaaaggtgtgtaggttgcttaaatccatttactgattgaagcaagccactagatcttagaaaatcacctttaataagagtattaaagagtatgattgtgaaaaaaatgtgttatcccaaatttggcactctgacgtggcatcacgagaatggtgacacgtggact

SEQ ID NO: 118922 - DNA, 1577 bp, Cannabis sativa
  modified_base (326)..(331): a, c, t, g, unknown or other
aactgctaacggactagtggtttacgtagttttaccaccaaaattttagattagggggttagttgcaaaaacatgttcactttaggaggttttgccgcaaattacccgaaactttaatagtataatagtatagtaagtaatttttagcaaaaaaaaacgaaatactattactatagtaaataataaaaagcaaaatttattatgtcttaaatttgacacaatttgtttttctttggaagaattttgacaccatttttaatagggtaaatatcattttagactctgtattttgtaaaagttattaattggatcctctattttgttannnnnnaaaatagaccatgtattttttaaaatagtacaaataggaccctaaattgattttttgtcaaaataaaatttaattataatcctttctaaaagagctatgacaaaactgtttacattttctatatatgttcgtattaggaattatcttcaagttgtttatattaaaaaaaaaaagttatctaaaattaagctcaatgtcctgtttttaccattttggaaaatacatggtccattttatcatttaacaaaatactgggtccaatcagtaacttttgcaaaacatagaatctaaaatggtatttacccttttttactactattagagatattttcttttattcttgacacattattggagattcttcaattttgtaatcgttataatatttttgctcataattttgttaaacttactttaacattactttggtgcccgggattatctctttttgttttgagtccttgcgactcatattttggcaatggttgtttgatgagaatttcataattttcactaaaaaaaaatggagctaatattcgatatgattgtaaaagttgaaaaatatggaaaaccacaatatatattgtcgaaggaatttggacaataccaaaaaacaaataaataacaattatttaacagaaaataacgagtactcaacctagaacaacaagtatttgaacaagactgcccagacaatagaacgaaaatggaaaagtataataaacacaaatatgtatagtagttcagtcagatcatggtctgcttaatctactgttgtaaatgatttctgtcttgtttattcatgttggatcactcctttatatataaaacaagtgtcgatttaattacacataactgatcggttatagaatcgttttataattaatattgacattaaattaaaataaacgtaataagaataaatgaagaacaattttaaatttgtttcaataagtatagcaacgtatgtgacctgtagggtgcgagttgtctgttcatattctcacacaagctcacaagctttgggtgtgtcttatcttgggagggctaacgagcctcatgttaaggtatatgcattctatttgagttgcatatacatatatatggacacctcatacacattgacaacatgagatatgagagtaggggtgtgcagaaagtcatctgatccaatcccaattgaacgatccaatagaatcggatcggatgcaaattttaaaaattcaattggatcggatcggatgtt

SEQ ID NO: 118923 - DNA, 810 bp, Cannabis sativa
attgctcctgagaatgtccccattcctactctccaaagtgcaccatctcattcccaaatccatgttccccctggccccacttttgccacactcatgtaactataagtaatttttattctaatcatatccactattttatctcatttccttctttttctagttttaattttacttctttttattgtgctcccaatcctatgaatcgtacccacacttagagaatcctctctaggattggtttatcgtgcatctctctcccttggcttatcataggtgactttaatgcctttctaacctggaatgacaaatcaaatggcaatagaagaaatggcccttcaaactcttttcgccagtttctggataatttccaattggaggttctaaacccatcgagaccccatatgacttggactaataacaatcagggccataggaatactcatgaaaggttgaactgggctgttggtaactctctctggcacacgaaccaccctagtagcaatcttaaccaccttgacttttttggctcggatcatagggcactccaaatcctttcacatatcccaccccagtcttcaactatgaacactaagactaaaaggttcctttttgaaaatgtttggctcactaagcccacctggaatgatgtcctgtataaggcttgggagcctaatagtcatgatgccttctctcaaaactctccactccactcagacggcttgtgctaagtttctctcaaattggaaacacaaggctttctttggttcccagcaaaggattaagaaagcccaaaaagacctcgaacaagcc

SEQ ID NO: 118924 - DNA, 4431 bp, Cannabis sativa
  modified_base (1577)..(1586): a, c, t, g, unknown or other
aactggaaggaagggactattagcttaaagcagtccgggtacatcaagaaaattattcagaagttcaacatggaagatgcaaagaatacattctttctgttaggaggtcagtttgttttatcaaaggaacaatgtcctaatggtacgaaagacaaagaagagatgaaggatgtaccttatgcaatggttctaggatgcttaatgtatgtgatggtgagcacgagaccagatatacctcacgctttgagcatcctaagaaaattcatgtccaatccaggcattgaaaattggaaggcccttaaatggttattgaaatatttgaagggcacttaggattatggtctaacctatgagaaagaaaaaagagaattagaattgaaagggttcatggatgtggactatgcctcgaatagagatacgagaaaataaaccacttcctatgttttcttaacaaaccaaaattgtatatgctggaaggcccagttatagtctgtggttactctttccaccacaaaagcaaaatttatggcgactacaaaagcttttaaagaagctttatggctttggggagttctttatgagttgaaacaaatcaaaggaggagtgactgtgtattcagatatccatttatccatccatctttgcaagaacccagtttatcatgaaaatagaaaacatatagatataagactctactggattagagagaagatataaggacttgttgatttaaataaggtcagaactaaagataatcctactgatgttgagactaaggtcttaactgtaaacaagttcaagcattgcttgaacttgatcaatctcaaaagttagtatactgagattcatggaacaccaactaatgatggatgcattctttcttcatcatcgtcattcttttaatttgaagtaactaggtggaatttgtggtatagttcctccaaatgaaaaagtttccaaaattattcttggaaagttattcctaaaaagttaggagtcttttagatattattctcagacaactaacttacccatcttggaaggagtcttgtggaataatagttaagtccaaaagggagtttccaaatgactatcatgtctacttcaagtctagtcttcaagaaagctagcctcactccaggatggagttctagtgtgctagttctccatcttggaatggtagttctggatagttgacttcaacaagctcaatcctatctggaagcatcatcagcgagtgtctttggtccgtgagtccaaaagcttgtatatgttctcggagactttgatacttaagcagacatgaagactttgctcaaagaggagttggttaagttagttatctttaactaacttaacaacctcatttctttcaaccactgactttaggatcttgatcccaagcctataaataccaccttgactattttgagatacgagatgaagaacttagttaagatgagattgagagtttgagagagaaaagattgggaggtagatagagaggtgtagagaaaagaaagagattgggtttcaattttgtaagaagaatcttctatagatgaagaagattcttnnnnnnnnnngtgagagttgaaacacttagtgagtactcaatagagaatctagtctcgactgtattgtacctattcttgctcaatcaataaagaaggatttcgatggtgttccagaactagagtagagccatagatcacatcgatctattggatttgaagtagtatatatcttggtgctgatgtctttattttctacattttttaaatcaagaagaaaaacttcaataatcgaacaaaccaaatacaccctcaaacttttccaaaaggaaaagacccaatctcacaacaacaataaattataaatcattctctcaagtaaatttatctccaatctagacccttttctattcttgaccatgctaaatctatatttaacatcttttttagtactttaaactatacaattcactgttttagagtaatttaagtatatacaattattcatattcctccataagaggtaaatagttgctaccaacagaaccaccagcaaccgaccaatgaaacttgcctgagcagtacacagccagcaatgccagctgctaaatctattagaccagcctttgaaccccagccacacaaatagatcagctagcaccaatcttgatagcctgcactcaaagaataagtgttgatggcattccaaatcaagttcacaaacagcacaacagtcattctccacaacaatttgaaacttgttaagcatgtctctggtgagaaggtttgaatgaactgcctgccacagtataaaaccttgcttcggaacattgaggttgcaccaaatagctttggtagcagggtctactacctggttcaaagactaattatagagtttaaacactctaaaaattcccccagcaccagcagatcttattccatcttgagtgaactcagatctaagatggcacaacttcttccaataccaacttgtgtccacttttaagttgtaagagcagaagttattccccttaagatagactacattaacccatttcatccacaacatatcttttttattcattagatcccaaataaacctggcaaggggagctttattccatctagtaccatctttgaatccaatgcctccaagagctttttgaagacaaactttctcccagctagacaaatgaattttgggctgattttccttcaaaccccacaaaaagccacaacaaagtttctcaatctctttaatcacactttgaggaagaaggaaaaccctcatccaatagttcctaagaccaatcaatgtagattggattagttaaactgtaccagcaaatgatagatgtttattagcccaagaaaggattctttgcttcatctttttcaggatgataccacaatcttcaagtctccatttagtaggtttaagaggaatccctaagtattttaggagaaaattcccaatagataagttgattttttgagctaagttctcggggcaggtcactcccccaaaatatatttgggatttctcaaaattaatttcaagctagaagttttgctaaactcctcgaaagcctccttgataacttgaacggaatcctcatcccctttacagaaaacaataagatcatctgcgaaacagagatttgtaagcttaagttttctacagagagagtgatatctgaagttttttatccttggctacaagttggaatctccaagacacgtattccattataagaacaaataaaaggggtgatattgaatccccttgcctcaacccctgctctcctttaaaagaaccctgaaatctcccattcataagcaaggacaggatatctttctcacacaagtcataactcaacttatgaatttagcagggaagcaataagaaattagaagttgctcaagaaagtctcagttgattgtatcataagctttgctgatatcgatttttatagtgcacctacaagagcaatttttcctcttataattcttcaataagtcttgaagaatcaaaatgttgtaagcaatagatctgcttttaacaaaagcaccctggtttttgattgattaaattcgtaagaactctagccaaacgagaacacaagagctcagagatgcatttacacaaactactgcaacaagcaattggtcgataatcaatagccctggaaggattatcagttttcggaatcaaagatatagtagtattgtgaagctcagccgggatttgtgtcaataaaatgagtgatcactcagaagagatatgtgaaggagataaagaacgagcagtcagtctttgccccagaaccttctaagaaggtgaaaaccgaggaaccccccattacgttcacagaggaagacgagaagaacgtgagataccctcacgtcgatccgctggtcataaccattcaactcgccaataagaggatcaagagagtgttaatagacaatgggagctcggtaaatatcatttataaggagactctgaaaaaaggggctcaaaaaggccaagttaaggccttgtatggtgaatttttgtggattcaccgaggatagcatctctagccttggcataatcaagcttgcattaactgtaggcgaggcacctttaactactactgttatgcaagacttcttggttgtcgacctgccttcggcttacaacatactgttgggtcgtccagcactgatcgaattaggggaagtcagttcaatcaagcacctatctttaaagttcaaaacaccctaaggtgtgggagtggtgcgtggcgaccaaatgctggctcgcgattgctatcgcatagagttgacccatagaaaggccggtcatcagctgacgacgatcttggcaggagaaaatgagaagaaagatgaagatcttgatccccgagttcaa

SEQ ID NO: 118925 - DNA, 2114 bp, Cannabis sativa
  modified_base (26)..(60): a, c, t, g, unknown or other
  modified_base (2087)..(2088): a, c, t, g, unknown or other
tatatgtgtttaaattacattgtttnnnnnnnnnnnnnnnnnnnnnnnnnnnnnnnnnnntggtagtaaatctagatccgggtaaataatccccaacactcctaggccggccaaggttagttttaatccaaatatgtgtttttttacaaaactcaaatatgtgcttcatgttctttatgactcatgattcaggaatcacaacaaaggccaaaatcaaatcttttccctcaagaaatcacacattatacattcaaaaattgccatgaggatcaatataccaataagattacaaactaacatgaaaattaaaatagtttctaaaagcttaaaaagcttgaaacttttcaatggcatgtacaaagaagagatatccgagaagagaaaatgagacatttatatacagagaagatcaaagatctaaaagcatgccatgtaaaaagccaacacttggccagacaatgttgctcgacaaagactactacaaacaagatgagagccagaaagtccctatccgaccagatgttcaaatagggacttggggacaaatgttatcccaaattttgtccacctgacatggcatgtccatgtaagccaagatagagtacatgtggaacacagccttgccaatagcaagacaaggtctccttacaaggtatggcaaaactgtcaagcagcaagcgaaatgagttaagcaagtcgtcaaggagttgcaccaacatgtctggttggccaagggaagtctataggccggctaggatgagcttgtatggctggccaggatctaggcacaagctggtcagccaaaaagtaactttcagaccaagggagctttccttcgaccaagggaacctaacctcagcaaggaaaaggtgtacaaagttgacctccacttgctaaaggctagcctccatctcaaaaggctggtctccatctccaaaagttggcctcctcttggaaatctagtaggaacatgacctaaaggatcttagcaggcacatggccggccaaaccctagcaagcacatggccggccagaccctagcaggtgcatgactggccagacctcaacctatagaccttgcatggctggccagacctcatcgtgtaggtgtatggctaaccaacttctccctagcaagacaatgatgtgcagccttcatccgtggacaacaaaccaagctgcgagttgggccttgataagcaattaagatgatacaaaaatatctagcttcaaagggcaacttagtcatttgtatctattaatttaatatgtaaatatctatgattttatctgctaattagggcttatgtggtctcctatataaagagacttaacttaaccctaaaaggctaagtctcatttatgccataaagctctaagtctgaaaccctagtctctctctttctcttctacacgcctaaatggccttctctcttcctctctctcacacgcctccaaggccatatctctcgctcattagagatctgcctactgattcatactttgtaactttaaagagagatatatcagatccctcaatagtgatctgaatagtattatctctaggtatcaataaaacaaaaatgggagtaggtcattacccgctaactaagggggcaaacctctataaaaatccttatcttatttaatttattgttcttattgtgtaacacgtggtaaacatcaaattaatacaacctcgctgtgagttggccactttttgaggtcaacaatgaccatatgtctacagagcaaaaatcatatacgttcatgtagaagactcaaagattagattgttcattaagggggagttcctggtgtcagctctccaccacttcctggcaccttggtgctaagtgagctactgctagtcagcgagactagtagggcggtcatatgaggaccacaaggggactcatatgtctccatgagttggaatactcgtggacactatcgggctgatctagtagtgcgtctaagaatactaccagaggttagcaggtatgtttccattggctcaccagtatgccgcttgcaatggacatggcctaaacctccaagagatgtttgttgggttttatgccctnnataaaactctttacaatctgattagt

SEQ ID NO: 118926 - DNA, 1597 bp, Cannabis sativa
aagattgcacaataattgaaaaagcaccgtagcgtgccttagcattagggcgttacacataaccccagcttgtacacatcatttgcaacatcacatgcctcaaaagctagccaaatggttttaaaggtctccctttttgcattgtcgaaatggtcctacagtatccgatcaaaatcgcattgtgtattcaattcttcagtcgaggggccaacactcatctttaggtctataatcaaatcgaacttaaactgcccaaatttggcttcagttttactcacgtaaaatcacacttcatcatttttcacctcactgactttctttttccttaataatagttaatgcacaatcaccccagagaatttcgaatcactggtattccaaaaaattctaaagggagttttcttgaccttgtcagtcaacttaaagactttgaacttagcatttattgaagtaaagtatatgttccctctgaaagtgatacacatggaaaatgctcagacaatgaaagaatgagttctagagccatctgtatttacaaataaaagatgagtattacttggaatataaattgcacaaactcgcaaaataacatgtataaatcgcaaaacaacacatataaatcgcacacacgtcagttaaaattgcttaagcactgtttaaagtttatgcataaaaattgcaaataatatcaaatgtacatcgcacaaaaccgcacaaatgtctccaaagtatcgctcaataataccaccacaaaatctatactaattactcgcataaaatcgcacaatgtcgcccaaaaattgccaaaaatatgaacacaaaaactactgtaacttggcatgattactcacacaaactcacatataaatcgcctaatgtcgcaaaaacatacaaaaccccaaaaaagctatatccctaaacccaaattctttcccaaacacaaaaaaatagaaatcaaaagtttaatcatcaacaatttagtttaatcacagattgcgtatttaatggagaaaattttaaagaaaaataaaaaaaaaacaaaaaaaacaaacctgggtccgagtaggtcttgtgaacggtgggggggacggtgatcagagactggttcgagtgattttcgtgggtcgttagggttcgagtgggtctcgtgggttgttggggtcaagtgggtcgagagggtcaaaagggtcgttgggttcgagtgggttggggggttcgagtacgtcctagttcgaatggagggggtgggttcggtgcagtggtgttaatgttggaaccgagagcatgggagaggaaaagagaagagagaaggaagttagagagaatgggttgagttgaaaagagaagagtaattttagaaagaaattgaaagattagaatatctttcctatgtgtaatatttggatttaattaaaaattatagctaattttttaacatggtttatcaaattactcttttattattatatgattattctcataaaaaattatattctttttacccacctacaataaattattatatataaatataataaatttttagtagtttcttgggttttatgccctaaataaaactctttacaatctgattagt

SEQ ID NO: 118927 - DNA, 1069 bp, Cannabis sativa
accctaagcaattatagtaatcaactgtacaggataattcgatataatttccatctcaaccagccaaattatgctagcacttgttatattaaaaacaacattcggctacaaccaaccacacgagtctctagcttcagtactaaaattttgttactaacatcaacagtttaaaatccaataatctgactctgtaattgttttcttaccagatattccaattctaattcaaattcaaaacaatcaaattcacttacctaaaccacggtcttgcttcttccaccaaaagaagtactctcctaaaatcctcacaacccttactctgatccatcgaagcacatttcacgagcgtcacaacaatttccacaatcagcaatcccaaacttttatcagcactaccttcccctataaccggcagcaaacttcgctttgattttgacgacttagcaccggaactaacactctccaaaattctcaatgcttcctccttcgcctccttccacctggcccatgcttccaaacaatgcaccatccgaaccctctgggcttgtacggtatggggtttgcaatcaagctgcgaagaaatggactccaagcaatccaagcacagcctgtaaatgtcaaagaattccacagccaattgctcggagccaaatttcgaaggttcggcgaggcgcttggggataatcgaaagtgaggtattaaggaagggaagaaaagacttggcgagggagcgagcaagggactgttcgtccttggaggcggtagctttcttggttttcttgaggtttttgagatctgagaaagagcggaggtggtgggagaagagagaagagattccgacggagtccgaagcttcgagcttggaaatgagagaggtatccatggcggataggaagagagagtcagaagagtgtgtctgaattctgaaatagtgaaatgggttttgaaaagatgtaaaggaggcgcgcgaactcgctggccataattatatttttcaaaaaataataataattcatatttgtttattattttgggattatttcacaaaatatacaaacaacaaaaaaaa

SEQ ID NO: 118928 - DNA, 1363 bp, Cannabis sativa
  modified_base (747)..(764): a, c, t, g, unknown or other
aatcttaccataaatggaaaaattattttgtcaactaacttgccaaaaaaagactttacagaaactattaaaaagaagagataaatagaatattaagtatctctaaaaacttaatacaaagaaactgaaaacttgagtgatacagtttaaaaatcaataatgaaataggtgacaatgaaataggtcttgcattactacaactgcattttaaaaataaataaataaaatcatatctttttgatttttcttcaacaattgtccactttcttgaaacaaaacttggagttttttcaatcatatgaaacaataaaattaacaagcatcatctgtctcaaaaaactcctttagttctttggaagttccattaatgaaattgagaagatcttctttttacaaaatacaaaactcaaaatgtattattaagccattaccttcgtaacagagaatttttaccgtcattgaagaatttcacattgtttaaaggtcattcaagccccttgcagaaagcactcaggttcaactttaagctaatcaaaaccaaacaacacaacaacatactaaactctcctcacttcaacagaatattctaaaaaattacgggaattatcattaaaaaaatcaacactttctcatgatgaaattttttgagaaccacatcagtatactcaaatccaagataaacaaaatgatctccagagtaagttatccaaacaattttttccaatttatatattattattattattnnnnnnnnnnnnnnnnnnattattattattaatattaatgaactaaacaatcttgtaattacacaagttcttcttccggaaacacaaataacaatatttttttaatgttaaaactttataagattgatttttgaatttttattttaatgtttgataatgataatagtataaatcgttccaactgtactgtaccacactgtattttcgcagtgtgggttttacaattttaaaatcttaaggtgcagttgcggtttgaaaaattacaaaatctgcatatgcaataagtcacaactcgcatggctcgaaccgcgaacctccctaacatttaatagggatagacacgtgtattgtgcgaaagatttcgaaacaacttgccatccaacctagggtatgtttggtgtataagaatgggaattataatggtaatcaacatgtccattactttgtttgttttccttttttacattttgtaatccattacattgtaatgattattacaatatatgaagtaatggtcattacaatgaaaaaccattgtaatggtcattacaattacaaatcattacaaaattaatataatattataataaaaatataataaaagaaattaaaaagtc

SEQ ID NO: 118929 - DNA, 1336 bp, Cannabis sativa
aggagtgaattcaacagtgacattgttgtcacgagtaaatttggaaatactaattaaattttttgttatggctggaacatgaagaatgtttttaagataaagagactttcttgcagcaagagtgctatgaccaatgttatttatagagagtgaggaaccattacctacaacaattttctctttgcctttataggagctttgatgatgaaggttgttgttatcttgggtgacatgatgagaggctccactatcaagaaaccaggagtcatctgtgttagaagttgttgcagcaacatgtgcttgagggtggttgggggcagagggtgcatcattgtcatcaggaccattgtaggagatatcaaatcgtctgtaacatttctgaactgtgtgaccaattcgtccacagagttggcatgtagggcgattattgttgtaagaacctcggccaccattgttgtttgatcgaccaccaggagggcctcttcctcgacctcgaaactggtttgtgttgccacggccattagtgttgggagggcctgattggtttcttcgatactgggcataatttgccgtggcaccatttaaatcaatggtggtatgggtttgatttgcttcgatgcgaatttcttggctttggagcataaactggacttcagcaagggtgagattttctcttgaagtcaaattaacaaccactgcttcgtactcggttcccaaaccagcaagaacatagagtattaattgttcatctgaaatttgatttcctgcagctcgaagaccgtctgccagatttttcattttcaacaggtattcatcaatggccagcgatcctttcttggtggattgaagttgattcatgagatgaatttgtcgtgctcgcgatgcagtgccaaacagttgctcaagagtagtccaaatttcagaggaggtagcacaatttaccacatgcccaatcatagattcagatatggttgacattagccaagaaagaagaaattgatcaagacgcatccaacgattgaattcaggattactcaccattgttgtggattctggaggttgacgaatcctagcttgaggccgattttgatttagcagaattccttcaagatcatgtgctcgtattgctggaagcacttgtgatctccaaaaaaaatagttgcttcgatttagtcgtaatggaggaacaaacattgttgtaggaacgattgaatgatgagctgcttcaccggaggaggtcgccatggaagtacaccttcagctctggtaccaagttgagttacaagaaagatgaaacagagagagaagcaagaagagaaaaggaattctttattca

SEQ ID NO: 118930 - DNA, 2391 bp, Cannabis sativa
aagaaacaagtggcaaaacagtttgttacaacagtaaaataaactgtaataacagatggactaactaactctgagtaatgctaacaattcgaaactcaaaacccactaaatttatctttcttgcttcactcaaatctcaaaagcttcactaaaaaaaaatcccaaaagcttcgctcaataaaaatctcaaaattcatctctcatttattcactcaaagatttcattgcaataaaaaaaatactgaaacaatcaaatcccaaaagttttagtaaaaaaaaccaaaatctctctctctctctctctcatcccaaaatctttggttgggtttcaaatttcacctacaatgtcggataataatggtagtggggacgacgacgctacttttcgaagcaaattatgttctcatttcatatatctcaagtttgattatcatatttggttttgattgttttgtttttgtgtgaaattttatttttatagtgactgagattaagtaattgtgaatgccactgaatagtggatcttgtgctttcctacggtttcttctgttcagtatatggttgtgaatagtggtcatgagatgggtcttattattctagcttggggtcttcgtcaaggagatcctttgtctccatatttgttccttctttttgcggagctctagagggctgggttttcggagtcttcaagattacaatttatctttgttgggaaaatagggatgacagttacttcttaatgaaaactcccttattggtcgtgtttataaggcaagatactaccctcactgttcattctgaatgcatctttgggtaataacccaagctatatatgaaggagtatctttgagactcaaagattgatcaaagcaagagcccgagtttgtattggtaatgggttaggtactgaaattctgagttccctttggttgcctcatgactctagtccgtttgttttatcaacacatcctgggttgagttcataaaaggttcaaaatttaatgaaagtttctcaaagggtgtggtatgatctttttgaggatagggatggtgaccttattttaagtataccattaagttattctgttgaggaagatacatggtattggaagaaatatacagctcgtttttatactatgaaaagcgcttaccaatttttacaagagctagaaggtgcttggagttctaacatggaggatatggcctggaagactctttggaagattaaagttcccccaaaagttctccacctcattttgaaggcactttctaactgtcttcctacacgtatacagttatattcaaggggtgatttcaatattatatctaaaattgattttatttataaaaatacctttaagaaaattatttgcacaaataccgttgtgccacatcagcatatataccgaaatttaaaagaattaccgaaaatagaaaaaaaaaaatggaaaaatcttgtttccagaaattttcgctttttgagagtattgaaaaaaaacaactatttagttgctttttatgtgaataagatatcaattggttactttttcattaaaaaatttattcaaaattgtacacatatataaataataaaataatcattttaatatgtgagaaatatatattttcctgtctccaaaaaatgacgactaatattaaaaaaactttttgtttcttttttttatatatatatttgttggttatattatattattttattgtttaagatactttaaaattatttttttttttctttttctaatgtaactcatatgatgtttagatactattcaatttatttacaagttattttataaatctattaaaatagttttataaaaataagtttatttttatttaatcttgtaatgtctaaatataaaaaaaaaatagtaactatgttgtttgaaacattaaattttattaaaatttaaatatcatttatttatttataaaaaaaaatatatataaaaaactaaaatatttaataaaaaaagaagaagaaagaaaatatttgacaaatttattatcattattaaaaaaaaataataactttactatatatgcatggttgagtcacataaaaataaaaaaataaaaaattagcaaaaagaaaaaaaaaatacgtgtagggttaaaagaaagtcactagtatatgagttagtaattagttttttataatatttaaaagatttataaatatatatatttatagctcaggaaattgttaaaaaaaaatattatgacaaaataatagtttttttttttacacacataaaaagaggaacaagacaaataaaaatataggtatgcttaatattattgtagtgtaaataacatttgcggtatatgttagactataatgtagtgtatgtaatatagcatatacaa

SEQ ID NO: 118931 - DNA, 2917 bp, Cannabis sativa
tcatgatgcctacaccactaaatcccaatctttcgaatgttgccccaccctccactagacccacatttgacatttcattaaggccctctgctttcacttcgtattcgactgactctctcgtagtggctgatagccaagctattcctatgaccactatgtcccctggcctatcttcccctgaggttgttatccatgctagtcaaatgatactatatcccctgcccctgctgatagctctaatatgggcattaacctctttcagggtcaacctaatcctaatgttcatgggaagggtttggcttctgcttctggtgttaagaggccttccttctagcctcaccatgctctggttggaagctctgtgaggtctcaacttaaacgtgcttgctctggtgaaaaggaagatgatgacactactaatctggaataggtgggtgatgctttgcacactcgcccataaaaatgagtttgttaagctggaatgcacgtggattggggagtacgcgtgcattcaggaggctctcccttttggtgaaagaacactgccttgatgtgatttttttttatggaaactcagctgcctgtgaaggctatagatagagttagagttgctttgggttttgataatggtgtggagatccctaagaagcattttgggggttgggggatctttttcttttgtggaaagcaactgtttatgtaaatattttatctttttctagtagtcatatagattgtaatataagttttaaggataatgaaatgtttcattttactggcttttatggttgtcctcttcataccgatatgttacttggaacttattggataaaagcttttataactctcctaatctcccttagcttatcatgggagactttaacagttttttggcttttgatgataaaattggtagtaattattagaatcttaatgatatggaacaatttgctcaattcctccataaattttgtctttctcctcttagctttgagggtgataaatacacttggcataatagttctgagtgtgaacgtcttgattgggctattggttctgacccctggaggactttatatcctaatgctatgatgtatcatctgtctttttatggttcggaccatcgatcccttaaagttgtccttcataataatattgattttaataggattcctgtttttaaaaaggtgttttcattttgaaaatatttggcttgaaaatcccagttttgacactactgttcaggattcttggctgaattcttcacatacttctgttgattaggatgctcttggtcgttttctctttcgtcaaaattcttttgtctctgctttgaaatcttggaataaatctgttaagcctgttttccattctcaaatccaggatctcaaaaaaatgatagttaggattcaatatttggcttctgattgtagagagtttagtattcatcttaagtatcttcaatctcagcttgatgctcttctttacaaagaagaagtttattggaggcaacgggctagagtaagttggcttaagactggggataaaaataccaatttttttcataggtttgcctcccataggaaaaagaataatacatcaagtaatttaaaagatgatgttggtaatatcaccagtgatcctgaggctatgtttgacataatcttctcttttttttcaactcttttttgttctgaagattatgatgctaaggctactagtcaaattttaggctgcttagggcccccctagaggagcctgaaattgattttttggctcagcctttcacacctcaggaagtgaagaaggctatttttagcctttttggtaataaagctcctggtctggacgacctgaatgcttttttctaccagaagaattgggatacctttggtcaagatttcattcatgttattttagattgtttaaagaatcagattgatttctctaatattaatactattctgattgttttaattcctaagaaacaacatgctaatactatgaaggattttaggcctattagtttgtgttctacaatatataaagttatttctaaggtcattgccaatcgtcttaaagtggttcttgatgaaattatctctccatttcaaagtacttttgtttctacgcgaattatttttgataatattattattgcccaagaacttgttcatgctattaactctcgaaaaactggaaagaggggtgggctgctttaaagcttgatatggctaaagcttttgatcgtgttgaatgaaattttttggagagtatcatgttccattttaactttcccattagtttttttactctgattatgaaatgtatttctactactactgtctcatttcttgtcaatggtgttgttaaaggttctcttaagccttctaggggtctcaggcaaggggatcctttatccccttatctttttattctaagtgctgaatgattgtcatgcctccttagagtccggcaaggtactcaactccttaaaggaatctctgtttctaggcatgctccttccatatctcatttgttttttgcaaatgacagccttcttttttgctttgctgacagaagttcttgtttagcgcttcaagaggtgtttcatatctcttctagggctttaggtcaagctattaaattctccaaatcctcaatcctcttttctccgaatactgtgtagaagattcataatattttttttaacacttttcatttagaagataggccttttggttgtaagtatttaggtctcccttaatgtctttctcggtctaaatatcactgctttacttttctttgtgataaagttgttgggttttataccctaagtaaaactccatttcaatataatctttattatttaaatatcaataaagaaacagaatattttcatcacttattgtgtcat

SEQ ID NO: 118932 - DNA, 794 bp, Cannabis sativa
ttttaactttaacatgaattattacattttgacttaactatcaggtttttaactttttttcttgcccgtcggtcattcttgggcttacgcgtgatttggttaaaatatgtagtgttgttactgcaattagatttttactactccaattagtcttttctttataatataattttgagtgtttttaatttaagttaatactattagtcttgtttctataatataattttattttgttttatgatccttattggttagtcctttgattcttctatgacttgtcatcgaatcgatgttagtagtacggaataacaagttctttgtagctgatagagttactaccttgcacaataattgagtgctcaagctaagggattgtgtgaacctgttgcaacagtttctattgttgtatctcctgaacggtggaagaatccgaatataggtgttcttaaggttaactgagatgttgcaaactttttcatcagattttattttaatttcttttgccaaacgatctgggaatcaggcagccgattggttggctttttttttttttttgaaaaatttatataataggccaaaaatttgaaaaattacaaaagtaccctttcacgaaaaaatcttcatctttactttttgaacttttttatttacaaaaatatctcttcagtaaaaataataataataaaaccatatagagatgagagagatacctctgagtttgaatatgttgtggccttcgacaagagagagagagagagagaagaaatgctattttagatgactattttgtattt

SEQ ID NO: 118933 - DNA, 1752 bp, Cannabis sativa
atatgaaagtaaaaattaaaacaagtaaataaagtggtataccatgtaatttcctccaaaagatatgtcatggtacaaagtaactatacctcacacttaagctaatattccattcttttaattttatattttttttctttcttttcttcatgatatatcatattacatactaacgatatacattagaacaatataaatataccacaaacttaaactaatattctatcaagactttttaattttttaatcttttcacaatatataccatagcaaacaaaatccatataccacaaacataaatagatatttcatagtaaaaaactaatataccacaaatttaccatagtaaaaaaaaaatatactaaaaacttaataattttctacgttctttttctctttcttttacgataaaccatagcaaataaattaatataccacaaacttaaaataatatacctctttttagtttttttttttctaaatatatggtagtacataataaagatgcactatagtgcaaattaaatatatcaaaaacttaaattaatatttcattctttggattttttttctttctttcattcaagatataccatatcacatacaattgatatacattagagtaatatgaatatactacacagtaaagattattattacagtaaaaattatttttttgggtaagaaaattttctcttactgtttctctatacctttctcagttcactatgttaaattagtgacctcaagcacacataaaaaactgaacatggaacatagtgattcaaccatcttaccaacatgtaattatagtctttactgtgatatgttatatcttgaatgaaagaaagaaaaaaattgaactgagttgtgcagaggagctacggtggtaataaccaacgagggagtggaggctagactggaagcgagagatggagattgaactctgttggcaccaagagaagagggaggcgataatttggagatgagagaatgagaaggataaaaagctagggtaaaacttaggataaaacttttaaggttatagttgtaaatttattgtcaaatttttgacagttaggccattttgttaaatatttgaaaaggcagacatttactaacttaattttgagatttatggtcattttacatctcagcccttaagataaacctgatgatgtatatcaatgtagcttgggatgtatgagatgaataaagaatttgggtctttttgagcccatttgctttctatgaagtccacgcccaagagcattgctctatttgtatatgggttgagatgtaaaatagtctttaatttggaaactaagttagtaaatgtctcttttttttttaaaaaaaaataagaaaatggccaaatataataaattagctaataagaattataaaaatacatttatcacatatcttttttttttaaaaaatatttataacaataagattaagttatataatttttttagtattgcatgttattatattgtaacaaaaatgaataaatatattagatcattaaatattgttatcccaattttttcactctgacgtggcatcacacgatcgtgacacgtggaatcgactcttggtacctgctcgcaagacacaggccgaacaaggcaactcacacatttgctcggatgaagtcctctagaccgagcagtgagaaatctgcgcagcacgccaacacttaacgaattcagctttcgcttagtgagtcatcagagaaatccctat

SEQ ID NO: 118934 - DNA, 1346 bp, Cannabis sativa
aaaaaaaaaacagtataaatgttgcaatttccgtgcaacagtaaaaaaagttataaattgggaaaaaacagtatagggtgtaaatttccctatgtttttgtttagattctaataatctaaaatctgagtcgtatatgtaccttgtttaagacaataacaaagtttgtactgacaaaatcaaagaaaaattacagttttataaacattaaatttatatcacttatgaatttaaaattattttaggtgcaaaatatcattaatcaatacataaacacttttcacttagtgttgtgattcataaactttttaagtatttcatattcacacattgccactcattttattattgattatgtttttttaatttatttaacaaaagtttctcttttttttttatgttgtgataagttcatcccacttatttcaatcttcaaaaagagatatcaaaagtgaagaaaatctatgtgtaatattgcaaaaattattaatatactttattaaatatggaagtttactttggattatactgtaatgtagttgaatatttaaatattaattatatgtgtgattaattatttaaattaaaaatttatttaattaatttatatctgtttagatattacattatatatgtgtgatataattattaattaataacaaatgtagaattgttcaagcaaaaagtcatttcgggtgaaaatattagagagaggtatcttagaattgtgaggattaattaaagagtttagtgtgtttagggggctaattagtcttatgatcattttaatcaagtgggttaaattagtactcattgagattaaatttagggttagtggcttagttgacacttagccatttaattatccttctcatagccttatattattttcaataccatttaattaattaatcaattaagtcaaaagtcaaaactcacatcctctcttctagcaaccctacaccaccgccatcatttattttcattttcatctattaaagataaagttggacttgaattcttgaaggtttagaagggatttctcttttattagagtagaactcagagttgaattggattgaattatgctaaaagtaataatatgtttagttttagaatagattaaattattttctttcgagaacagttttaggttcagtctcaataaaaaaataaaacagagcacctaacaatatatcttcacataccaagaattacaagatcacctcttttattctgaggtaacggaaggatcgtaccattcaaacttttacttttatctgttatattatttttaatataataatatgtagattaaaatgtggtaatatataatattatgtgaata

SEQ ID NO: 118935 - DNA, 3395 bp, Cannabis sativa
  modified_base (33)..(60): a, c, t, g, unknown or other
  modified_base (3203)..(3204): a, c, t, g, unknown or other
ataaacctcggtgattagcaacgagctgcacannnnnnnnnnnnnnnnnnnnnnnnnnnnaagatagttagggtgttacatagtatgtctctgcatatgagagacaataactctagggaaagagaataaaagataacgaataacaaagattaaatctgaaaaggaagtcaaatcaaaagatattgtagataatgcagtagaaactcgtaaggcatcatttcaacggttcttatgggaatttgtaattgacttgcccagttgatgatatgaaaaagagcctttgcttctatctcgtctgaccgaaaacaaccttgaactagtttggataaggcaatgacatctcaattatgatcacgaataattgctctaatgcccaaagtttcggtagacatattgaccgatgcatctacatttagtttgatgccattgagatcaggttttcatggaactccttacgtcggcttggagtgatgacttgttttaactggaacagccatggcaatagttgttttagcacggtcactactacaaaaatgggttttctcgatgtttttaaacagccatttaaagtattctcatcggtttctgtaaccgtcgcctattcgaccgtcgtaaatcgggcataataggcgacggttcaaagccatcgctaatgtgggtttcctaacgatttaaaaccgttgcctataactgggtataggcgacagtttagaactgtgcctaatactataggtgacggtttaattcatattgtgcatctccaatcatttctggaatgtgatgatcctcatagtctaaattaaacaccctaaacattgttagacttagacgttacctcgcccggaactctattcttttccccgtggtaaactcaaaccttataactcgggtctattccgttcctaaataaatgctcctttatcctagaaatgtccatacgctccatgttaacacatttaagacaaggacaaagaattaatttaggatttttggtattcttctgacaaaggtccaagaaatggtcaacaacttcactgtacttcgctgataatcgattcgcactcatccaatttctatccattcaaaacttctaaaaaaaactttattcatttatttgtttaaatatgtgtagtaaatattcagttaaattaattaccacacacatatatattttattgaattttatgcattttagtaaaatttatcctaattctagtaaaatttcagcaacataacgactgtaatcagacatttttgaaaattaaaaacatgaaaaaaaaataactaataaacacataaaacaatacaataataacaaaataaaattaataatataaaattatccacccatccgaccgaagtacatgcattagcagaacctactacagtacggatgaatatttaagatattcaaactcttttaacatgcatatatattccactcatccgacgacaatacaattaatcgcagaacctatttcactaaggatggatatctaacatattcaaactccaataaacaaagaattataaagttaaaagttatacctttctccaataaagatagctacaattgtgcaatcttcattcaacacacagaactcaaaacctacaaataaatacaatacacaaaattatcaattgataataattaaatgattaaataaaactaattaaacttaaacttaatgcataaaaaatagttaaatttttcactaagtttttattttacctaataataatttataattataactaaactaattaaataaataatatttttacctatatcaaaaacttctctattcaaaaaaaatttgtccaaatattttttacatacacactaaatcttttacaacaacacctaattttataacacattacatttttaaaacacataagtttccacacattaaatttagacaataacaactaactttaaattaaaaaattaacgttttttcctaaatatttttacaaataaatatatacattcagctttaaaaaaattatatatataaataaataaatatataactatataaatttagattataaataaataaataaataaatattaattacgaacccgcggcggtggtagtggtttgctctgacgttgacattgtggtggtgcttcaacgtcaacgttgtggtgggtggtgcggtggagctcgagcaagagagagagagagagggaggatggatgtgcgtggtggtgctcacgcaaaagagagagagagaggggacggatgcacagtccttcgtgcggtggtgccgtcgttgacggagaggcagggtcgtcgtcgatggagaggaaggagcaggttgcgaaatggtatagagagtgttatacccaaattcggctgccatctcagtggaggacacgtgtcaagataaggagaatatgggaatatagatcgatgcaatcactttatatggaataactcattaattatgtgagtatcaaagtatatttgtaacctgcagacggtaaggtcttaggcgatgaatcaatatagaaactggtgcttagtatattagcgagaaaccatatgttgctgaatgcgaatagcgaggcatcaaggacagttcacgtacgaagacgaaagcgacatatatcaattgcaaaagccctcagtgtacaaactaagtgttatagttggatcggctcgagaccaagtaagcgaggtgcccatctccctatgggaagactttctataacttcatcacgattaacatcaacgaggcttacgaccctgtcaagtcaaaagctaatattcaaatgatcttcaaagaactctctataaataagaaccgcgatcgacacaagacatgcattgtcgacctcagaaggaaaaatagccccagcttgctattgagatcactgcaaccaagcttctgtcggagacaactccagatacaataattaaagacatgtttaattcacaatcattttgaccaagtaaaagcgggaaaatcgtagctatatgattttcaaatcataaccacgtttacattacgtgatatgtaatcaaatcccatgattttagggatgattgttgtaaacatattacagtcaactttgtaattaatttccgactatgtaattataaatagtggcaagtaagatgaaaagggggacgaaaaaaactcatacaagaggaaccctgaaaagcaatcagaaatctgaataagattgnntcgtggactatgcagaattttaacagcaaaaccacgtaaaaaaccctgtgttcatactttaatttttatagattttatttttctatgtgaaatcactactttgaggctcaaactgttgggatatgttttaccaggatctagatttactatcatgtatgttatttaacatcctaaatatgaatttctagaac

SEQ ID NO: 118936 - DNA, 1127 bp, Cannabis sativa
gagagagagagagagggagagatgggacgatgtttggtgttttatttgtttaggggtaaaattaaatgaaaaagtggtgtaagtattttgcatgatgcaaaatatgctagcatgtttttagtggataattttattttaagcatataatcaaattttccattatatttacatatttagtatttaaatttttgttatattttctatctattttggtttagaatcaaaataatgggtagaaattttatttgttgttttttttttttttcttttctcttatggaattgttgttgtcatccagtgttttgtactgcttttatggttggatataaatctaaattttaaaaagaaactatgacctttttaacaaaaaaaaaaaaaaagaaacatatgaaaagcctggaggctatatgcttggtatccgtctaaatttcgtgaaacccgtccagttaaaactcggacccaaacctggtaaaatctggtactatgtcggacccaacctgaacccgataaaattatagttccaagtattgattgatgctagttgtatttagaaatattcacattagatatcaaattttaatcaaaactattacaagtatattttatatatttaaatgaaatttggatttttttttatctgccacaaaaatgtagttttcttttcctttactttgtttttcccactccaattgaaggcaacgtaaataagagaccacgttgcatggtaagcatttgaatacgtggacggtcctgccttaaaaccaagtaaagtaaggatgtttatccttctcaaatgtcacttcccatttagctggactttatcatcatataaaaattcttctgtgtcacatgcaaataatttgatatgttattgtgaaaacaaattatagcacgatccacattaccttattttgattggaatttccaatttagattattagttgcaagaaagtgaccaaatgataataccactttccaaaactagaaagattcattttcaaccacaaccaaattcaaatcaagaaacatataacaccgatcgaagaaagagaggggtcataataacagtgccctctcactacactaaactacacacccatcaattcattgttcaaaaaaaaaaaaaa

SEQ ID NO: 118937 - DNA, 567 bp, Cannabis sativa
taaaaataaaaaaaaaaactccataaaaaaattagttctagaaatattgggtgagtgaaatttcatacctagtttttacacaatcttataaattacccaaataaaagagttatcataattatcctaaatcaaagctaaaatattaattattaaataaattaaaaattttaagcaaaattaagacaactaatgcaaaaggtaattaatgtcaaatacaataactcttaacaaagttgtatagaataatgtaatttatgggtgtccataaaattagccaccaacaacgcaccacacaacataaaaaattatagtttaaaattatttgttgtgcggttggtattttttcaaaacaatacagtttggtgcagtgtgcgaatttgaattcgaaaaaaataattcaaactacaccgcactattataattatttttaaattaatatgttactattgttacatattatatgattcattcatatcctactcgtatagttattatataattttatgtatacacatataaatgtgattgatttttttttttttttaatgaaatatcaacttcattaaa

SEQ ID NO: 118938 - DNA, 994 bp, Cannabis sativa
  modified_base (232)..(240): a, c, t, g, unknown or other
taaatatcggatctcatatatatgatttaacgtaataatttttaaagtaatttgcagtataaatatctaaatttattaacttctggttataaagaaatacttaagttcaatttttagtggttaagttataatttttgaacttctgtaagtatctgatcgacttaagtgtaagtaaattgttacgtgataatctctgattgtttcagattattaatttttttttatttaaaannnnnnnnnaatataccaataagaaaataatactagaataatgacttgaaattaacgactaggtatatacctacaaaagttctaaaaatataatttaagtatttttactgtaaaaaattaaacttaagtatttatcttcaaacgaaaattaaacgtaaattactccaacttttaaagaatattactaatcgtaggacactatctttaagtggtatagtactagtgtctaataacaatacttatatatatatttatagggatgaaaatgttgaagcaaaagagaagatttttgattatgatgatgatgatgattgtaagttataagacatgactgttttctcagtttgttaacttatcttactattttttggtttctttgctttgttaatttgagtaatactagaaaaaggttttggtctttgaagagaaagattttggttatttttcttttctttttttcaaattttttattattattaattattttgccttaaaagggtgaagcaaggtcatgtcttgtgatctactctgcaaaatattaactttgtattgataatatctatttttattgtttagaaaattttcaagtatttaaaattattaaataaaatagaataaatgattttaattattaatttatatattgaatgacagttgctatagctccgtgaccagaatacccttatggaaacttatttcattgttttactttttcttcttcttcttctcacctaattaaattttaaaacctttattttctgac

SEQ ID NO: 118939 - DNA, 2321 bp, Cannabis sativa
gtggtggtggtggtggatttggctttggttggcccaaaagaaatggctctaattcaaaggtaagaaatttcatgtgtttttgataataaggaaatgttacattatgttctgtggtttttatttttttaaacatattgagtaggataataggattttgcttaactgagcttactttaagttttcatgacttgtgtgaaattcttaactgtgtgctactgtatgaacacaagtttaacttctaacatgttaattaagcataaattgtgaatttttatgtataattggtagagagaacttgagttttgtatgtaaacttgttataggctttactagtatatattaactagttctcacgtgatttgtgagaacttcttaactgtatgcaactgtatgatcacatttttagattccaacatgttgagttaagtgccataaagtgtgaatttttagaaattttagattctaacatattggccaaagttttttaactaattatacaaattttaagaaaaataatatatatgttgatgttcaaaatgttcttttggttagtataagttgtcgataagatataatatattgtacaatgttatatacatattgtcttagatagaaagattgattttttttttttttgttttgaggtagctatttaaattctcaatatagtatttaagcatatttacttttcttaggaaaaatacactcacaacatgaacactaagcttgtattgtcaaattatcgatctctttaatttttttttttacaattctaaatattttgttaaaaaattttgtgagatttaattaatatttatgtcctatatatatgtatagatcaatttgtagtgagtgattctcttttttgttattggaatttgaatgatagtggcacaatattatattgtttatggttggctcaaactttatcttttataattatataggtatgtcttattattgataatttgggtttaattttttgtttgtaggaaaaattaataagtttgaagaaataagttaatactccaaaaaacttattaccgaaggaagaatttgttgagatgccattttacttattacttttagtttggatatttgttagtattttggtgtctagctagctataattaaagagattcttaaattatttgttgtatttaataaaaaaactgtttagattatttattgttatatttttgataataagctatgtatatgtacactatatattataaatttttatttattcatttataattatatttattttactaataaatttttatttatacttgattcgtttgatgattatgattatgatataaacgaatatattataaaaatttaagattattcaaattttaaaatgataaaaaaataggttattagactataggtgacggtttaaaaccgtcgcctataaaaggtaataggcggcgatttataattgtgcctaatactataggcgacagttttaaaccatcgcctataccttattataggggacgattttaaaaccgtcgccaatttttcccattttatgacggtcgaatagacaacggttatagaaaccgacaggaatactttatccgactgtttaaaactgtcgggaaaatccctttttgtagtagtgaaaagtggtcagccgacagcggggtcgtatgaatctgatgttttccatgtgttacataattatagtcaaaaagttaagaacacacacaatttttatggaggttttgcctacttttgatagcgggtaatgacctactccccgtttaattgtattgatatcgagggttaatactattcagatcactataggtgggatttgatatagcacctttaaggatacaaagtaagaactgaggttggaaaatctcaagcgttgagaatgcttgtatgggcaagtgagcgagagtgaggaagagagtatcagacttaggcttagaactatatcacttggaggttagtatcaagcttagagacataggttttctagttttgagttaagacctttatataggaagcctaaaaccctcattttgcaacttgaaaccctagatatttgtatattgaattagttaactacaaaataccaaaatgccttagaacatagatattttctagctattttgttgggcttttagggcccaattagcagtccacgtatagagttgtacaaaaaatcctattaggccttctcttggctggccagacagctacagtgagcaggcaagccaaccttggtgctctccagaggctggcaggccatagagccagccaggggtggccgaccaacttttgtgaggaagttggtc

SEQ ID NO: 118940 - DNA, 1235 bp, Cannabis sativa
  modified_base (526)..(529): a, c, t, g, unknown or other
cccctcgctacaatgtgggtccgcctatgcaacctattatatacaagtcaatactataaagatagtattgtattaaataatactaatacaacacaatataatacaaaataacttacaacacaatacaatatataatacaatagtataaataacagttatatactgatagaaacaactaattttgtagtagtgtaattatataaatattgtcttgtatgtttcatatattcatatctcactacaaaaaaatattatctttagtgacaactttttagtcacaacaaaaaaaattgtgattaaatgtgatttttagtcataacaaaaaagttatttgtgactaaacatagtatttagttacaagttgtaactaatttagttttaatcacaataagttttgttactaaaaacacatttagtcactataaattgtaatttttgtgactataattttagctacggatgttttaatcacaacgtaggaataacaatttataattagttataatttttttacttttaatcacannnnttattgtgactaaaagtaaaatttgttataatgtcttttattttatgatcattatttttaaactttaaaatatatatgaagggtcatcgtatatgcttgggagagcattaacatctgttttctggggatacgtggccgatcgctatggcagaaaaccagtcatcataataggaactttcacagtgttagtaacttaattatttcattctaatactaattcatctcaaagcttataaattattaattatttgttttacaatgacagcttgtttctctatttatctcagggttattttcaacaccctgtttggacttagtctaaacttttggatggccatagctacacggtttcttcttggatgttttaatggtttgttagggccaataaaggtacaccataaagatgtaattatatataataatttttagattgggtataattgggctaaccaactacctaacccaatggctaaaaaacctcttaaaaattacatatttttaataattttaaaaaatactacatgtttttcataatataatctcaaaaatattttttctttattattttttctatagcccaataaatttaaaggtctcttttaggagatgtcactaaaaacaaaacttctaagtgcatgagacaacactggtgtgttatataaattaacaattaacccaagatctatttgtatataacatagaacac

SEQ ID NO: 118941 - DNA, 2015 bp, Cannabis sativa
  modified_base (1353)..(1353): a, c, t, g, unknown or other
agatacgatgtgatgtttggatatcgcatagccaaataaaaataattaaaaaagtgtttggcccatatatatttattttgaattgcaatgtgcagttgaaattaaattcatcgaccactctctagccataactaatttatatataataaataattgaaaaaaagtactatataaacacactatatagaaacaaataatataaacattagcttaaatttagtacaaggtagaaaattaagaaagcaataaattagtggcaacttcatcaatggccggaaatgtaatggaagatgaagaaaatgtgtacactggctctggcagaagagttcaacctttctccacagaaaggtaccacaaacttatattatatgttatatatatactaaagtagccaataatatatatgtatttatttacattttattatatgatgatcttctaacagaggagaagagtcatggattaatgttgatgaggaaagtaagaagcagtccaactctaccacccttagtggtctattgggtttaaacgagttagtctccttggaggtcagttctagttttgtttttttaaaatataataaaatggttatggtgattaatttaagctaccatcttattcgccttgtgtcttaaatcataacaaggacgtttttttaaagaattgcattcggaccctttttcttctttattttgttagacatgagggaacaagtgagggaattgttccataacaattaaaaaataagttttatgtttaattaattaaaaatcaagaagaaattagtccattcaagaaaaagggagtagaaagtggaaaatcttattaacattatattatttattgatacatttagcacgatttttttaaaaaaaaaaaaattgtattttatgatgaaggtaattaattacaaatatacaataactgagttttttttaatagatattcacaaacatataaaagtttttttacaaacttatggaaatttatgtagttaactctatgtagacctacatatttattctggtatattgttaaaaataaaattcaaataattatttatcacgtaaaaaaattgtacgtgcaataaaatatttaaatattatttttagcattgtaaactacttataatttttctaaaaatttacaggcaatcttaactataacatgcacgattattaaaaatattggactaaaaaagaatttttacaccacatactgaaatttctaactttcttttttatcgtggggcggaattttttcaaaaatatcgtgtaagttttatactgtgtactgtgttaagttttcacgattgttccacggttgtgttttagttgttccactgttgttttnattgttctgttttattattttacgattgttttataaaaagaaaatattttagtaaaaaagttttatgtgacagtaaaattgtaaatttttgtctaaaattcagtatttttataaaaacccactaaaaaactcttttggatgccgaaatagatcggcggtctagtgaatcactcttttaagaggtgtactatagacttacccaaaacttatagaagttataagagttgtacttttgtaaactcataaaagttatcatatttttaatatattcttttaaattttggtattttagaaaattatataaagttactttttgttgtttttttttatttacaaaaatatggtagttttatattttattttatttttaaaatataaataacctcacatttaaaaaatattatttctaagtgaaatatatttataattgtataactttttgagaagaaaaaaaaactattattttcataattttaatttttatagtttatataatagagttttgggggctaaactcttccaactgcctttttatttgtactcaatcctccaagttcaaattttggcagaaaactctccaaactactgaactggtagcaaatttaaggtgtcatccggttaagtgtcactatgaactacttatgtatatattcttgtacact

SEQ ID NO: 118942 - DNA, 825 bp, Cannabis sativa
ttttggaattagacaaatgaaggtagtgttcagtttcgggtgcatataaccagtggaaaaaaattcttttaccgttatacaaagacttggtcccactaactcccaatatatgcgatagaaaactcccgagaacccatctggccccgaggcttttagggggtgtaaactgaaaaccgcttctctaatttctgcctctgaaggagaagcagcaaagcattcattcgactgtgagtcaattctggtattaaacagatcatcaaaatccccattgatcataagattggaggaagagaaaagctcctggaagtgcagattaatgatctccgcgatgtgttttttgtccttccacactctaccttctttatccttaattgaccaaatactatttcttctcttccttatgactgttgcagtgtgaaaaaatcttgtgtttttatcccccaaagaaagccaagtctcccttgatttttgtctccacatgctctctagttttggccatgaatctgaaatcagagcatgaattcgggcttcctcttctttgagcaaatcagaaataggttgattttggatccattgtaatctgcactctagatcttttatttctccttcattcaaactcttgtgtttcttcttccaaacctggatcgcctttcttgacttatcaatatttctaataaaagacacagtgtcattaccacttgaagaccaagccaaggcaacttcccgcttacacgagtcctcccatgaccaggcctcgaaaaaacggaatggaataaatcctctggaagcaaaaagatgagtatcaaggatgattggggcatgatc

SEQ ID NO: 118943 - DNA, 511 bp, Cannabis sativa
ctagttgtggcagcgagagcatgatattcagcttttaccaaacttttggagatggttggatgtaaaatctagtggtggaacgtcttgtaatgtaggagacccaattagaatttgaaaaacctctcagatgagttgatgaagaggctaaatataggagcccttggccaagactactttctaagtatagtagaagatgatgaacttcctgtatgtgtgttgtcctaggggttcaacataaattgacttagacaattaacaacaaagatgatgtcaggtcgtgtaataccctaaagtttaataactagattagcaaccctaactaagttaattaagtgttaatgagaaattatattatgatatgatttaatatgtagaattattgtgatttattgtattttaagaccccgttggtatgttagaggctttttgtaattttggcccgagaagggtaaaatcataattttataatatattgtgtttatggactttattattatatagtatgtttatt

SEQ ID NO: 118944 - DNA, 4201 bp, Cannabis sativa
  modified_base (459)..(463): a, c, t, g, unknown or other
  modified_base (2569)..(2572): a, c, t, g, unknown or other
aggtcttcttttccagttgattttgccggaattaatggttgtatttccttcgttttagtttcattttggttgttttgctattttgtcacgatcgagatatgttcatcttcatcgttcgctccgtgcagctgaaggtttagtgcatgtagtatttttgtaaatatttatatgtggactgtataaatgtttataatgggccagcccatagtatttttgtaactttttttcttttttgtatttttttgattttttccctaaaatttttgtcattaaatataatttttaatcacaccaaaaaactacttgtgacgaacacataatatttagatacaaattgttactaatttaattttaatttgattacacaaaaaaactacttgtgactaaaacatagtatttaaatacaagttgacacgaatttatttttagttacaataaatattgtgactaaaaatacannnnntcacaataaattgtgatttttatgtctaataattttaactacggaccttttaatcaaaatataaaaataatgaataattttttcgtacttttagtcacaaattttattgtgactaaaaataagatttttattagtaactactgtatatgaccactatcaacaccactcttttattatttattttattcttattattaaaaaatagtctcttgttgaccactttttaagagatccaagttttaatatttcactcaataaaccatctatttttgaatttttggatgaaaatttttattgattaatacttagagtgtttatataatttcttttttttttttttggataaatgagctaagtgtgtattgagttccaaacattttaattacaatctaacattatccaagtaataaaaaagggtctgaaatcaaactttctaaacaatgacaaattctcaattcattttctatctacaatgatcattttttttggtggcctcatctagattctacttttatttttacatcatcttcataaatccacaacgattctctcactcctaacttcttcaaatcatgtcttgcattagtagtgtccttagatttatcattgtgtccaagattgtgcccaataaactatcacaaacattcttcttaacatgtatggcattgatattgtgttttaaaatgtttgaacaacaatagtcaagctcgtagaagatgcttttttttttcctccaattttgattttctgaaactcacctatgcttcacaccaccaaatagctcatcatttcctgggagggtaggagtttgtttacttgttctaatacttcctcacaagtgaaacgtcttggaggaggtcttctctcaatttgtccgtcaaattgagtatccattctcattcgatggttatttggcaaaaatcttctctcaccaacataagatgtcttaccaatcacttgaattgaagaggtatcttcattaaaagtgggacaagctttgtatttctaatcactccaaccagacaaataactacgagctggaatatcattaactttccacagaagagttgcgcgcagcttgaacacagtgttggttcgactatctctaaaaatttactccgttaacccacaattccttcaactcatccaccaagggtcttaaaaatacatctatgtccatactcgatgatttttcttcaggaagaacaatggtcaacataaaattattatccttcatacataactaacgtgaaagattatagtttgccaaaactacaggccacatactttacgcttggctcatgttgccaaatggattaaagccatcaacaactaaacctagacgaacatttcgaggttcactagcaaaatcaggatgtttgcatcaaagtccgtccacgctgcaccatccacagggtatcgaatcacccgatcatcttttgatttaccagtgtggtgccataccgtgtattttttcgtattccttgaatatagtctcttcaatcgtagaattaacggaaagtaacgcatcaccttatgaggcacattttttgctcctgaattttctaaagttatccatctactactgccacaaactggacatgtatctttatttgcatgttcattgtaaaataaacagaaattatgcttgcacacatgaattgactcatagcccaatactaatttcttcaatcttttcttagtatcatagtagtttgatgaaatttattttgctttggaaaagctagttttaacaacttcagtaattcatcaaatatgttgttaggaatctttcctctaactttcaaatgccataactttaccaaaaagttaaaggaagatatccaatcacaaccagaatacaactcggccttaatctcctaaaataactcgtcgtgccattggtttgcattaggattataatctatttttattgacggttgaaggaagtcatcaaccatcagaatcatctcgtcaacttcatggtcatcatcaacgtcatcatggtcattgactacattagtaacgcttgattctgcttcaccgtgctaagtccacttctcgtaactagtaaaaaaatccccaatcgaatatgtgtgcttttannnnaggtaaagtttgaagcctattattcacacatcgtatacacgagcacctaattctacgatcacaatccttacatttcaaggtcatctctaaaaatgcatttagacccattccaaaattgtggacatctacgatttcgcaatgtggtccaagactagtcgtttgtcatctaaagttttataaagacatataagattttattgtataaagacaaaagtgagtgacacatttttatgatatcgtaagtttaaatgttttatgtcattttatgatattttaaaaaaaatcatgtactattatttatttttaaaaataattattcatcatttaaaaattattatattattaattaattaaatttttttttttacatttaattattacttttcttttttatatatattaaattttatcattcaaaaaaaaattatattattattattctaatattaattacttaattatttataaattattatattattaactaattaaatttattttctattttactttttaagtaattattacttcaaatttgttatatatcaaaatttaattatttcaaaaaaaatatattattatttttaatattaattactcaattatttataaattattatattatttactaattaaatctattttttatatttatttttaagtaattattacttcaaatttgttatatattaaatttttataattttaaaaaaatatattattatttttaatattaagtatttataaattattatattattaattaattaaatttattttttaaaaaattattatttataattttttttctatgttaaatttttactatttaaatataaaaatattatataattattaacatagaaatactttctttttaatttttatatagataaaaatcatttctatatatatttacaattatataattattcttaaataatattttgattataattaacttttttcagtaattaatacatttttattctaatttttcactaaaattttaaaaaattaattacataatcaattattaaacaaatttataattttttacctatttgtaaaaaattttaaaaaattaatagcataacatttgtaacaaaattaaataatataaccctataaattatatttattacataatatataaattattacaaataatgaattaaaatctaaaaaatatattaaatttttaagcaatatattatatgtatatagattatgcatatataagtatatagcacatatatacatataatatataaggccgactattccatcccccgtacttctcggagaatggcttccacttgtgattaaaacaaaaagtaaatatatgcatgcaaaactatttgattattttaatatttgaattgaagacttttcataactagaatattattttttatcaaagttgtaaagtaagagttaaactatcctaaacgagataatacatgtgttgtataagtaagatgactatacaaatttattaaaaaataaatgactttgtttttaaaaaaaaaaaataaaatggcttttttgtaaatttggattgaatttgatgagacgagagacagagttcatacaatggtaaaagacaaagttttttttttttttttt

SEQ ID NO: 118945 - DNA, 916 bp, Cannabis sativa
tagaaatagttttgaaaagttagaaatagttattgttcttaatttgttaatctttgtcattactaattacttgattgtttagagtttaatttatttgattttgcacatttagtcgtaattttcccgcaaacataaataaaatatattaaatttagccaaaattagtgtggagtaacatgtgttagaattattataatggactaatacaatcatacgtttaattccataatacacaatcattaactatgtgcctaattttgctaataaccataatgggatggttaacaacttaattatgtgttagaggcacatgagattggttttaacaatgaagaaacccatttcggattcatcattttttgatgtatcattctgtgtttcttgagtaaatgggtattagaaaatgatagaggattaaaaatgggacaaaacgcctcaaacgacgtcgaatttggtggttgaatgtgggagaaatggtcgggtcacgaactgggtctcgtcgacccgagttttagacccacgggcatttttctgggaaaaagagacgagaagaaacgacacgtcgttttcagtcgagaaaatagctcaaaaacgacttgtcgtttttctggtgtcctaaaatcccacaaaaaatgacaagtcgtttttggtgtcctgatccccttaaaacgacacgtcattttttgtctcgaagcccttcaaacgacaagtcgtttcttgtcttcggtctgctacatgtcgttcgaccaaacgacatgtcatatttccaaaacgacatgtcgtatggttccttaaaaaaacaacaacaacaggagcaggggggtgcgtgcaggggtgtttttgggccatttttcaccattttcatgtttttttttaattctctattattttctatatgtacaatactaattgcatg

SEQ ID NO: 118946 - DNA, 1557 bp, Cannabis sativa
tttttaattttttatattttattttttattttataattttatttaattttaaaatgaattttgaaaataattatattcagtgtactaatataaatgtgtcacgtgtacaagagtatacatataagcagtccatggtgacgggtaattagatgacaacttaaatttgctaacggtttagtagtttagagggttttaccgtcaaaatttgagcttagataattagatgtaagagaaacgatagttaagagggtttagcctccaaaaattcttttaaaattaataatgacagcactatttttttttttttttgggagaagtgatagaatacgtttttttttatagaaaaatcaaatttactttttaataaaatttaattcaaatgtacttttgtttttttatgagtattgtagctaaattatcctcacaccttcctataactaagacataatttcaaacataatacatttgtgttctttagagagagatgtgtaggtttgtggaaaagttagggcaaaattttcattagataataatgaagattatcgtgaagtaatagggataaaattagtagaattattaaaaagaaaagaaataaacataataaattttgaaatagaaaataaattaaaagcattaagttaaaagaatatgtaatgtaattttatttggtggcaggagcggagccacacccatgacatgacgagagtggttatggccctccaacatttatgtatctctatattatatatacatatgtaaaataaaaatgaaattataatagaacaaactctattactaatttaaagattttttaccctattgtatagagaatttttttaaaccaattatgaagtagtaattttaagtttcactgtaatacaataaatccaattgtaggaaattattttatttattttattattttaatgaattcttattttactttttttttttttgaagttcttttttaaaaaataaattgtcactacaaaaaaaaaaatgttatttttagagataattttttagtcacaataaaaaaaaaattgtgactaaatatgatttttagttacaataaaatattactttcgactaaacatattattagacacaaattgttactaatttaattttagtcacaacaaatattgtgactaaaaacacatttagtcacaataaattgtaatttttgtgactaatacttttagccacgaattttttagtcataacgtaagaatgataatttataattagtcgcaactttttcacttttagtcacaaatttattgtgactaaaagtaaaatttcttttagtgtgttagagcagagagaagatgaaaaaaaagaaaacaattcttaaatgtgtgcttgtacaatttttttctcatattttgcttttaaatttaaacatttaaatctaaaaaaatatgtaattaattttttgaaaataaaaaatagattattttataaacacccaaaaataacaaaaagttatatgtttacatatctacaattatttttatatttttacagatgttaattttctttttttaaatacgg

SEQ ID NO: 118947 - DNA, 2240 bp, Cannabis sativa
taagatcctggtaaaataaattccaacaaacttgtcataggatttccgaagacattagtttttcatgttacgatgatttgttgatctctttgtatagcaagaaatgggcttatttggcaaagtaaaatctcctgcaaatggggcggtggctactgcgttgtcatactttaataatggaagatttctcacaaaaattctgcaaacacaatggattccagtccttgtgttcgtgtggagcgttggacggttcccaatattgatatgattaaagttagtgtagatgcccctgccacttctaaggctttttatttcgggattggagggttggcctatgatcatcacggagctatcttttatcatcgatccaaacaattgaatggtcgcgtctctcctcttttggcagaggcaattgggttgaaggaagctttgagctagatcaaagaacggggcctagatcaagttgttgttgagtcagattgtaaaagcatcattgatgctctgtatagttcaacttctttattgcctccttttggtttagttacttttgattgtcatactttaatgtctgatcttaacaatatttcttgtgtttttgttaaacgatctatgaacaaggcaatcaattggttggcgactgccgcttgttcttccccagttcgtgggtatggtgggggtttgtccctaatacttttcaagctattttagtggatgatttgttcggtcatgaataagatgcatctctttttgtcaaaaataaaatagaaaattaaatcaataaaataaagggaaatacaatagtattgatgatataatttattgaatcagaatttggtcaactaacagtggagccttatttatgattgacaatcatcacgtgtaaataaggacaataaatagtaaagatgacacatatatttatagaggctcgacttccttatttagcgggtaatgacctactcccatgttagttgtattgattctagagacgataccatgtagatcataagtgaaaaccttataaattatagttatgactctctttgaatgttacaatggtgagaacaatgtgttgcagaccaagaactgataagttcttgtgaaggatttaagaagatatgacttaatgtctaggtggcatggatgaagtatgatacttgagagagatagaggctttcacgtgtaccttaggcctttttatacaagtggggtgacttggaatgacttagggaatgagagagagttaatgccctttatatagtgtagagcttacaaaagatctaattcaagtaggtaaggatatccctttgaaatagggatatttacacctttttatctattatttaagttacaaaaaagaaaactaaatccctagaaaataagactaatatctcgagggcaaatccctatgttcgtgggggtgttgggcctatctcgcaactttgctcaactagtcagagttgtctgcaaaagttggctggccagccctattttttagggcctggccgacctatgcactcctatggtcagccaggtattgttcctgcagcctcgagatgtgcctgccagctttctatgtgcctaccatcttttctatgtgcctaccatcttttctatgtgcttgtcagcctttccatgtgtctgccagtttttccatgtgcctgtcaactttggtatgtgcatgtaagccttggtatgtgcctgccagctttcttagcctctctgtacaactttccttgcaaaggtcaggtctttttggttaaacaaacaattttcggtctaacagtcactctttagcatgctaacttgtgctcaaaaccctagctggccatacaagcttcctctggccaacctatacacttcccttgatcggctagacatggttggttaaggtcttggcggcctgcttaagtcttcttgcttattgtttgatagttttgcttgattgcttcataacccttgacagtttacataatgtataaggtaactttgtcttgttgctaacgagctgcattccacgtgtcctcattgactatgtggacataccacatcaagtggatataatttgaaaaaaaatatataattaattaagatgatttagacattcaagtatatataatatttcataacactgtataatatagggtaaatacaattttagaccctgtattttgtaaaagttactaattggaccatctgttttgttaaatgacaaaataaacactgtattttctaaaattgta

SEQ ID NO: 118948 - DNA, 2377 bp, Cannabis sativa
tcttgagccttcactttgatgttcctgctgtatgtgatatttatctctgctggtgtcaacaaatgcaccttttcaggtgacacaaatccatgatcaagatagtcaaagcttgagagtggtgagtttgagtggtttacctgattttgtgaaggtgctgctgtagaagttgaatctgaggaagcttgagatggtgcgagaacatttgtgttttaagaggtggaactgaagtgcttaaagtgaacattaggaagttgtgaccaagattcattatgaatgacaagtttcttttttggagattgagtattcaagaaaccagactggaaaggggacatgctttcattgaagacaacatttcgagagatataaactctccctattgtatgcaaacattcataacctctatgtgcgtcattgtatcccaaatttacacacctaagtgaatgaatttgaaacttatggttctgctaaggtcttatgcagtgagaacaagcaactccaaaagttttaagtttcttgtaatctagtttcctacaaaaaagagtttcaaaatgtgccttgttgtgtaaaattgatgttgggagtctgttaatcaaatacactaaattttgaaaagcatcaacctagtatttgagtggcatactagcttgagcaagtagagttaaccccatctcgactatatgcctatgcttcctttcacctctctctcattttgggctgaagtgtgaggacatgagtgttgaaagtgaattccattggttcttactaatgtctaaaacacttgatactctccaacccagtcacactatatacttttgattttagtgtcaaattggatttcaacaaaggctttgaaatctataaaagcaatcaatgcattagatttttgttttaatggatatagccaagtgtatctactgaaatcgtccataaagtgtatgtaaaatcttaaatttatgtttgatgcaattggggcaggcccccacaaatcagtgtgtattaactcaagcaccttagaggctctatattaagataatttaagggcaatgcatgtgatttgccaaactgacaagcttcacacaaattttccatttcattctttgaaatttttacgttgtttgactcaatgacaaggttaaggactctagtggacagatagcctagacctctatgccataaatccttcttggaaagatgaaaactggttgtgctaaccacacttgatttagacagactcgatacattagaaaagaactgagattgactttgatttgaagcatgtttgttagaaaactagtagagatcatctctaagcactctttctagcaacaccttctttgtgatgttgtccttcacaaaacaacaatcagggtgaattcaacaaacacaacattatcagatgttaagcttgacacacttagtaattttgttgcaatatcaagaacaagtagcatactatatagtaaaaaggatgtagatagggtatttgtaggtaattttccataaccaaaatgagatatatgtagtttattattaccatcaccaatggtcagattttccttaccaccatactaccatttatgcagcatattgttttcatcaacagtcacaagattgcttgccgcactatccacaaaccatgcatcactgtccacaacttttggtgtaactgtgaaggctgctggtggttggcttgatttttgacttgtttggccaccaagttttggatctgatcccatatagggttcatcgtatctgttgtaatagatagcagcagagtggccataacacccacagacttgacaggttggtttgggtccatttgaacgaccatcacaacctcttccactattgttgccatatccatgattataattgcctcaaccacctcctgtctgattctgatgttgatgatgattcccttgatttgagtaggagctgctacctcgtcatctgttattaggaaaatagcgattggcgagattagcatttagagtagcagaagaatgtgttaatttgttgttgctgttgagactgaggttttgaagcctctccttcttgttataaaatgctatacccttgtagctctttccatgttgttgaggattgagcttcgacttgaagcacaatgggtaggtactcaatatctaaccaagaggtgacattagaaatgagttaattttctggctatggctaaccagctaaggctaaagagtctgacaaagccttcttctactttagatagtcttctattgatgttgaagcttttctagttctttaatcaaggtgcgagtatcatccgtttgagattttgagtgagctccatagagattttcaagagctctctatagagcagcagcagagtcacatcccaccactt

SEQ ID NO: 118949 - DNA, 3398 bp, Cannabis sativa
  modified_base (3334)..(3350): a, c, t, g, unknown or other
ttacgtggactaattaaactgtgccacgtgtacactgtgtacacgtagacattctaaccttgcacttaacaccttaaaatagatagaaagggctaagtgctaacagaacttgggtttaggaggttttaccaccaaaattttagaattggaggttagttgcaaaaacctgaccacttaaagaggttatgccgcaaattactctaattttttctaccaaatgttattttttgacaatgatcaaccttttgacattgttaagaaatatttgaagacaactatgaggattcaccaatggaactccctatgccatcaagaggttgttccaaaagagcaaactcaacaacctcaagaggaagtgctacttaggcaatccgcaagagagaaacaaagtgtaatttaaaattattttattgtgtttcttaaagagtatgagtttgacataaggacaatggaagatgattcagtcaatttttaacaagtcaaacaaagtgttaattgtcaaaagtgaattgatgccatgaatgatgagatgaaatcaatgaaggacaatgacatttaaaatcttgtcaagtcgccaaggattttatactgaagaatggcattaattataaataaacattctctccagtctcatcaaaagattcttttagaataattatgtcacttttagctcatcttgacttagagcaacaccagatgaatgttaagaaagttcctctcattgatgacatagaggaaactatatttatgatgcaactagaaaattttgtgtcaagtgattcaaagtctatggttgtaaactaaagatccatctatgatctcaagaaagcttcccgtcaatggtatcacatttcatcaaatcattgtctcatatggatttaaagttaacgttgttgacaattgtgtatattacaagttcagtgggagtgaaataatctaactcctgttgcaaaaggagacacgtttagtctcaactattgccccaagaaaaaaatttaaagagtaaatatgcaagaagatcccttatgcttcgtttattggaagctttatgtatgcttaggtatgtgcgcatacaattttggcatacatagtaactatgttagacagatattgaagtgaccccagtatggatcatttgaaggcagccaaatgggtcatgaggtacttataaagaacaaataatcatatgctcacttgtcagatgtttgaaaatttggagatcatcaggtattctgactctgatgttgtgggttgccaagaaactaagagatccacttctggctatgtctacttattgtctggaggagttatatcatgagaaagtgctaagcagacactcatagcccatcctatcatgggaacagaattcatagcttgttatgaggcaaccaataatgcaatatgactgtgaaattttgtcacttggttgaaggttgtgtaaggaattcaaagactactaaaggtatattgtgacaactatcaacaattctatattcaaatgacaatagaagcttatcgaagtctacacacatagacattaaatttctagttgttaatagagagagttcagcgtaagatagtgtctattgagtataaaaggacaaacttattgctagcaggtctactaactaaaggtttgacacacaaggcctttcatgagcatactgctcatatgtgtattgttttatttgatgatgtgcagttttagtgggagtttattttcaatattaattactttgttgattgacactattaccctactttaagtaggttaacttttctgcagaataaagttgacggttttattatctttattgcactgaatgtgttatctctcaatcgtagtttgacataaagtttaaaagactaagaattgatctcactaagaaataaatgactaattggaaataagcatgattaagatcacattatatgtaatttttagttacacatccatacttgatctatgtcattaaatatatttgatatggtgatcattgatgggtccaattatgataaatgtaacgaatgccgctttggtctcgtattattataggagatggaccagaattgtctaaaggagatgttttgagaataattagtaagtttgtgcccacataaggttatcaaatgtaattgttgttggaattaatttgtagaccaagtggaagattaattattgggttatttttaataatctaataatgtgggcttacaaattaagataatttatttgagttaagattctaaattgggctaaataagtgatctaattaaatgaacttaataaacatcttatttggtatgagttttgtaatgtgtaatagccaatagtatacttaattagggtttctaattagtttgctatataaagaacataagggtttggttccatcaattgagtgagaacctatagggagaatattagtctatggaagactatataccaacaatctcatctcgtatataacatcatgaaatcaagtatgtcttctatcttattgattcacagaatactcttgatgatctaacatgagttaaaatttatttttcttttagatctattttctcacaatctgtacataaggtattgtctacgttaacataatgtacacgttatataatttaattgatacacgtaaataaatatttaaaaataaaataatatgtgtttgcagctgctgacactaatatgtgtttgctggaactgaaagttcacttaaagaagaaaagtgttgggattagcactactggttagaatattcacaattggataaattctctcctaacaaaagcaacattggcctagagaacaaagcaataataatcagagagagtgaaaatcaagagtttttgtttgccttaaagctaaaatgtgcttttctcgatcatatgaaagcccaaatgatggtaaggggccatgtgggccgaaggaaggaagatagatattagacaaggcccaaagtggtccattaagaagatatgtctgcatggttgaccaatcaatgcggcgagttattactattaggcactaataaatattgaagcaattcaagtacgatttcataatgctttcaggccataatgttacttcttcttcttcttcttcttcttcttcttcttctgttaggcatgtgataaatgtccaatccattctacttgactttctagttgagttggtttggtactatcctaccctttgttaactaaatcacttttttttttcccattaaattattattatataaaagaatattacaatcaataaatgtcactacaaaaaactgttatttttaaaaataatttttcaatcacaacataatttttttgtgannnnnnnnnnnnnnnnntcacaacaaaatgttacttgtgattaaaatatagtatttagttacaag

SEQ ID NO: 118950 - DNA, 648 bp, Cannabis sativa
aaatttaggttttaaaaaattaaataattattaaatatattgttggactaattaatcaattaaaaaataataaagtagaaaaagtgaaatattttgttttctaaagcttttcataataatatttacataatacattcaatttttattttttaaaattaagacaataaaattaattatctccatattttaacatagatgacgatcgataagagttggatatatttacgggatcgcactgatcctgcttactggagaggtatcttagccttttcaaaaatggctgaacaacacaagggctctgacggtaaaatcagatgtccttgtgtgaaatgtgtcaacaacaaacgacacactccagtggatgtgcgtggacacatattgcgttggggttttcaaactagttacgagcagtgggttttccacggagaagaggaagttaatgtagctgacgtgatagtcgatgagaatgatgtagatgagatgcgtgatgtcatcaatgattcctttactccggcatgtgatgataatacacctagcgttgacggaaatcgtatgggcgagtattacgatgagttgtttaaagatattgaagcagagttgtatccaggttgcaattggatatcgtctctcaacttcttagctaagttg

SEQ ID NO: 118951 - DNA, 600 bp, Cannabis sativa
cacttattgttagcaggggtagtattgtaatttggattgaaaaatttgacttaaacatgtgtaaatataaagtataattttttaatatatcacttaattaaaaatagaatatttatacttttaatatctcacacttctagaaatacctttacatttcaaaaaacatcacgtaccatgatttttatggcaaattatggtggttgcttgctagtctgttgactgtatagttgcatcttttctagatttattagttgtacatctaacattacgtaagatacatatgttaaatgtgatttcatttatttgttgccaggtctccattagaatctgtgtcacattaattgttagaatattttgacaattaatttagaaaatcaaatcaggtaatgaatattaaaatctgaccatatatagaatattacgtaattaattttgtctagattcaatgaatataaaatattcatttattacaaaatcaattatttatttatatccttaaatagaaatattttaatattcgatgttattctttgatcaacctttgataatttctacaagttttgggctcaatagttattcatagactcgactagagttttc

SEQ ID NO: 118952 - DNA, 2244 bp, Cannabis sativa
taaccaaggataatagttaaacctcagttacttggggcataaaggtatagatataactgaacttgaatgaaaaatcttataactaccattaataacgatttttggaaaagtggtgaactttttaaattcacaaacacttaaactaaaaattgtaatggacaaagaatagatttaattatagacacatggtaagcactcaatctgaaaagtgagtattaactccaaaaaagaactagtgagtgaaacatgttacataagggagctcaaagaacaaactcaccatatcagctatttaactaagaaaacttagaaaaatagggtgtataaagtacttgggataatataaccaaggaattaaaacacaacctcgaggaagggacaaaactccgctcgcacatcaataaagagtcagggatataactctactcgcgcataaaaaaaagagtaaggaatataacttcgctcatacatcaatagaacaagaggttttaaatctactcaagtatcaaacttgagtaagagactctaactctagtcaagtgccaagttcgagtaagagaagcaacactactcgaatatctaatgggatgagatatgtaactcagcctatatagcaaggaaagtcacgagtctcaactctgtattttaactccatactggaggtacatagttcaagatggaaggaagttgtgcccaagcataatgcttaaacaattttgacccgcacgaccaaatatgttactcgaagctaacaccaaggccaaacgagagctagaggatcgtcgtcaatgcagttgtcacatcctcagtggtcacgagcataaatctacaaacacaagtggggaaagtgagcatactggcatggaatgaggtaacccaaaaataaataataaatactaaataataaattaaattcacttcatatagtatttaggctagttaattaaaataaattggataaaaactaatttaattgcaaaaaaactagctacaaactaaatttgattaaatcaaattgaaaaattttaattttattaaattaaataggagcaaatctaatttatattaattaagctaattgaatattattaagataaatattttattttttagtagatattttggatatatcatagttccactttaaaaaattagaaacaatagttttattggtgttcttgttatataaaaatgtgtgtgctcaaactcctcaaaggacctctttgatagacagaaaaaaacaagggagtcgattagctccaacaaaggagttgaatgcttctactcctcaccaaaggagctgaatgacactaagggaagccgaatggcacaaaggagccaaatggctctattagctccttaaataaaagcaaaagatatgtttggtcaaaaaagacctaattagcatgattagttttcaaaaataaagaacgaacgtatatatatatatatatatttatataacatatgtattaaaggatttgttttacttttattttggttttatttcctaaatcttaaatagtcacaaattgtttccaagatgcttggaaatattggtggtcttctacatatttattttcggtggtaccaatatttgcgggtatggagtccaaaagtgcaagaattatttttcctacaagtccatcataatattataaaattatgataaacttggggagaaaatgttccctcaaaaaatctaagataattatgcatgaatgtttgttctagatatggaagtctaaccaaaggagcactttggcacattccacctcctaccattcgagcactttgggacattgcacctcctaccaatggagcactttggcacattgtacctcctaccaatggagcactttggcacattgtacctcctactaatagagcaatttggcacattgcacctcccaccaatggagcactttggcacaatgcacctcctaccaatggagtaccttggcacattgcgcctcctaccaatagagcacttaggcacattgcacctcctaccaatggagcacaatgggcatactaagctccttgcttcgtcagttgctaaggcacaaagagctcctcagctaccaaattacctcaaggacctaattggcacgaaccattaagggacccgattggctcccctcgtgtgcccatgacaatctgagtctgctaaatgcgaaagacacgtgctcttaaaaatattctaaaactgtagtcaagaaataataagtgaagagatattta

SEQ ID NO: 118953 - DNA, 2559 bp, Cannabis sativa
ccaccaggttgtggctgccgcggcaagagctttggttgccgcgatgagggcccatgtttcccggtttttgcatttttcttgtttttgccataacttttgattccaaactccgttttggatgttcttgatatcaatggaaatctcgtttcacgctttatgtgttaatctataattggagttcaaattatgtatatgtgtgaaaatgaatttaggattaaccctatttgtaaaattttgggaaagtgtgactaggattacttgtgcttgctcaggaacacccgggcatttagaatctccatatacttgaattaccagataagacagtaactagcacatagagattaacacaatggtgcttatgtatgtatttaagtgtatgctatgtgagaaaccgagataagagttattaccctaaattcaacggttatgttatctagagttattattctagaatttacgtgattatgaatacaatattttatggtatatgttgatataaagaattatgcagttaaaggataattaggttagactcgataattagaactgagataaaccattctaaggccttactgtagatagacgtatgagcgtaacacgtaggtctatggctaatagacaataggtgcagtggcctcaatacttaagtgattttaattgatattcatattgatgtttatactgtcttgcttgaacttggctcacgggtgctctattgtgcaggaaaggataatttagttggtgatcagccatgaggtcgagggcttttgcggtgtattgtacatgctcaggccaagctagaccacgaaggttgggtctaccgggagaaaatgttgtaatctccacttttgtcgcttaggtcgacgtgtactaataacttgtaatattttgaaaattttttacgggatcccaaaataaaatgtgatcttttggatgttttataacgtttgataattacaagttatcatttttatttcgtgtttttaaagtttaatttctactcttagctctagtagattccagtttagcaagattagtatatgtttagccgcagtgcgtggcgtttcttaagttaggatgttacatttttataggttaaatatatgataaaaagatgatatttcctattttttaagggatactaacctattttcaatgtagaccttttgtaagctctaaactatataaagaacagtaggctaaatgtaaggggacctgagttctaagcccctaaagccctagagcactcttgctttctctctaacagaccacctgtagttcattagacactaagtgtgtttcccgtctcactattgaaacattcatagagagccatactagaaattacaaggtaaaagcctatgatctgtgtcgtattatctctcgaatcaacacaacaaaaagggaagtcggtcattactcgctaaacaaaggggtcaaacctttataaatcccttgtcaatttctttatttgattttattatttacatgtggtaattggtaatcctaaataaggctatgctgtcagctgaccaaatgtaaggtcaacatatttgtcatcccaaattttggcaacctgacgtggcatgtccacgtaagccaaagacagagtacatgtgaaatatagccttgccaatagcaagacagggtctccatacaaggtatggcaaaaccatcaagtagaaactgaaaggagtgaagtgagtcatcaaggagttgtaccaacatatttggccagccaagagaagcctataggccggctagagtaagcttgtatggccggccaagatctgggcagaagctggcatgccaaaaagtgacttttagactaagggagcttccgtttgaccaagggaacctaacctctacaagagaacggtgtacaaagctgtcatccacttgtcaaaggctagcctccacatccaaaggtttgcatcctcttggtgaagctgataggaacatgacatgtaggatcctgacaggcacatgacttgcgaggtcctggcaggagcatgggcggccaaatctcaatctacagagcttgcatggtcggcaagaccatatcctgcagtgtatggccaggaaagagtaacctggcaggattttttgtacagcctgttacgtggactgcaacctacatgcgaattgggcccttaatagcctaacaaacttgatggaaaatatctactttcaaggggcaatttaatcttttgtatttaatcaatttaatatgtaaatatctaagatttcagttataaattagggtttaggctttcctatataaatgtgttaactctaacctagaaaacctaagtctgattctagcctccaaatcactctaagtttgaaaccataatctctcttctctctctctctctcttgtacacgcctaaggggctctctcgtcctccctctctcacacgcctctaaggcgatatgtaaagaccgcttagtttaatttggaaattagcagttgatcatgtgtaattatgaaattatttatagctatttaaataattatttatactgttattgttgaattcagaggtgcatttttat

SEQ ID NO: 118954 - DNA, 2502 bp, Cannabis sativa
agagtctctaaatattcgagttgcatccgctcgttcttccaatgttgaggtaagcttttgggctcggcttcacaaagcatcctgtgttggttgcccatcctcacccaacactagttcctccaagtctatgaataaaggtgcctcactgccagtgatgcaactcacatactcactctcattaggccaaggacataacacgaaatacactgtcaactaaaaataaaaataaatatattaatagatgaaaattaacatgaaataaaaataactaaaagcaaagcataaggaacttatatttctagcaaacaatcgtatcacttcatctttgccgagtgtcgtcttcggcttactttaccagttgaccattatgggaaagcgatgcgacatcctcactgcatactcattgcccacctccaagatggcctcgtatgcccaatactataacgctgcagtatagctataagatgcgtactttacctcattctgagtaactcccttctcaattttcttatttattcgtgtcttcacgtctatgaagtctttattacaagttttcatcaactttttaaacaaaatcttcccccatggatactcgtagaagaatggaagattgtcaactattcttatgacaaaagaaagaacgacagtcttctcctcattacaagtgaggacgcccataacaaacaaggtcatccccaacttgaagacatcatcaacttctgtgcaactctcgaaaactctgcacaactgactaaagttgatggaaggatcactgttgaagtactccatgatcaaccggtctaaactctctttctcttcaattttttcttcagtaggtccagacaacaacttcaaaccggccaccaaagtaaactctatcctactgaatctgcatctcttctttgcaaagtaaaaatatacctcgtctggtttgtcaaatttaatcttgtgcaataaaagctagtggatcaatgcccctaaaaagttgagtggatttctcttgaagaattatttgaaaggggattcattcaccctatcccataattgaaattcttcaaattttgccttaatcctcggatagtaataactgtggccacaccaagtgatacgacccatgtaatgctctgagactggaataataaagcgtagtggtcttgtattttgaaaaaaaaaatacaagaaacttaaagttagatattctacaaagcatcaaacctaccatcgtcccccattgtctccatcgtcctccaagaaaaaacaatatagttaaaaacataaatattatcatcggacctaccatcatcccccatcgtccccaggaaaaaaaacataataaaaaacataaatattatcatcgaacctacgattgtcctcaagaaaaaaaaaacagattttttttttgataaatcagcaagatattattactccacaaaaacttttacaatcaaagaccatctttttataaaagacctcaagtatattttctaagtattacaatgtttggtaccattctgtatcatgtagactcactttttttggccaaaatgaatctactctatgtttaatattgttttgaattctctgtacaattgtatcagtattttctacattgttgtttcatatcttgtcatttctcgaatgccaaatgaagtaaactagacttgcaatgactgcagccaagagtttctttttgaacctgcttattttggctctatttatccatcgaagtaactttgccatttctggcgactgtgcaccccatgtcagccaccttttaacctgtattagacattcctgtgaaagaaaaaaaacataattaaaaacaataatattctcatcggacctaccatcgtcccccatcatcctccaagaaaaaacatatacgttatactatcggacatacctatcgtcccatatcggacatctattgtcttataataagaaagaacatgataagggacatcgaaccgaccatcgtcccactatcgtctttatatcgggccattaccgtcaacctcaaacttcatatattatagttgaactatcgggcctatatcgtcctaccatcataccccatcagacctaacccaaaataaaaaaaaaatgcagatttcacccaaaaacccctctctttaaaaaaattcaacaaaaaaattaaccaaatacaataaacgaatctaaaacctacaatccattcaacaaaacaataatttcatataacatttatatcaaaatagataattttatttaaaaaaaacactaaccttcgatatcggggaactccagtggtgcagagaggtgcctgggatgcttcattggggtcgtgggtcacagtggtcatggaaagaacgaccgtcttgggtccatgggtcgcggtggtcctggagaaaagggtcttcagtctatgggtgacggtggtcgtcagttgctatggtcgtggttcgtgaagaagggtggtggttggatcatgggtcgtggtggtggttaggtcgagtgaatctt

SEQ ID NO: 118955 - DNA, 1624 bp, Cannabis sativa
  modified_base (1575)..(1589): a, c, t, g, unknown or other
agaatcctaactataaaaaaaacctgtacattaattattatcaatacaatctctcaactcgcaagctcaaggaatataaagcttcaaggcattctctgtttagtgtttaacaagaaaaaaaggttatcaacaatatggaggtgaccatattttctcgagaaacaatcagaccatcaagttcattgattcgccacatggaacccaaaaagctgtgtctcttcgatcagctaactccatcaacttaccctgaagtagtcattttttactctatgaatgatccaaacttggatcttaacaaaaccctaatccagttgaagaaatctttgtctgaaaccctaactttgttttatcccttctccgggaaaaccaagaacaatctgtacatcgaagactacgacactggtgttccttactgggaagccaaagttaactgtcgtatgtctgactatcttcagcttcgagaaactgagtcactcaacaactttgttgctattcatccctttaccaaagaaaaagatacctcagctccccagcttgcaattcaggtacaatataagaaatatattatagctacttagattaacaactttatttaaattattacacgtacatatactacatatatgctatagcttatagacttatatttttggcttacattaacgttttagttgttttgtattgtatttattagttagcttatatagttagtgatatatatcttgatgaacttatagttgatgagcttacattttctcatatatactcgggtcgggtctgggtttggggccggcatccgttcgagtttggatccagggtataaggtttgtagctaagttgggttcagggtccggagatctgggtccgagttaggtgccaagtttgggtttaaggtttgggactggcatcaagtccaagtctaggttcgtgattcagggttcagggtttgcggtcggctcaagtctagggtggggttcgggtttaggtccaagtccagtgccaagtctgggttctgggtctaagttcgggattcgagatccgagtctacggtctggggttcaggtccaggttttggggttcgaggtccaaacaaggataggcttgggctaaggcggactatgtccacgtctatggccacccaacccaagggctcaaaaaaaatatttttcatttaaaattatacatatttttaaataaatggcccaataattttttttactcctaagatccacccaaccttaggatcgccctggtcagagatataggttcctattgtggtgtggtgtagaatatttttatgtaaaaataattttttaaaaacattaagcaaatatcattcaatttttaaaatgacaaattactatattttatttttagttttaatattgctatactattggttattaattcactacaaaaaaatgctatttttagtgacaacataattatttttctgtgactaaatgtattttttagtcgcaacaaaatgttacttgtgactaaaatataatctttagttacaagttgtcactaatttttcgttttagttacaacaagtattgtgactaaaaatannnnnnnnnnnnnnnaattgtaatttttgtaactaatacttttagttacg

SEQ ID NO: 118956 - DNA, 1700 bp, Cannabis sativa
taaataaatgtgaaatttgtgttgaagctaaattaactaagaaatcttgtaaatctgttcaaagataatctgaattgttaagtttaagtcacactgacttgggagatttaaaacaaactatgacaagaggtggaaaaaaatattatgtgacttgtatagatggcttttctagatatgctaaggtatatttacttagaaataaagatgaagcatttaatatgacttttctaactcttgttgggttctcagacgccgactggacttgctgtccgaatgacaggaagtcagtggcggggtactgtgtgtacctgggtgactctctggtttcatggtcatcgaagaaacaaactattgtggcttgttcaagcactgagtctaagtacagagcgttgtctcatcttgtagagctgtcatggttacaagagctactaaatgaattgaacttcaagtgttcatctgttccagtcaaatggtgtgataacttaagtgccagtgctcttgcctccagttcagtgtatcatgctagaacaaaacacatagaatttgatgtgcattttgtcagagataaagttctcgacaagaaattggagatacgatatgtgccctctcatgattagattgctaactgtcttacaaagggcgttactcctactcaatttcaatttctcactaccaaactcaatgtgacatagtccttgaggggtggtgttaaagaaattgaattaagggaatcaaatgctgagatgtccaatgtaggggagaaatgattaagggaatccctatgctgatttgtaatcattgctgcataacaaacttttcgttaggcattgttattgtgtacattcctttccacgtggttgtattggtactgtagtgtctgtccttttgttgttgggcttggaccactgagggcttaaggcccaaattaggtgaaacctaaaagaaacaacaaagaagaaaaaaataaaaaggctggtggtgtatcgtgagcagcaagcagccaagaaaaaaaagaaagaaaaagagaggaaaagaagagaaagaaagctagagagagaaaatggttttggtattttgcattgaagatcaagtggttgattctcatccattttagctcaaattttgggtggtgaatccttgcatggtgatcttcaaatctatcggttctgatttgacaatttttctctctaaggtgctcttctacaatacccacttgatgagatctaaatttttctatttgtgtatccatattttgagatgatgatggtgattgtattagtaatccaagattgtttaatcttgatgttttgtgagcctctagttttactagaaaataactttttagtcccattattaaactttggtgatagtggatgatttgagcagattacagtcctgtgatttttcccgcattgggtttccacgtaaaaatcgtggtgtcttacttttatgcttgattgttgtattttatattatttggggtgctttggtttatatttgataattacttattgtggtgtttgataagtatcctatttttgacatacaaagagagatacaattgtggttaattgcaataggttttcccaacaagtggtatcaaagccaaggttgattggtgctgaattcttgtgtgttgaaaaatggatgagtcggatggaatgatgaaattgaacttatcaaactattccgcttggaag

SEQ ID NO: 118957 - DNA, 1337 bp, Cannabis sativa
aaataaatctaatttagtggtattcaatattaattccatgtggatctacctcacatgtgtgagtataaaactgcaatagattacatatacttgtgtagttgtttacgatttgcgtaataaatgcttatgctgttgccagtactcagcttcaacagtttgcatattagatactcacagtgtttttacacacacaaatgacaaaacagaaaacaccatacctgtaagtgattttcttgtgtctatatttaacaattgtgttctaatgcacaatagcaaaacaaaatataaattgacataaaaaataattattattaatgataattaataaattaattatatttttacatttaaataatgataatattgtaattaaaaaatatgttaaagttaatcattaatgttaatagcaatattataagataaaaaaatatattaatttcatttgtgctaaatttgacacaatgacatgttttatataaaattaaaaaataaattgtgcttcgtgtacgattgtattttgtttagtgatattttttataaaaaaaaataaattatagtcttaattttcctaattagaactttaaaaataataatttttaattaattaattaagttattatgaatatatattattataccatttaagatatatcatttgaataaataaatataaatttaaaatacatatttgtaataattgataaatctaaatattactcatcagtcattagttaaaaattattttcatgaccgtatctcacttatatttaaataaaatttaataataaataataaaagtaaatagaattgtatttaattaaaggaagaaaatattataaataaaaaaattcttgcacaaaataaaaatctataacaaagactattgataaatttatgaaaaattcatcatattacttgtaaatatattacttgtagttgtcttatgtagaaatatataccaaattattggaattaaattttgaaaaaaaagactaaaaagttaatgcatgaagaagggaaagaagagaacattacaaatagagtataagagctttacaattacatacatgtttcaatgtaacctatgtagaagctacaaatagttctttacactttagccatatgagaaatcataagcaatcttagcttcgacattggtatgtgcatggcacggttatagtacagatttttttcttggtttatttatttatataaattattaaaaatgagaaaacttaaatatataatggttgtgatatttgggaattatacgatcagtttggtgatatagtttagagattttttttattggttaaataatttctggagagtacggc

SEQ ID NO: 118958 - DNA, 637 bp, Cannabis sativa
tttgtaatgagctaggtttttcagattttttgctagtttgctttcaagttttcttgaggcatccctagttcatgtcggtttctcatgaattagttgtgcatgcacttaggggtggatggtgtattagcttaaattgataatttttcatcttttctcattcatttgtattaaactctagtttttgttaataagagtttaatttcaaaaaaaattaataaaatatatgaaaagatataatatttaaatgatatagagaaaaatataaagaagaatatatatgatgtatgtaaatgtgtaaggtaaaataaaataaaatggaattgttgtgaagtattttaaacaatataatagaataattgttgagagtgctcttacaacaacttcaataggacactttttaaagtttgtaaaaattattatatcgtttaaaaatatcgtaataggttacttttgtttttatttcttctaaggccaactctaatgaaaatatctttaaatgaagggtaaatttcattttagatccaatgttttgcaaaactaactaattggactctctgttttgttgaatgacaaaatgaaccctgtattttccaaaatagtaaaaataggagcatgagctcaatttttgacaatttta

SEQ ID NO: 118959 - DNA, 1014 bp, Cannabis sativa
taaatgagaaatttgataatcttgtcatttcacatagttttatagtaaatataagtgacaaatgcatttactataaatctgaaaataatgtgggtaacattatatgtttatatatggatgacttgctaatttttggatcaaatattcatgtcatgatcgatgtgaaatctctattatgtgaaaattttgacatgaaagatcttagtgaagcggatgtaatcgttggtatacagatcaataggtctgaaaagggaatttctttgagtcaatctcactatattgagaagatcttaaagaaatataattactttaactgtaaacctgcttgtacaccatatgatcccagtataaaattatttaagtacactggtgatggtgaaagacaatttgaatatgtgagcatcattggcagcctttggtatgctactgattgtactagaactaacattgtctatgtcgttagattattatccttgcttactagaagacctagtgtagagcattggaatgctattgagaggatcatgagatacctcgaaagaacattgaccctaccttatcaaaagtttccaactgtacttgaagggtgcagtgatgctgattggaatactttatcagattactcaaaggcaaccagtggctatatttttagcatagtggtggagctgtttcatggaagtctaagaaatagactattttggctcaatctacaatggagtctaaaatgattgcactagctactgctagtgaagaagcaagttggctgacaagcctgctagctgagattcctctatgggaaaaatctatttcagcagtgttgatccattccgatagtacgcggctattccaaaagtttagaaccgttattacaacgtaagaggcgacaaatacgtcgtaagcacatcactgttagagagtttttctcaataggagttgttagagtggatcatgtacgcactgatgataacttggctgatcctttgatgaaaggtttagctagagagaaagtcctta

SEQ ID NO: 118960 - DNA, 987 bp, Cannabis sativa
tttttttttttttttttttttttttttgaaaataagcgtagttgtatattagatagatattagaccttatggtcattacacaaaatgttctctggtaaagagttgatcggaatagatccgtacatttggtgggtaaaatctcatttagccacattatgggccgcaaagttacaagtcctactaatatttgaaaaattacaacaaattaaataaggagaaaacttagtacaaaaagagacatacaagtcctactaatatttgaaaaattattcaggtttaattattaaatatatattttcatttaaattataattaataattttttattttattttatttgaaaaaaattatatcaaattcatattaagtgaattatatgtcgtgtttgatctattttcatttcatttcaattcattaatttgcttgactctaacttgtggtatggtgtttaaatttaagtactgtgtccaaactcattttattatctctaattaaaataaatcaataataatatatctttgtttgagaaggtgcccttagcattctccaaattttatatgcaatgaaaatcgtcattttattttttttttctcaatatatttttattaaattggtccaaaccaaaccgcgtattgaacagctataccgttgtttaaagtaaaataagtttcaattcaaagactttgacactcacaatctcacaaatacatattaatacttcaattattaccatcatttctcttcacattctctttcttctttctttacattttttttttatttatttatttttctctcttcaaaaataaatcctttctcatcttccaaacgtattttatttccacttccacgcctgagtttttctttttcttttttttccaaaatcccagaaaagctttgatttttagagctcttctctttctgggtttttgatttctgagaaaaagttctcttctttgagaggcatagcaaaaaaaaaaaaaaaaa

SEQ ID NO: 118961 - DNA, 2421 bp, Cannabis sativa
ctgtttggaccggtggcactttggctcacaacgaatcacaaacggctttttggaccggtggcaatttgggctcacaacggatcacaagcggctcggataccatgttataatttgaggaataagataaatggggttccatcccaaaaccaattggcaatgggaggagtagccctttcatctaatatatcacaatttatttccacacattagcaacgtgagactaactcttaatagataatgacaaaatcgagccaaaaaaaaaagaagaatgtttggtaacacactggtatacgactttaatgcttccaccatatttatcttatttctattggtttatacttcttgaacctacaatgaaatatgatatcctaacaattcaggtagaattcaaaaaaaaaaaaaagatagacaaaataaacaaaattaaagtgtatatatcaccaaaggggttgaagaattcaaaaacagattttttggtatcaattcattatcaataattcaaaatataatgtgaattaacattatatttttgggctagtgaaaccacagctccagttgccagctactcattatgaatcatttaagttaaaattcacaatttttatcatactttttaactcaatatatcatccagtctctctccaaatccaagacgaactcctacaattctgtgtctaaaaagattcacaaagcaagtaagcatgatgtctcctgttcctgatagaccagttatcgtaattggctttgcacccatcttcaagaattagttacagaaaaagttgtgagaactgaggaaatgaattgagatttggctgtgtttttaattttcagtttttaaaattgtgtttttaaaagtgagaatagaaaatagttttttctcattttaaaaatttaatggtgtttggcacaaatttttaaaaactgtttttagattttttcttatgaaaaaaaaaatcaatattttagcaccataccatgacattaacccattcggatctaggtttgggtatggtttcgggtctaggatctgagtatgtgagcaaaatataaaatgtaatatgttatacaaaaaaaaatgtttttgaaaattgaaaacagcattttgatgttttctgttttctagttttttaaaactcaatttttaaaaaactgtttttaaaaatttttgccaaacaactcctaatagtttttaaaaactgttttcagttttaaaaaacataaaacagtttttaaactgtaaagccaaacagcctctaaaaggctaaagcagagcaataataatggtacactacagagagagtgttctttcttctaatgaaactttaattaaaaagaagaaatttttgaaccatgcattagaaaattgggatacctttgttgcccgcagttgtaaaagaaacccccctcatgatgcccaacaatgaacatgagactcctatgttcaataggaccaatcgacaacaacccaatatttcttaatcaagaatcagaccaattgattggtcaatcgtatcgacttcaaactcatcgtgttttaaacggtgaagctacgagcatcgactctgacacttctcgaagattggcggatatcgaatcacagatcgtggtcttcatcatcatcatcgacgttggccaattgcaaaaccaaccctcaatcgcaaagaagcaacacttgaaagtttagtcgaaatcttttaagcttccactcaatcaaggaactaaaatatgttgaataatttttgggatattttaattttaagttatttgtagatggtaacgccaagcgttaactctcacttaatttttatcaaagaaatataatctttttaaaaagaatcgttaaactaagaattatgttacataaccaaccacattttatataaaataaatacacgcattaacaatattaggtaaaataatataaacttaattctaaaattttcaaaaatatatgtatatattttattctcttctcctaatatacgttttcctaattttgtgataaataaaacttttttcttgcatatttacataaacgaaatagcctacgcttcgtgtgcggttatattttatttaatgatatatatcaaattttaaaatttgatattttttttaataatataagtaattgttttactaatttttttattttcaaaaatgtaaaaataaaatacaaatcatcatacaattttttatttaataaagagaaattcgcggccaaactcccttatattttgattgttacacacttaaccccctcatctttatttttggtggcaaaaccccctttagtattattctgtttgcaaatctaatacacctgttaaatttggatgttaaatgccaactagaattgccactgtgtacacatatgtacacgtggtataattttattggcccaaatcattttaataattttaa

SEQ ID NO: 118962 - DNA, 2084 bp, Cannabis sativa
ccaaaggatggcaaaaaaatttcactgatcccaaaagaagaaaataatggtcagattaaatgcaccgcaaggtcagaaacaccgaaaaagtaaactagtagagaaacggctggaacctcacacacactcatgcgctagcgcgtgaaggttgtcgccaaagcttcaggaggtgcatggctcatgcgcgacggttctgccaccgaattttggggttctacagatcggcaactaggcagttttttggtaccggcagtgagagttcacgtgctctctcaagtgttttccaaaaaatgaacctaaagaaagataaataacaaaccctaattgcaaacctcaactttgggataaaccctaactttgaattttgaattttgtggtgataccatgtaaacaattgtgaagacaataattgacttgtatttcattaatagtatatatttatacacaacttaagaaagttatactaggaaactaagagaataaagaaaacttattagcccaatttttagctgatttacagctaatatacacaactaagatacatatctaacaatagtcaagtggtttttcgatcaacattggaggattgtcttcaagccaagaagttctttgacttagaacaaaattgctccaggttagtactaaaattttaaagaatctacactcacctttagtccaaatacataaaaaaacaatgattgataatatcataatattaaaactattttggctatctcaatggtacaaactcgtaagttttatttaggcctcctcacttttctcagcataaaataaggttacaatttgagtatctaaatgaaagacctttagtccaaattacaagatggtcttccatatgtttttagttaccgtttaagtaatgctaataaattttttagaacaagctattctgactttaagtaatgtcttgtcataaataagttagttaatccaaattaaatacgataactttataaatggattgcacagttcttatcagattaacccttttgaaaacatgcatgccaggtttgaattttagattttggtctttgacactattaataaatgactttgttttgagtttagtatttatttgtaatagttaacattatatttggtaagaaggagagactcttgaatggagacgaattgagggaaagtgatgaatggagaggataatattgtatcatattgattaattctctctttctatctttcctatttcacataaagaagaacaactatcttctcattctcttatcctttggatcttctcttatctctccattcattctactcttcttctatcctaccaaacatagcctaaatcttgtatagacaaatattatctgtgaatacgaagtgccatctacttttttcgctttaaagatttcactgcaaatatgaatatttaatattattaattttatctaatcggataactattaccattagaaacttagtcattatattaaatttcatcccattattctatttaaatattgatgtgtctttgtaaattaataattttacccccctaaactttggcaactattaaataggcctctaaatagatatgagaacgatttaatattttttttaataaatcttaaaaaacttaaaaaattaatttatatttttttaagaaaatattttaaataattaagaaaattaaaaaaaattaattttttaaaattaattttttaatttttaaaagaaattaaaattaattttaaattttttaaaagaaattaaaattaattcaacgatttaaaaaagtaattatttttaattaacaaatccatttagatacaaaaaagtatattaaaaattcaacttttgtaagaattaattttactagaacaagtttgagtctatttttttctttaaaaatctagatgttttttaagtaagcatgatttttttttttcaatttaatttctaattttttaaataatttaataattttattgaatttctaattattattcttttattttaagatatgaatttgtaaatataaataaacttgattttcttttgacaaaattttagtttctttaaattatttattgaatttt

SEQ ID NO: 118963 - DNA, 1002 bp, Cannabis sativa
ggacaaaatcatatccctatacatatatattaactctagctagatggccgggtttgttttaataataattttttttggtaataagaaaaatactccatattgttgcctctaaaataagatcatttaacatcaaagaattaattattattttatggcttataaatataggaacctataaatattatatatatttatattaattattaatggaaatttcctgcatattattagctagccactttttccttttgtctattttgtaaagaaaaagcaaaatgtgtgtcattacaaagatattatgtctcaatgatctttaattaatcataattaatagagagaaaaattcttatataaatagaaaccttaaacaataatttcaatatttaaaaacatgaagtttgctttgtacatacgtttgatgaaaatagtgtcattacaattaagcactccaaacaaatttaacaaaaggaaaattattaaagtaaagatcatgatgaagacaataaaaataaacacatagatatgtttatttaattttaattatcaatctataagaaaataattaaaaaaattaaatatagagactactagttttgtaattaaatacttatgtaacatctagctcgcttcaagcttacattcctacatatttatgattcttatacacgagtacactactctgattgtttcatgaactgacgactgaccttataaaccaataagagtgttttcagcgtacttactttgtccttactcgcacgctttctgtacttctcaagagatcacccattcgacctgtgaagttctttcgtgatgatctactaaaaattaagatgcacatgtagtaccaattaatctatttaaaccatcttcaattgtgtagtcccatacacgtataaactctcagaatcatcacacttgaacttcctcaagcagtgtgggattgcacagaaatgtattagtcataaaaattacaatttattgtgactaaatgtactttta

SEQ ID NO: 118964 - DNA, 1951 bp, Cannabis sativa
  modified_base (50)..(50): a, c, t, g, unknown or other
actaaaaataacctaacaatatttgtgttatagtatttatcgatgacatncttgtgtactctcaatcagaagagaagcatgagcaacatctacagatagttttacagcgattatgagaacacaaaatctatgccaaatttaaaagtgtgaattttggctatcccaagtgtcattcttaggacacattgtcagtaaggatggaattatggttgattcggaaaagattgaatctgtcagagattagccgagacaaaagacagttactgaagttaggagttttctgggtttagctggttattattggcattttgttgagggattctctaagatctcaatgtccttaacagaattaactaaaaatagttaatgatttatatggacagaaaagtgtgaagcaagtttccaagagctgaagcatcaattgatcatagctccggtattagcattaccattagattaggagaagtttgtaatttactgtgatgcatctagacaaggtctgaggtgtgttctgatgcaagcgaataaggttattgcttatgcttctcgaaagttgaaggagtatgaacaacgatatccaactcatgacctagaatttgttgcactagtttttgcgttggaaattcggcaacactatctctatggagagaagtgtaagatttataccgatcacaagagcctcaaatatttctttactcaaaaagatttgaatatgagatagaggcagtggttggaactagttaaagattatgattgtgaaattctttaccatcctgagaaagtcaatgtagtggcagatgccctaagcaagaagggtcctgggcaggtatccagcatgattatgatttcagctcaattggcagatgatatgatcaaatcagatattgagtttgtggttggtatattcagtaaattgacgttacaattagacttgttagaaagaattagattagctagttagtggatccagagttgataaagacccgagaaaaaattatggctggccaagctaaggattttgcagtgtcaagtaatggaatgctactttacaaaaccaaagtttgtgtcccgagtaatgtggagcttagaaaaaaaaattctagatgaagctcatactacaccctattcattatatcctggtaccaccaagaagtatcaagatttaaaaccctactactagtggcgcggtatgaaaaaagatgtggtagagtatgtatctcggtgtctgacttgtcagcatatcaagattgaacatcaaagacctgtagggttgttgcagcctttaactcttcctgagtagaaatgggaggatgtcactatggatttcgtggttgtattgcctagaacttcgggtatgtttgattccatatgggtagttgtggatcaatttaccaagttagcacactttttacctgtgaaaataacatatacagtggaccaatatgcagaactctatgtgaaggatagtaagactacatgggctccgtccattatgatagagatccgaaatttacttccaagttttgagaaagtctccaatgagccatgggaacaaagctaaaattcagtccaagaggacaattcagatactaaaagatatgttgtgagcctgtgtcatgaattttgatgactcatggagtaagtatttgccactgatagagttttcatacaacaatagctatcatagtaccatagggatgactccctatgaaatattgtatggtaggaaatacagatctccaattcattgggatgaaactggagaaagaaaatacttaggtctagaatcagttcagcggaccaatgagggaatagagaagatcaaggccagaatgcttgcctctcagagtaggcacaaaagttatgctgatccaaaacgaagaactatagagtttcaggtaggagatcatgtcttcctacgggtatctccaatgaaggggattaaacgttt

SEQ ID NO: 118965 - DNA, 2914 bp, Cannabis sativa
  modified_base (2650)..(2659): a, c, t, g, unknown or other
aggaaaagataaatgataagaaaatatgatcatctttcctcttctacttttatacttaaaattttgaatttcactattcaacagggaatggggattaaaaatcctactctcagtggaaataattgaagaatagaaacaattgtccaagatcatcaaaatttctacccacttggtagttttgagagaaacgggtttagttcacgtgattaagtcaacctcacacaagtgtaaagttgactaggggaaaatgtttgcaccaaaactagccctgatgacgtggacatcaatgctttacacatggcaagaaagatgacatctcgaagttgagtagtcccgagtcatagcaagtcaacctaggaggggtccctagtcttgcgcccaggttgacttcgagaactagggaatggaagttcagacttttataactcatttttaacttactatctttcagtattctgtaccatgaagatatggagcaaccaaatctaggactcaggagctgaaattacatgaacctacaccccggaagtcaacttgggcacctagggtttcacctagtgcctaggttgacatcctcaactagggtttcagtttttgggaccgtcttagtgcaaatgggtcaaaattttcattgggacatgaactagacctcccacggacatgtttgaggcatcataatcagattaagagcaagttcattttttagcacccagagcacttggtgcatgggaacccagagcccaggttgataatttatcaatctggggacttccaagtatcatattgatgattcgacttttgatcatctttgtcttcatcaaaaatgggaaatagatagttttaaggaagaaacaacacttcctgggtgccagaagcaaagcccaacgcccaggttaacacttggggttggcccagtgcccaggttgacattttgtcagtctgggtcgattatgatgatgttttctgagaattctttcaggcatgttctccattttcagaaaaaattaggattcaactatttctaaggaccaaacggaactttcgaagggccataaaggggacccagcccccatgttgacacttggtactaggctcagcgcccaggttgacatactatcaacttgggctatttccaatcaagttctcaaaaaagtgttttgggcatttttgtatcatcaaaaataatgaagattcaagtaaactcggggagaaaactacaaatctaaaggcctagaagcagagcccagcgcctaggttgacctagcattgggcctagtgcctaggttgacaatcaacttggtgtgctagttttgatcattcaaattctaaatatgattcaaccattgaatcaagaatggtcaaaaacggggtaggagacctcatccttaagttcaagaaccttagaagtattaaaatgacatcgggagcttgaaaatgaagtacccagcgtccaggctgacaaatggcttctacttattcgattatgattttgatttgaccatttgtctagttgactaagatccacaaggtcagagcatctctctctagtttctgtctctagaaattagagtttaaatacttagcctttttttttgtaattaccatctcataagaaatgaaaacttgaagtagaaatagttctattaccatcacgacatggagagtgaactactataaattgtgtatctttctaaattttttactaaaactcattatttatctcgccaatctagtaagctggtattgaccactttttagcgtcaacacacattttgcattagttattaattaaatcaaaaaactttgcgtcgaactataaccaatgcaaatttcacacccgacacattaaaaaattaaaaaaataaaaaataaaaaaccaaattgatgaatatagttcttatataatccctccagcacttttaagtaattttaattattatcgagtaacttatgattttaataatttataagtaatgtataataactgatatattaatttattatatagaatatataaattataattaataaataataaaatactcaaaaaagtacaccatttcagatttagatctcatcattaccatcaacatgatagattttcaaaaccattaaaaccaaaataaaaatacaaaattacatatttcaaattttagtttcatcaacaaaaacctagaatttcaatttgaaatccttcatcgacatcgatccctatggagaacacaaagagtttgcttaatctacgctaaaaatcttcaccaagaagccatggaggaaggcaacatcgacaaagctagaatctaagctgagaataaaaaatcggtgataccatgagggaagaagagaaaaagatagaaaatgggacttacacacgccatcaaaacttgggtgtggtgtggtctagggatgtaaacggggcgggcgggtgcggggatagctcccccaaccccatacccgctttctaaattcacccccatacccgacggagaaaggattcctatcgagtacccattacatatatatttttgaaaaaaaatgatgtctcaaagagaattaaaaaaaaataaccataaaaactcagtaaaacaataaacttaagtggaatagtgtgtatagtaaaaaaatgagtataatcaataaaaagcctaannnnnnnnnntattttaattgtagtagttatgattttaaaacttaaatttatacatatatcatatcagggcaggttcggggcgggtatctattcctctgccaccgtcttgttttcgactcaggtatgtatatttaaacccatacccgccacgtccccgccccattaggggcgggtactcacgggtacccgaacccgcgtgtaacaccctaactaacatagacgtattacgtgatttttaaacatacagtgcagctcgttgctaat

SEQ ID NO: 118966 - DNA, 658 bp, Cannabis sativa
taaataaaaaaaattccttgggctggacttttcaaaagctgaagcaagaaaacttatatcataaaagaagaaaaacaaagtcaaatgatgacaatataaaccataccaatcttatacatattcatcggaattgccaatattaaataatcataaaataatatgaaatggcacctgaacgtgtaagccatccgataatagaaaaaaataagccatataggcatatacaacatcataaatattagtgggaattaatggctggcctcaaaccaatatactgatggaatccatacactgaaatcaaagcaaaacacccaaatcatttgtatatatgccaaacatatatataatataatatctcaatccaaaaaaaaagttcaaccgcataaatatatgaaatagataaaaaacctaattttaaaatcatcaaatcttcaattaatttagcaaaaggtagctctaacaccatttattaggatttataaaatactctagaaatatatattacagatctacatatttctaaaagtgctttaatataaaaaatcttaaatcataaatcattagaaccattgctaaattaaagaagaagaagatgataaaagatgagcggaagcactaacctgaagccattgttggagattgcaaagaaggttttgat

SEQ ID NO: 118967 - DNA, 861 bp, Cannabis sativa
ataatttcaataaactataattatatttattctaattatacttacttggcatgggaaggagatatcatggcgacccaatcgtcatcggaagggaataagacgccggagacggtgacggtgacgatttgatcatctccaagattagaattagaagccacactaatcctctggtatggatttaaatcgacgcaatcgttgagaattctccgattcactaatcgaaaatctgatatggctgtgaagttacggtgttcttctcttgattttccaatcaaagagttcatataataataataatcattattataattagaaattgatgatgatgatgaagaacaagcaaatgagagtattaatattaatattagcttcacaccataaactactctatcaaatatatgatccatattttaataataattaatatgatatataatatatgtggatatatatatatagggagtcttatatatgtgtttgatatataaatgtggtgagtgattatgtaaggaccctatttatatggggggaaggaaagtacttgagttgaggagagatacatatatttatagaaataaatttaaaataatttataactgattttctactcgtatatataaaacatttatttctttatagttagttatagagcgttgcatcggtaaggtatatattaggctaaagtgtcaaataataatgctgaataaagattaaaagacaccagtagtgtgtgtttagtgttagaaaaattaataataaatttaaaatcaatttgtgtaggtatggataactgattgatctctaacaattatcttaaaactaagtattcttttctagatctctaaatcagaagcagtttat

SEQ ID NO: 118968 - DNA, 1208 bp, Cannabis sativa
ttgctattgtgattcgatttttcttactataattagtcttgtctttgtgacatgattttgagtattttagtctagtttgacttaattttgagtgttctagtcttatctgttgatatagttttgttttgttttgtttcgttgttaattctcttttattctcgatggatcgccatcaaatcactgtagtcgttggaaataataaattctctgcatctgaagagattgttaatagtgaagttacgtaccttacacaatagttgagtactcaagttacaaggttgaatgaacctactgctacaatttctactgttatattttttaagcgataaataaaactgtaatgctataatctttttaatttgattttatttttaatttttttttgtaaatcgatttcgaaattacgccgctgattatttaacttgtttttctattaataaaggttcataatttattttttttaaataaaccactataaactcataattataaactgttttgttaatattaattgcttcaaaaaaaaaaaatgcgtgacaaatattttcataccactatttaaaaaatttcttataattaataactaattttatgattaagaaaatgtgacaaattttaaattttaaattttaaattaaaatatcggagataataagaagataaacacaattttttgaatatgtttgtactaaactatatataatggccagaataataacttttattttcgattatagttcataacttcttattattaatttacaaaaccaacctttcttttcaagaaattacttgttcgatttcattggaaagaattaataataaaaatggctatggagcttgacacttcaaggaagaatctcataagaagattgaaagagcttgatcagttcaaacacagcggttcagtacaaaaagatgagattgaaaattttcaaaaattcataaaaacattagaacaagattcgaagaaaaagaagaagaaaaggagtgtaaatgaatctgaaaagattgaatctttaaagattgttataaagacactaaataagaatttggacaagtgtgaagagaggtttcgaaagtacaacataccaaaaaggtatcgaaacggtcagaaacaacctttgaaggattacatacagagattacaagagttcatggagataacatggagaaaagaaaccaagaacaagagagaaaaagggtat

SEQ ID NO: 118969 - DNA, 1417 bp, Cannabis sativa
aagtattggaatgacattccaatgtaatgctctatccaccattttggtgtaatgactattttattttaaaaggaaggaaagaccattccaataaaacaagataaaaaatttaatgacttttttttatcaatttttgtatgtattttaaattttattctattctattcctcctcttattcttattttcattcttatatctatattttaattattctcaaccaaacgcttaaaaaatattttgggttgggatatttttatcaatatgaaggaaacaaaatcaaaattataatttcaaaacaaaaacataaacaaaatagcaaccataataataaaataaaaactaatgataaaaaaattaataaataaaaacatagaataattttatggtaagcacattggttctatagtatattgacactttcttaaccgttcatatacatgaattctagagatgcacattatcaaatatatacttgtatgtatccattaaatattttaaaaattaaattttttaaaaaaattaatgtttaaaatactgccaacacagcacatttcttttacctttaccctttacagatgacacaaccatgatagtttattaaaataataacagtaataataataatttctggttctttaaaattacaggcgaaaagtgtatttttcttttcttgttttgtttcttcaacacccatagtctttggttatcgtgtttttgcaacaataattgtggttttttatttcatttctcttcttattttttttctttttctttccattttgttttgaatacgttagttcttcttctttactttctcgtgtgcattttattatcatatagaagaagtaaaagtatgtgcttttaatttgtcacttaccccaaataaagtgtgttctttagttgttaagagtgtaaatttgagattattttttatcagccaaatcagtatgtatttcattttttcttctaacatttacagttcacaatcatttggaatttaattttttattttcgttcaatctaatttttttttttggaaaaaaataaaattaaagagggaaaattgttcttgtaaaattatatattagattggtttaagaaactagattataaagtgacgacgattagatttaatattcaagacatgaatattgtggatttcttatgaaaaaattatggggatggtttttgaatggtttgtggagatatatgtattatggataggcgtggcagacagatagagactagttagagagaaagtgaggagagagaaaatgtattatttaattaatttaataaattattatttattttttaaatattattaaaaataaataataaataatatagtgtactccaattaactatttttatacacttagggctcgtttggtaggttgtataagggttgtattg

SEQ ID NO: 118970 - DNA, 715 bp, Cannabis sativa
ttctctttgcggacgacagctatgtgttttgcaaagctaatgttgtggagtctcagaatgtgattcgccttctgcataaatatgaaagtgtttcgggtcagcaagttaattttgctaaatcctcggtcttcttcagcaagaatactactgtggtggtgcgtgatagtgtttgtggtcttatgggagtgagtgaggctgcagatgatagtttctatttgggccttccttgtataatgggaagaaataaaaatgcaattcttggcttcttgaaggagaaaatgaggaagaggatctttagttgggagactaaattcttatcaaaagctgggaaggaaatcttgattaagtcggtagctcaagctcttcctagttatgctatgagcgtttttctcttgactcaagaaatatgttcaagtcttgaaggcatgatggcacggttttggtggaaatcccaatctagctcaagtaaaggagtgagctgggtgagttggaagcgactttgtaagcataaggatgtaagtggacttggttttcgtgaccttagggactataacttatcttttttggggaaacaaggatggcgattgctcactaatgaagacactcttgtggctaaaatctacaaagctaggtactatccctaaggatcatttcctgatgacgagttaggacagaatcctagttttatttggcggagtatatgggctgctcaaga

SEQ ID NO: 118971 - DNA, 814 bp, Cannabis sativa
  modified_base (655)..(675): a, c, t, g, unknown or other
aaaatccaagcaaagacacttcatcctcaattttccataacagcacaatacctccactcctaccattgacatctacgactatcatcccatcaaatcccaatgtcacacgcactctctctatctgagaaagattggatagagtctcacagagaaacacaatactgggcttcttttggatcacaatatccttaatgaattgtaaagtccatgggttcttaagcccatggcaattccaagatataatgttcataatgattggtgggcatggacaccagtaccccccaaactcaagttctttgaaccatttacctctagacccgttgccacatcactcctcacatgggccccatcaatatcttccaaagtcgttcttttttaatttcgaattaaattattaattagatatgattaaagaaattattttgtaaatacccaaaaataattataaaaaaaaaaactactattttacgaatttatattttttaatggattttttttacaagaaaatagacttgttgttttttggttgttctaaaaaatgttgtttacacattgttgtaatgttgccataatattatactatatttgttgtattgtcaatattgtacttcatctagaatctaactatatttgttatcttattcttgtttagatnnnnnnnnnnnnnnnnnnnnngtgcttgaaaagtatgttttttttatcgatccagcttgggtcaagtttatgattgcaagataatgtgccataggaatgagaatcaattttaaatgttattgctgctgctagcactttctttctagaactagtttccatt

SEQ ID NO: 118972 - DNA, 1273 bp, Cannabis sativa
  modified_base (1208)..(1248): a, c, t, g, unknown or other
gaaccttgccccagacccaaattgagaccagaactcgagcctcgacacagtcgtgtacctagaccgggatcgagacctggacccagacttaaatctagaacccgattcaagacacaaactcggacctagatcgggatctaaatatgaaccaggactcgacccaaacccagaccgtgaacgatacctgggacttagatcccgaccgagatcgttaaccagacccaaacctggacccgcacctgagacctgaaatcggacctggacctgaaccaagacccagactgggatccatacctagacccagacccaaacccaaacttggaccaggtgtcagagcccgacccaaacctagacctgaaccagaacccaaacatagaattcgagtatgggtctgtgttcgagtctgggtcttggtctgattacaattttgggtttgggtccaggtcctggtcttgttcctagttccctatccgcttctagtttcagttccagttttaagtcacggggtacgggtcaagtccaagcatcgagtctcagatcccaggtcgcgatgtggttctaggtcaatgtttgggtctggggtcgtgtcccgcatcctgatcaaagttcctaggctcatgtttttggtccttgtttgggggccccattccttggtcttggtcccccatcaatgttcgggtcctaggtcctagtctgggtctaagttcgtgttcttgtttaggttcgggtcctgggtcccaatttgagaacagacctcggtttggattcaggtctgagttcgggtccaagtaccagtttgggtccgggttttaggtcccaggtctgagtttaattcttcgctcctgggtccggccccagtttttgggtttgggtccaagtcctggtcttggtttaggtcccaaatcacaggtctcggtttgggtccaagtcctagtatgggttttggtctgcgtttgtgtttaggtttgggtcctgttacagtcccaggtctgggttctcatcccaaaccttgtctgattctcattccaggttcaggtccgggtctggctacggagctgggtcttggtcctagattcaaacactaactacaagttaggtcgaagcctcaggtgtatattcagatctcaatcttggatcccggtcttgttccagtttgggtcctaggtcccgggtcgagtcctgttgggttctatgccctaaataaaacnnnnnnnnnnnnnnnnnnnnnnnnnnnnnnnnnnnnnnnnnaaataacatttaatgttgcatgatt

SEQ ID NO: 118973 - DNA, 547 bp, Cannabis sativa
tgcccagggccgggcctgcttgtggtgtatttggtttcgtcgtaatttatgggtttagaactacaaaatgcttgacatgaaaggagttcttggttgggctctttcttttgcccacaatttccaagaggcgaacaagacgatcttctcgaattacttatgtccctcgtcctcttgctaatgttcaggctccaatttgggctatggtgcggtgatccatgaccatttggttgtatgtttggcctcgaatgctactctagcattcgagactatctcaccgccagtggttgaagctctttccattctccatggtctctaattgtgtactcaatcgatttggctaccgtgagattgaagttgagatagattgtcaaagaattgtggtacttttcagtgagaatggtctttgtttggaatagtattttgaattaaaatctctaatgtaagctcagggccggccctcaaatgtagtgggctatagggtaaaaattatttttgggcccttatttagaaaaaaaatgatatttttcaaaatcagcaaaaaaattgt

SEQ ID NO: 118974 - DNA, 1247 bp, Cannabis sativa
agagtatcacacaaaagaatgaatgaaagcattactcaacttagtagcttagtcctttatttataggtacagagaaaatacaaacccaagaattaaatagaatcataacaatttaaacagtaagctaagacacctaacaaccttaactactaactgttaaagctttatgtaacagaatctaaaatgtggttgacatctcccctcaaacgaaaaggtgtctctgacatcttaaatttggacctaagatacataaatctctctgtgaataaggactttgtaagcacatctgcaatttgatctattgctggcacatatcgaacatatagttgcttggataatatgtacgttccttaacaaagtgtaggtcaatctcaacgtgtttcgatcgagcgtgaaatataggatttgtcgcaatggcagcagcattttgattgtccacccataggacaggacatgatgaaatggttatttgaagttcagacattaaccacttgatttctgcagcaacattagttgatctgaactcactttcagtgctggacctagccaccacattttgtttttttgtagaccaagagaccaagttcccaccaagaaacatggcataaccttcagtgctctttctgtcatccacacaagatgcccaatcaacattagagtaacctttcagagctaaagaaccaactagtgcgatatgaagaccatgtgagattgtgccttttagataccacattagttttttgcaagcctcccagtgagaagtggtttgggcatggatgaactggctgagcttattaattatgaaagctacatctagtatagtcaaagttaatcattggagatcccccaatgtgcttctgtacagtgtttcatctttaaagggttcaccttccttaaaagacaaatttatgtttgcacttgaggggttgaaacttggtttagctccctccatgttaagtttgacaagcaaatttgtgatgtactttgtttgagacaagtacatcctagaagaattttgaaagatttccacacctaagaagtagtgcataggacctaggtctttaacagagaatgacttatttaagtcaagaatgagtctgcttatgagatttgtgttagggcctgtaatgagaaaatcatcacactacaagaaatgtcacttttaccagcacagttcgctaccgcgctggtaaaagtaacttttaccaacacatttcgcaaactgcgctggcaaagaggtcaaagtt

SEQ ID NO: 118975 - DNA, 3396 bp, Cannabis sativa
  modified_base (689)..(695): a, c, t, g, unknown or other
  modified_base (748)..(750): a, c, t, g, unknown or other
  modified_base (3318)..(3342): a, c, t, g, unknown or other
attaattacgtaagtatcaaagtatatttgcaacccgctgactgtaaggtctcaggcgaggaatcaatgtacgaactggcacttaatgtattaatgagaaaccatatgtcgatgaaggagaatagcgaggccctggagaaaagtaacacataccttagcttacgataagcaaactaagtgtaaaagtcagatcgactcaaagaacaagaatgcgagatgaccttctcgctatggggaaacttcctatatccaattaacggaagtgaggctcataaccctagcaatttagaagattcttgtatacccgcgatcgacgtaagacatatctcgtcaacctcagaaagaagaatggttccaactcatcattaggatcactacaatcaagtttctatcgagacatctctagattcaacaattaaagacgtgttgaatacacgatatttttgacccagtaaaagcgggaaaatcacagtcatatgattttcaaaatcatacaccacatttacattttgtgatatgtcccacgattttagggataatggttgtaatcatattttggtcagctttgtaattaactataactatggaactataaatagtggcaaacaatctcaaaaaagggatgaaaaaaatcttatgaaagagaccctgaaaaaataatcagaaatctgaataagatagactcgtgnnnnnnncagaattttaactgcaaaaccacgcaaaaaccctgtgttcatatattattttnnnatagcttttattttttctgtgttgaattatcatcgtaaggctcaaatttggttaacgaaaatctgcgttaacattactaatctactatgtatgtgtgcaagaagttatactctgcctataccttttcagttcgcgagcaattatagtctgccttattatacgcgagtagtttattttttatccaatattatgcaagcagtttaaatatgccacatataatttaaaagcaaacttatacatactttgtatgattcattttatgaactattttgtatttttttaattgcttatttgaatagttaagccttttatttatattttaggttaactattatttttttaagaaatctctatgcctcatttataataaattcctaaatgatgtgactcgttaaatattcagcctcacatgtagctttatgttattttatgagttaatcttatttacaactgctacttcaattttcattctaaagaaaaggtccaaatttttctttgactttatattgtccaaagacaattttaatcaattatcctttcttggaaaaaattttaaaatgggatgggtttgcaatataacatgtattttctagataaattctcattgatatacacatatatgtgcccctcaagtaattttgaagaagactttgtaattacttgagcgaaatttcacttcattaataataggaatttaaattttacatagagaaatacaagatggacacttaatatatactggtaatagggtcgcaaatgctcactattctagtggttttttattagcgagtcattaagtcgagccaatttataaaccctagttcctactattacctcgataacatatggaccttcccagtttggattaaacactccagcagacgcatctcgtgtgtttgcaaatgcccatcttaacaccaaatctctaacattgaagagtcttttcttaactcttttgttaaagtatctcgtgattcgatgttgataggctgcattagtaatttacgactccgtacgtatttcttaaagtaaatccaatgacaacttaaggagttctttgttttcttcttgattgtagaattcacatctgtgggtcacgatattaacttctactagtagcattgcttccgagccaaatgctaacaagaatggagtgtgccatgttgttgttttctttgtcgttctgtgagtccaaagtacttgtggtagttcatatacccatctcccttttccagggtataacttcttcttgatagtatcctttaaggttttattaacagcttccacttgtccatttgcttctggtcgtgaaaccgatgagaagctcttaataattttattcctttcatagaactcagtgaacaattatccatcaaactaagttccattgtcagatactattttaatgggtattctaaatctgcaaattatgttttgacaacaaaattgagaacttttttgcatgttattgaaactagaggttcggcctctatccactttgtaaggaaatcaacagctactgctgcgtactttgctcctcctcaccccgtgggtaatgccccaatcaggtcaattccccatattgaaaatgggtacggtgaggtcattattctcaattctattggtggtatgcgaggtatatgtgaaaatctctggcatttatcgcatctcttgacaaattcgtgtgtatctttgtttatcgttggccaatagaatccttgacggataattttctttgataaactttgccaactgcatgatattcgcaaaagcctttgtgaatttccttgattatctcgtttgctgctattggcaatacacaccataagagaggcattgaataacccgtcctatataattttccatcaaccattgtatagcgaggtattgaatacaagagtttgtgtgcctcgtttttgtctgtaggaagttctccgttgagtaggtatttgagtatgggtgttatccatgtaggcgaggcatcaatcatctcaacttcttccttttcacatatacttggttcgcgtaacatttccaccagtaccaaatttaaatcatccaacacattttatgaggccaactttgccagtgcatcaccatttgagttgtgttctcttggaattcgttcaatcttaaaataatcaaacttttccaattcttccaaactatctccaaatattttgccatctttaaacccttcacctggtactcgcctagatcttgatttataatcaattgcgagtcactatagcatataagatttttgacttttaacattccagccattcttaaactagccaacaaagcttcgtgtttggccttgttgtttgaagtgtcaaattggaatcttaatgtgtggtgaaatttaaagttgtctagcgagatcattatcactcctacacccgagccatttgacgctccatccacatataatttccaagtttctgtctcgtgtttgacgagtggatcttcttcggagactaacccgtcaattagaaaattagccaaagcgtgacctttgattgatattctcaagtgattatatcaaactgttggaaattattttannnnnnnnnnnnnnnnnnnnnnnnntatgttgattaacaccctaaacatgaactttcgaaaacgatgaaataaacacat

SEQ ID NO: 118976 - DNA, 1088 bp, Cannabis sativa
gatctggcctgaatccagatgatcttactcagttatggagtgtagaaagatctgtcaataataaagccattattatttcacttgtgaaaaaatgtagtacttctcttttgagccctgtagttttaagattcaaaaaaatttcattttagactgttgtgaaacacagacagggaataaaaagtatacataattataatagtttctaacatgtgtgagttttccaaacattcatgtaaaaattcttagaatgacacctcaatatatgagtaggggtgggcaagaatgagagtgtgagtcataattaaattgtttgatgtgatataggggcggacccacattgtggtgcctctaaaaaaaatcaaaaaaaaaaaaaaatatattttaattaattacaatatatatttgtataagatagattaatactatatgttagagggtaaaaataatagtaagtttgtgtaatgtttaagataaattatagagggtaaaaattctaattataactacactttatttgtgtataaaaatgtcaattaagacactttattctcaaattctaacagtattttattagtttatttttatgaaatactgggaggagtagttcattcctcttatatatattttataatcttttcatatattaacaatgtgggactctctaacaaatactctttgtaagttaaactttttgctcgatgctttacatcacgtaaattttaatttttttttactaaaattgaaggaaaatccttaaattcaaatctcaatagtttaaaatagatttttaatgaaccttaaggttatgtttggttctattttaatgaacttaaggttatgtttggttctattttaatgaacttaaggttatgatgtttggtgggaggacgggagagtaggatggatggagaaattagaaagtaagaggaatagagaggattattaatcttcttaggtattagatgtgaggtaggaagaataaaaaaaaaattaattagtaaaattatataattgtccttttaaaaatataattttattatttttaggtagttatcgtattttatattttgaagatttgaagggaaaat

SEQ ID NO: 118977 - DNA, 2255 bp, Cannabis sativa
ctctctctttctctctctctctgtctctctctcaccactaccatcgtctcactggttcagtcatcttgtttgaccgatttggccggaattttagtcatcttctccgatttggcccaagtacttcagatctatccctcttcgtattcatctctctctatattatacataattgttttattattattattattcttaatttagatctgattttatcttcttctccaatactctcccctctcatctcatccaaaacctatctcttttttgtcactctctcctccaaaacaacccatttctccataatcccatctcggcttgagcaggtcccgcagttctggccctgatcaggtcagagcctaagccaacttcctcagaaagagaaccaacggtgtcgcctttcaacgttctcaggttcaaccaaaggtactctctctctctctctcatttctaactgatattgcagctatttttcttccccacataggttacattatttatcattaatccatgtttaaattcatcattactctttttttgttttccctttttcacttggctcacttttatgattttttggttgggatttatgttgggttagaattcaataactagaaatcgggtttaatgagtgttagcgtagatttttgttaaccaaatttgagcctaacaatgacaatctctcacaaaaaaaaataaaggctgtaaaataaaaagtatgaacactcaggattttttacgtggttttgcagttaaaattctgcatagtccgcgagtcaatcttattcagatttttgatagttttctcagggcctcttttgtatgagtttttttgtcccatttttcgatcttacttgccactatttataatcacatagtgggaagttaattaaaaagttgactgtaatctttttacaattatcgtcccctaaaattatagggtttgattacatatcacgtagtgtaaatgcgattattatttgaaaatcatatagctgtgatttccccacttttattgggtcaaaatgatcgtgtatttaaaaacgtctttaactgttgtatccggggatgtctcgatagaagcttggttctagtgatcataatagcgagctggggccattttccttctaaggtcgatgatgcacgtcttgttccttctttgtttaaaaacttatcacttcatttgggacaattgtaattcttgttaataaagtttctcaaagctcaattaaatgttagcttctgactcgtcaggattgttaagtctcactgagaagatgtctgaagttaactgggtgaagttataggaagccttcccatagcgagataggcacctcacttattaggtctcgagtcaacccggctgttatacttagtttgtacattatacactaagtgcttccgcagtcgatatgtgtcacttttgtcttcctagatgtaacgtacttgatgcctcgctattcacattcaacaacatatggttcctcgtcaatacagtaagcaacagtttgtatatttcttttctcgcataataccttacagtcagcaggctgcaaatatactctgatacttacataattaatgagttattccataaaaagcgattgtatagatccatattccttttatcttgatacgtgtcccccactaagatggtagccgaatttcgagtataacaattgtcccttaaaaagttcttttttagtaaaaagtgctttttaataattatagagggcatttttgtcataatccctttttggaaagatgcgtcctttgattctagtagttgtgcggtttcgagggtcattatgaatcgtctcttcatattctgccctactcccaaccgttagatttcccaatctttggccttcttgtcactggactttgtgtataaaagggcggcttaagcttgccatatttcacaaatttctagttttttggtgagatccatcttgaaattggattgtctttttctttctaaaatgtcccatctgagttcagaagttcacccccccaaactcataacaccatggtgcaccaaccatttttcttctccatacgttcccaaagacttcaaacctcaattggaaccaaaaacaacgaattccaaggttgaggagctttcgaccaatccaagccaagggaacagcatagatcattatggacgatcttagaggtcctcctcaggctgacaaggaatcctggaggaaagttggcatggttttggatgaatctgggagggaagttggcgtggtttc

SEQ ID NO: 118978 - DNA, 964 bp, Cannabis sativa
tgtgtacacttgcgcaattataaagcaatataattttcacaacaagcgtgcttaacttgggataattttaaacagtatagaacaatcttctaggtgctgaagtcatttaagtgtagagctgtgtagtctatttataggttgacagttgtattggttggagagaaatggaaacccccaactaacttaactatctctcggacacataaacataagaatgtgttgacttcaattagggacagaaattaggtaggtaataagcgggtaatgcacctcccaaccccatctctattccccatttatgcctccatcactgcctctgcctcgctcaatctccaatgggttcagggtaggagaatccccattggatatggagacccatcgggtacctattaaaattaaaacaacaacaataataagaaaataacgtaatgcaaataaaataaaaataaaaaacaagatattaattttaaaataaataaatattctacttattaaaaaaaatttattacacagtaagttaatgaagattaatagttaactttataagtatagtcaataattttaatacgtaataattagataaaagttatatgaaaagtttagaaactatatatttactgggtcgaatttagggtgggtagtattactcctgaccccaccctgaactcgcttcgggtatataaaattgcaccccatcctgccctgttactcattaaggtaggtaattactctagcctcgttcggggtgagtacccgtcctcgcagatcaaatttccatctaacttcaatgcttcaacatagttgacaacattggtttagtggtctaatttctaatagaaatatgtatatatattggtgcacttttaatgggtattactcatgaatgggtaatattagaaaattttgagtttttatgattaatttttctatttaattagaaaaatttcttatttttacattatat

SEQ ID NO: 118979 - DNA, 609 bp, Cannabis sativa
gagcctgttcaacatattaccatcgctatcataatgacgtaaaggacaattggaaaggatgacacaaggcatgcgtctcttcctcttaactggtacaactttctcacgattgaactcagccacgagtctctcattctcttggttagttttggagctaacgtcaacatgaggcaaggttaccccttcgacaatcttgatatgaccctgtacaaccaatctggtcgtatgatggttatgcggggtcactctaccattactctattttgtatcaaccataactacaaggtaaataagagacctacgcatttgtcagctccccaatttaacactcggcactacctgcatggatggaataaggggaggtaagcaacctgacaaagctacaaatatattcaagtcaatgacacccaagggaatcttctaggtaaaataaagtgtagaaggtcgacaatcgaccaagtactatcttagatacaatcactaagacatgcagtgagtcctaagttgtacaattgactaaaattgtaacaccctggaattaagaaatggattagcaaaaccctaattaaataattatgaataatagaagaattatattattatatagtt

SEQ ID NO: 118980 - DNA, 2294 bp, Cannabis sativa
  modified_base (56)..(60): a, c, t, g, unknown or other
atcgatggaacaatctcagcccatatgatataaaatgagagatttttttaattagnnnnnaaaatcaagcataaaaactcaaaattttataattttaccccattcataagtaatacccattaacagtgcacctatatgtatagatatatatatatatatatatatatatcaataacatcaataggagaatggaagctcactacaagacaaacaaaaacaacttgtttttgcctttttttcttttgtcttttttgatatttaaggtgttcaatattatactaatatggtatttaagatgcttaatattatattaatgtggtatttaaggtgctcaatattatactaatatgtttttcttttgtcttttttttttaaaaaaataatatttgtaatttctttaataaataattttttatataatttattttaataaataattttttatattattattattatgtggtatttaaggtgttcaatattatactaatgtggtatttaagatgcttaatattatactaatgtggtatttaaggtgctcaatagtatactaatttggtgtttatttctttgtttaaaaaaaaatgatatttgtaatttctttaataaataatattctaaataatattttttaataaataatttttatattattattatgtggtatttaaggtgctcaatattatactaatatggtatttaagatgcttaatattatactaacgtggaagttaaggtgctcaatattatattaatgtggtatttatttctaaattatttattaaattaaaatttataggagttgaaattgaaattaaccattaataactgtatgctacattttatgctgctttgacaccataaataattttttatataattttttttaataaataattttttatattattattattatgtggtatttaaggtgctcaatattatactaatgtggtatttaagatgctaaatattatactaatgtggtatttatttctaaattatttattaaatctaaatttatgggagttgatattgaaatgaaccattaatatcagtatgctacattttatgatgtttgacaccttaacgtgacccttaatatttttattattaatatagacatatctttattaacttaaattagaatttaaaattttttctataaggtgatcaatagtatatctatgtggtacccaataattaattaacaattttctaaactatttattaaattaaaatttgtgggagttgatataaaaatacacaaataatggtatgctactttttacggtgtttgacatcttaatgtgtcccttaacaattttgttattaatatgtacattttttattaacttcgattaaaattttaaattttttccttaaagtgttcaataccgtatcgatatagtacctaatagttgattagcaattttttaaattatttattcaattaaaatttatgggagctaatattgaaatacaccaataaaagtatgctactttttgtggtgcttgacatcttaatgtgtcccttaacatttttattattaatttgtacatatccttattaacttcaattagaattttaatttttttttaattatacataaatttgcaagaacatctccaatgaaatatgtaaaaattatactatatttggcaaaaaaaaaaaaaaaactttgttatatatttgcatcaattttttagtattatgatccaacaattacaaaatttgatgcaaaatttaatatttttataataacttgatgcaaaattgaatatatttaattttttttaatgaattttacttattttttttacattttttttcttatttatttattaataaatatataatagtgtaaaagactatacaaacatatttatatatatgatattaatttattttgtattgttattttgttttgtcataaatttttgttagttagtattttattttatttctaaactttacttattagtagataatagcataaaaaatcagtttatgttacatttagacaagactactaataatcttacccttcaataaatgaatctataccacattatgaacttgtccaaactcaattttctttaataattgttcaaatatatgtgacatttggtaatatatttttaatcagttttctatttttaaaattaaaaaagtgaaaatatttgccaaaaacatattctaaaaaattgttttcaatttcaattttttaattgagaattaaaattttgaaaataaaaaaattacttttaatatttttttaaacaattttttt

SEQ ID NO: 118981 - DNA, 660 bp, Cannabis sativa
attgggtacttacgctactaaaaaaaattattaaatttgtaccacctacaaactcaaaactttaggtacttatagcgttatttatcatttatttattaattgaaaaacttcacaaaagataaggttgtttagagtattattcatctacatctactgtcattttaatacaatagtaatgaaacgttatttctatagaaaaggaaagcaaaagaatatgacaggcgagatttgtggatcaaatcttaacatctggtatatgctaatgtggaatattatcattagcctaaatagtacataaactaggcaatactacattaaagtaacatttattgttgatgtcggcattggggaaagctaaggaatgttcatccttattttctttttcttttttcttttttatcattgagagtaaacactgaaaaaatctaaagaaaaaaaagaatgtaagaaaaatttcattaatcaatattataaataaatgttgaaattattaaattaattatcaccaccattaatgttttttaattttgtatttttcttttattatattaatttagttttttattcttgtaatcagaattttgcataaataagagttcactctattggaataaactattgaaaaaaatctaattcattttggtgtcgtttggtaacact

SEQ ID NO: 118982 - DNA, 906 bp, Cannabis sativa
  modified_base (50)..(52): a, c, t, g, unknown or other
ctattttttgttctcatttctaaacacaattttttgaaaacaaaaaacannnaacaataccaaacatgctcttaatcttcccatctttgtttttcttctcacaattattcctctcaaatgagaagatttgccctcttcaagtgttctcctctccattctatagaagaaaaaaacattttaaatttttgtcataaggaccccttattaaagagtattactcttgaaacatcaaacaaggcctcaaaggaaacacaaactgacccactaaactcttttttcaaaaagggcaaaaaaaatcattatatgaaaagacccacttaagaatttgacttgaaacagcttgcagtgtgttgaaaatttgttgtatgtgttactaaacacaaaaatggctcacacaacacaccatgtcacctttgttagaaccaagtattctaagagagagagctagctgggtccaaccaaccatgatgttatgtttctcttgtggatttcatttcaacaggtaaataaatagggcaaatatcatcgtaaattctgtgttttgtaaaaattattgattatttattttgtaaaataataaattaaactatatattttttaaaataatattaaatagtaccctaaatttgtcttttatcaaaataaaacttaataataacctaatatacatatgttataataaaattggttctattttctacattggttcatgcagaaaattattttaagttagtcatattaaaaaaaaaaatcaaaaattgaactcaaagtcctatttgtaatattttaaaaaattcaaaatctttcttattacttaacaaaacagaaaatttaggtggcgtttggtaacacttttttaatgagtttttttgtttttaaaagtagaaaagtgaaaatatttttcaa

SEQ ID NO: 118983 - DNA, 1182 bp, Cannabis sativa
  modified_base (1156)..(1156): a, c, t, g, unknown or other
aagggctagatatctaaacgaaaggagccattattattttgctgccatcaatgtaaggttttttaaactgtatatgtgtttatttcatcgtattaagaaattcatatttacggtgttagattattgttaataatcagacatacaagttagtaaactttagatccttgtctaatacaatggactttggagccccatgtaatcttactatttcctttacgtatagttctgcatactgatgtattgtgtatgttgttttcaccaatagaaaaaatgctgacttggtaaattgatccacaactaccgatatggaatttcaaggtaacccagccacgaaatccattgtgacatcctctcatttctacttaagaagagtcaaaggttgcaacaatcctacaggtctttggtattcaaccataatctaatgacaagtcaagcttcaaaatatgtatcctactacatcctttttcataccgcaccaccaataaaagggttttaagtcctaataaattttagtagtgctacggtgtaatgagtagagagttgtccgcgcttcattgagaatttcctttctaagttccacactacttagaacacaaacccgatttttataaagtagaattccattacccaaactctatgaaatcttttgttgggctagaacttcttctcgtaattttactaaattcgaatcgtttaacggagtagctctaactctgacaaacaaatctgaatgtagtgtcaaattataaagttttcccactacaaactcaatacctgatctgaccatgccatcttccaactaaggcaaaatgttaatcacgatgtgtacctgcccgagacctttcctgcttaaagcatctgccactatattggcctttctaggatgatagaaaatttggcaatcataatctttaaccaactctaaccatcgcctttgtctcatattcaaacctttctgaataaagaaatatttcaggcttttgtgatcggtgtaaatttcacacttttctccatagagatagtgtcgtcagatcttcaatggaaacaccattgcagcaagctctaggtcatgagttgggtatcactgctcatactccttcaactgatgtgaatcaaaattgataaccctatcagcttgttgggttttatgccctanataaaactctttacaatctgattagt

SEQ ID NO: 118984 - DNA, 2792 bp, Cannabis sativa
  modified_base (817)..(819): a, c, t, g, unknown or other
  modified_base (1024)..(1027): a, c, t, g, unknown or other
tgtaacatatatttaatcaatctcttatattgtttttgtattatattttacatttgagttgtaatatatcctattttctttcattgtaataaaatctctaacaattaaaagcttatcatttttaatagaagaggagataaatcaagattttaagaagacaaggttaatatattttgtgtgaagtcattcatgggtgaacatgatggtgtatattatgtgatttaatattttatatgatagtaattttctatatatttatatgtggcatatatatgtgatcatatacttttattatattttatatataatgatatataatatgaaatttaaatttataacatgtttatatgtatacatgtatgagatatataatatatataacatatatataaattatgtgtattgtggtacagttcctccaaatgaaaagatctccgcaaacgtcatttctggaaagttgctctctcgttgttatcgatcccgaaaggtgtcttgtgaaatgatagtcgagtccagaagggagttcttgtatgactatcatgtcctctctgggtccagtcttctagataactagctcttccctaggaaggagttccagctggctagttatccctcttggaatggtagatctagatagtcgactacagcagactttatcctatgtgaaagcgtcttcagcaagagtccttggtccttgagtttggaagctcttatgtgttcatggagaccctgccacttaagctggcgttgagacttcgcacaagaagagtttgttaagttagttatttctaactaacttaacaacctcgttttttgnnnccaccgactttaggatcttgatcctaagcctatatataccaccttcacttatcattggaagcagaactgaatacacgagtttgaaaactttgttcagacgagattgagagtttcagagagaaaaagattgagaggtagagagagaggtgtagagaagaagatgaagaagattcttgggtgtaaagtgtgagagttgaaacacttnnnnagaatcaacagagaatctcgtctcgactgtattgtacatattcttactcaatcaataaagaataattacggtggcattccaggacaggagtagaaccatagatcacgttgatctatcggacttgaaccagtataaatcttggtgttaatttatttattttctatattttaccatttctggttcaaatactctatttgtccctattttattttcgattattgttcttattgttaatcttgtcattgctaattgtttgattgtttaaagtttctatcatcttaattctgcaccattagtcttaattttctcacaaattggagctaggtaatcgaccaagaacacagaatcaagattcttacgctgtaattcttgaagaatcttgaatgtcatcaatggcgagatttgaattagagaagtttgatggaactggagactttgcgctatagagagaaagtctaaaaggaatcttagtgcaccagaacgtctccaaggttcttgagaacgagaagttatgggcagaaaagaaaccagaggaaaaaatagaaatggaggagatggcatactacacggtcatcatgtatctatcaaacagttttcgaaaaaaacttattgtagagaagacgacggaagaagtttgggataaattggaagaattatacttaaaaccatcgatagctagcaagatcaatttgctagaaaaattatatggttttagaatgatttcatcccttttttagatgagaatattaataaattaaatgagattattgtaggttttgctaacataaatcacaaggttgatgaagaaagccagaccatcatcttgttaatatcacttccaatcgcatatcaagaagttaaggcagctatcaagtatggcagggatgttattgtgttggaagatgttcttgtcgcacttaagtcgaaagatttcaaattacagttggagaagaatccaagaaataagaagtgtatttggcaagaggaagatcaccgaagaaagtgagttcaaagagtaaacaccatcactctcaatcaagatcgtagtccaaagagaaggacacaaggaaatgttacttctgtggaaagtctagacacttgcaaaagttttaaaagaagtacaaggagcaataaggcttcaataaatctcataatggatataggaaggacttccgacaccatcatcatgggaaagactctactgcaatcgttgaagatagtgacgactgctccacagataaagacctgttctctatctcagagtcttcaatgaacagggagtggattcttgatttcagatgcacttatcacatgtgtcctaatcaagagtcattttttgattataagtcaattgatggaggtaaagttctaatgggtaataatcattcttgtagtgtcattagaattggaaaggttgccataaaacagtatgatggtggaattaaggtgctgacgaacgtaaggcagatttcagacattagacgaaacctcatatccctgggtgcactcgaggatgaaggatacggatacaagtccatggacggaagcctaaggatcaccaaaggttctttggtagtaatgaaagatgaaaagatcaatggtctatatgttctccaaggagaaagtgttccagttggagaagcaagtatggtgaaagaactagaatcagatatgaaattgtagcatcacagacttggacatatcagtgaacaaggcctcaaagaactgcacaaacaaggtataattgaaagtttaaattcttatg

SEQ ID NO: 118985 - DNA, 2519 bp, Cannabis sativa
tgaggaaataaatgcatcaggaagacccatttcatgcagagaagaaaaagaagttggatctttgtgtattatttcactcataactgttacagcagagtgataaatatcaccaccaaacttatctacatttccatatatcagagacaaggtagcaggtaaagaactatcctgagaatgttgagatctggacgagttcccaggagcatatgtggcagagccaagtgccttcaatgaaactttaatgagtcttttctgtgagtatacatgatcatcactgcatcttgagctttcaccaatcatcattgtattatcattaaccatatcagaaccaatgactctatgcacctctatctgcagtctttgagccaaaagttcgactcctcccagctccttaaaaagagaaacagctgaactgctgtagtccataagcttttgtagagttttcacagcaaagcagacaaggtgcaaatgtgtaggatcagaatcctctagaagtggtaagaatgtgggaaccatgcctgacccccttatattacttcctgtagttgaggatgaaaccacatgtagcaaataaaactgaagaagtgcttcaacaaaagcaagagaagaaggatcattggaggttttaagagacagaacagccttctgaagcacattcagtagtatcatacggttaccaccagcaaaactgacactagatacactcaaaatccgtgcccgctcatgtgacgctgaatatgcagctaactgagctcctaaagcaaacatagcaagtgttctaatgcttccagaaacagtttcctcggagcgtacaatcctgattaattcattagtatattctggctcgtttgcaaaaaaggacaaaagttcctcatgagcatcgctagactgaacaagcacagtaaatgcaagaaggcaaatcctgctatacaacctgcatattctgggagaacggaaggcacgagcatatctgattcgagtcaacagtgagaaccggagctcagaaggtaccttgaactcttcaataaattgtttcatcagttctaaatcatcttcctttcgcaaatgtagatcaggtatttgtataactcttgaattagaagagctaatattagtactgctctctttagtactttgggggtttccatgtaattcaaaataaagggtagatcccacgcggcattgggacttgtcactatcaacttgcacctctgctggaaacaaatgcaacccatcatcttgggtagcttcatttgccataatgcatgaatataagcccaaaccctcttccttgcttccccatccttgtgccaaagacaggagatagctattcactgaaccacaacaaaccagcttcccacttccatgaagtttagaaggattaacctttactagtgcagaaagtgtttcaagtgttgcaatgaggacctcgggatctgctgatgcaagtaggagcctgaaatgctggacaaatatggcaaaaagtttattaaacaaaattaacagatagatgattaaaagttgcaaaaaatgaaaaaatgttaaaacaaataaacaaaatatatgagaaatttcactgtggcaatttaatattatttattttatgggtaaagcgcatacctccaagccatcaaacgaacccttgttagggcaattctctaatattatctgcatcaccctcaaaatctgaagaattgcatgtttaggaaaaggacactcatcttctaagattttatctgacaagagaaggtcattcctagaagccaaaaacgttttgaaatatgtatcaaaatgaagaaaaagaggcctccaatggtgaaaattcccctgaaaaccaaaagcaacaaataagtaaaattataaatcaacaaataatataaaagtcagaagcagatatacgcaccttagtgtactcccaacgaaaaccagagagtggtatttgtatatcttgtaatggacattgtataactttgtcaacaaaagctttgactttaggtggctgcaaacaaagaaaggtagttccggctattataagattattactcataaggtagaaaatcaaattaaaacaaatgacaaaatcagtttgcacatttaaaaaaaaaaaaatcagaacaaacagtccctggcagaatataaactgtcaagctatgcatcttttaagtcagaaagaaccagtggcttcatcaatattaacaaacacatacacatactccacaacagcctcaaaacacgcaaatattaccaaactggtaaagaaattcacgttttacactattgtatgtagtatatatgggtggatggagagtgagggtagagggaaagatgaaggtagaggaagaatttcttgtttggcaagggggagataaaggagcaatggagggagaccttctccaccaaatctttaaaactcaatcctaccatttttggaaagattgaagaaagagatgaaacaaaatatatttaggagaattacccgatatactatatttttaacttttttttcaaatttacggttt

SEQ ID NO: 118986 - DNA, 769 bp, Cannabis sativa
  modified_base (639)..(657): a, c, t, g, unknown or other
caaggtcaacataactatgaatcgtgaactttatgaatttaaatgttctgtgttctcttattgatctccgggtatacaactagccatgtcatgtgatctaattaaaaaaaaatgactagattatcggatttttttttttaataaaaataacgcaaacttattttggctaaatgaggtttattttatgaaattactgataatctaatgaggatattgaattatttacaaacagtaattttgcactaaaaatattttgaagtgttttaattaagggatattgacagctaaactacataaattttacgttttgtaacacttaaccacataaatttaatttttgacggcaaaatttatagaagtttcattttgttttgctttgtatctttccgtccaaaaattacagttaaatgtcacggtagattgtccacatgtgtgcatttgtacaagtgacaaatttttagtagttcacgtaatattaattttaaaaaattacaaaaaaaaaaatttaaatatatatatttttttacttttttcttcttcttctttctattgaacccatcctaggcagggccagccctgcgttaatatgggtcataggcaaaacaaaatatttttaggctcttactataaagataaatnnnnnnnnnnnnnnnnnnnaaaaaaatatatattttttaaaaggtattttttaatttgggccctaggggcgggcctagcccgcctatgcttagggtcggccctgctcccaggccctctctctctctctctc

SEQ ID NO: 118987 - DNA, 2350 bp, Cannabis sativa
  modified_base (2295)..(2303): a, c, t, g, unknown or other
aaaaaaaatataaaaaaaatgaaatgatgaaataccaaatgggggtaatgtgtgatcattttgataaggaaaaagaaaattaaaaaattgtgccaaaagtaacaagtccgcataaaagatattaaaaaaaaaaactcactataaaagttatatgtatatagtataaatattatttataccggtatacaatataaatataatatttggaaaaaatatagtatgtagtgtaaattcctttaaatctaattctatagtgctttagttttttgtcaaagaaaaatatcaggcccactataatttttttacttttagtcacaataaagtttgtgaatttgtgaataaaatgaataaaagtaaaaagtaaaaaagttaaaaaagttatgaaagttatgattaattataaattattattcttatgtagtgattaaataatttgtgtttaaaagtattagtcacaaaaattacaatttattttgattattaaatatgtttttagtcacaatgcttgttgagactaaaactaatttagtgacaatttatatctaaatagaattttttagtctcaaataattttttattatgactaaaatatatatttaattactacaaatatttatgctatgactaaaaagctatcactaaataaatgtaattgctttttgtagcaaccaatccaagtattataggaagtttgaccaatccaagtattaggaagtttgggcaattcagaaacccttctattaaaaaccttatcttttttatcatccctttataggataaatctaattccatagtgctatagttatttctgtcgaagaaaagggaccgtatcaatcattttcattgaactttctataaataatatgtcgagtagtgagtagtactaatcaagtagactctttcttcaaaaacttctcagtcaaaaactagtggcggactccatttgaatcctaatcattattttatatgtaaacttatttaaataagtttttgtccttttttctaagacgtacgaatgttccccctcacttctatgtggtcactttcatatctatatatatatatatatgcattaatatcttcattcttcatatcatcaaatcaattagtttcacttaatattgaatctttttttcttcatcaatctccaaatatgagttgtgctcagccatcagttggatgttattccgcgggagaagacccatatgtggctccaccaccggttggttaccccaccatggacgcctctgccgctgttggccaacccgaaaacagagttgaaaccaaatctaagggagatgaagatgatgcctggttggaagcatcaaggtaacaacaaacatcttaatcaaatcctacgtacatacatatatactgagactgagactgattatatttgatgtgtgattatgcagttggacttcgaaatgttgctgtgctatgttggaatgcatctctcgaataacagcatgactcttcttattctaatggatatggttaattatttaccactatttgtgttatatatttgatcattcaatatgtatgatcacatattgtatcagctttgattgttttatatattgaataatactacattcaatagttctgcttttcaatttttacttaaataattacaaggcccaataactcaatcaaatggtcaattatgtcattatatttactagtgggattgcacaactattttagaaatgttaaagaaattgtgttgtctagcacccttataaattgtattgctattggtgtaacttaataatatatccttcttgttttactttaataaagggaaatgctaaagggtactagtggtgcctgacaccctcctatatgtcaatcgctattgatccaattaagtatcgggttctatataatttaatataataatttttaaggagtattgctagccaatcgcaatgcaacacatatcgagaaggtgctaggcaccacttgtgcctaatagcaatgctctttaataaatattatagaaaaattactaaccaatttatcgtggtattcaacacatgggtgtctcataacaattaatgctaagtaatagttagtattttggtctcataaacttacaacaccactaaattatatcatctaaaacatatatcatcttaaaaaaaaaattagtctaactcttctggagatataatatttttattagcttttattcttttttattcttaaaaaattgatgtgatattattaggtagtatggtttttgtctcaacaatattatctacttttaaagggtaaatactattttgnnnnnnnnnttttgcaaaagttacagattggatcctgtgttttgttaaatgacaaa

SEQ ID NO: 118988 - DNA, 1181 bp, Cannabis sativa
tgttgttttcgtaacaaatttgtattctgtatccccatctttttcaattagaaaagtctcagggcctcgatcccatttcgattctccagcttcaatttctattcaagtgactgccaaagatatctcctatcaaattgtgtagatatctgctgtcttatagtgcttactccaatgattcaattaatatataaatatctgcgaagtcttaaccaccacatgatagagttttgtgtgattgaaatttatttaaaaaaatattatatttattttgaaaataaaaaaaattatatattatatgttatatttttcttgaaaacaaaaaataagaattttctttaactataagctgcaaattcagtcgttgcaattttatttaaataattagcattttctttctgaatttataacactacttgtgcccctttatagcatatcattcatagataatacttttccaaatatatttttttatagtaattaacacaatcctttcatcatattttattcaaatttatcgtgacatgagtaaagtggtaaatggtaattaataaataaattatacaaatgaaatactcttcaaccttttgatgttaatgaataataaaataaaagattttttcttttttataatagttatatttttaattttaattttttaatcattaaaagaaaaatagtattattaaagagtcaactattataaaaatacgatttagtagtataaaaaattaagtgtcaaaaatattaattacttttttatttgtaagatacggaaaatccaaagtccacaagttcaaaggagccacacaaaacagatgtcaagtagtgcatgcacagattattttatccaatttgtagagttagattatatggttctcaagtggcccccatgttaaaaacctaataatattataattttaggacattcattatttttttttatgtgaatgtacatttatttgatgtatttcaaagattatttttttttcgaaaataaataattctattaaaaaaaatacgaggttaaagggcctgagatcaatacaagtatacactatttaaagtaagttaggcggacactacaccaaaaattctaattaatggcatttttaaaatgtcactgttactaatatttagtgacattttatattttagtggcatttttataaaatgtaagctat

SEQ ID NO: 118989 - DNA, 818 bp, Cannabis sativa
atatatatttttttcctgatttttttttcagggggtgactgtcccgcctcgcctccatgtgggtccgcccctgcttggaggaaatatgaaatctgtgtgtttgaggggattagcattatcaccattttaatttaaaaaatgagaccttcttggaaacacaaatctcttgtcattaaaatttgatttaaattttacattctcatttctatcaagtctaaacctcatacaaaacgccctattaagatttataagaatgtctgaactctaaactttgtcagagaaattgaggaatgattttctaaccccattgcatgaagggttttttttttttttttgtgtatatttatagtgtttagggctcttgcttattagcccttgcccactgatgaggtgattacaagtaacatattaatatgggcttatctggtgaagcctgacccatgaggcgcacgatgtatgttgatgtggatgccacatcacgttgacaataaaccgtgtctaatctttgtggagaataaagacacattaaatgtttgattgccaattacaatagttccatatttaggaagatatgatcttcagacaagatctttaggagttaattttgatatcttaggatcttataattaatgagaatgcttctgagctggacatctgaatgctcgttgtttacttctcgagatgtcatgttcaatgtcttccagatgtgcgctatgctgtaagagtatctcgcctggacgagccttctgtcttccacccaaaaagtatgttcttgctaatggactgttggaatttattttaccaggatcttagaccta

SEQ ID NO: 118990 - DNA, 1136 bp, Cannabis sativa
aaactgttttaaagtgtaaaaatggaaaagcccctttatttttagtataatagtactagtactataaacatagactgagcttttttgacataacatgaacttgagaaatatgagcacgactcgatttgaaaaaatatgtgtctgagcacgacgtgatgttgcaagttgacacgttcaataagtctaaaaacatgacacgacaacatgaatagactgatccaaaaacgtatcacgttaaaaaaccttataataataataataataataataataataaataattcatttatcaattataaatcaattaaaatgatagaataaacattcaaattttaataattataattatctttttgtatgattgtttgtacttattgttgaaaatttatataaaagtaataaagttattaaaaaaatacatataatttagtaataaactcattaattaataaaaacatggaacacaaatttgagcccatttaagaaaacaagttgatttgtttaagaaaaacaaagctagcccgagtaaagagccacaaatttgagcatggcaagaaaatgtcagacctactttataaaatttttagcacggcacgacacgatttatattttttatggcctgcacgtcacaacctatttttttgtgtgctttacgaaatacgggtcaaattggaccatcacacacgtatttatagctctaattagtatgacctaggtctcgagttgaaaaaaatatttaaaataattaattacttattatattttttttttttattttgagcattttatgtatatattgaaattctaataaatattttttatagaaaaataattgaattattacatgggacactttatttacaaaaatacctccataaggtgtggacaacatttatactttttatgtgcttttaattaccaaaatacctcttacactatcacttacacacacgatcaaacgaaagttgttgggtggttaaccgaaagttgcatcagacgaaggtttcaatcccagaaagcatggattgtgggttgaaggtgtgtgtaattttttttttatttggactgtaaatttgtttacttggccggctggaagtttttttgtaatattgactccgattttgctcccccatggc

SEQ ID NO: 118991 - DNA, 1333 bp, Cannabis sativa
cactatgaaatcaatcaagatacaatatccagttctgattacagctcaatcaatcaaagtaaacctaaatgaattcatataaaagtccccttagattttcaaagtgaagaaccctttgcttcttatcagctgaaatcccttcagcagtttcatctgaactccctttagattacgcagatcatcattccttcttcagctcctgaagatcaaagctgtaaatctgatccgtggaataagatgtaatgagcaatccttgtggcgagctcaaaagaggatgtaccccaatcattttgggcgaacttctataaaatctgattttatgtctcaactttctggtttatgttcatgtttaatgtgtgttgtgaattgcttttgattatgtgattgtgcttgtaaaatcaattgtgtttgtttcattgtctaactggtttagaactcaagatcagttgagatcttgattgtctaactggtttgtgagttggtgaaggtgatcttgattgttttatataagggaaactgtattaacatctccttttcttgtcacttaagttctgtttgtttgaaggttattaagtcctggctgggatggaggactttgccaggaacaattcctgggctgttgaaagggattgaaaaatggaaaaagtacataaactgctatttttttttgtaaaaaatttacatttttacgttgaaatatttttccttttaatatttttacggtattttatcaaagtgattgcatacaactattcaagtaaaaaaaggtcccattaaaataataaaaaatgactttagtgggttcaatgctctaactaagtagtccacaattaatgtttgatgacattcttgttgtatagagtagcataagaagttggtactgattcttctggtttcatgacaccaaatttatcattgtgtttgttgttagtacaaacaagtggccaaagtcatcaaatatcaccttataaccaacagaatcggcctcattttttgaagaaaaaacactagtttcatagttaaattcagctctgagtatgagatactatgtatgactatatatatatgttgtaaaattaagttacctttttgatacaagtgtctttaaatttatatttttgagttacccacaagtggttcaaaaggagtggatgtagtagaggacataatgatgggttccttattggaagtgggtgataatggtgggcctaccaataatgcttaatgccttttacctactccacacatatacgaataggatcacctagaaatcactttaaatcatatcatacaatacaatacaattcaattcaatttagttactgagcaaaat

SEQ ID NO: 118992 - DNA, 2978 bp, Cannabis sativa
aaaatgggttaaaaaaagggaagctaaaggcccatattgtagtagtggtacttggttgaaaaaaggttgggctgattttgcaatacattacaacctattaaagtctgaagattacacattgtctttcatttatcatgaaaaccaatctacattccttgtgggcatacttgatgcaaatggaattgagataagctatccagttactagtaatattgatcatcaacaagagctgcccaagaggccagaagaagaagaaaaagaaggagctgatcaagatcataacaacccttcttcttctacatcaccacttccttctctgagaccaagaagaactgaacaaggacaacaactgaccagaaaagattcaacctttttacttgagcctgccaagaaaacaggtttggttgttttgttttgttttgtttttgtatcttttgactgatctgttgattctatttcagttaagtttgatttgtcaaataaagaatgttctatacaaccaaggagaaaatttagaagaaaaaggaaattgaggggaaaatcaaaggctgaagttctcatgagagctaaagattttaaatctaaagacccttctttcatagttcctatgcaaccaacctatgttagagctgggtttagtatggtaacacataagcttctttaatgttgattttgtaactatacattgaaaatatttatcatattgacttgactctctgatcttcttcatgttttgtcaagaatgttccatttaagtttgcaaaaacttacctgggtaagtcccaagatgtgatccttaaggttgaggacgggaggacctggcctgttaatttctcttatagacagtacagaggttgttcgaaaactgcatttggttgcggttggaaagaatttgttcaagataatgatttgaaagtaggtgatgtttgtgcctttgttttgaagaagagcattggaataatattattcgaagtggttatatttgatgaaaatggaagagcaaattctcctgtgttatcatcaggtaaacaagaactgaactctattattctataataataatgtcttcatcgttctcttcacccttaaaatattaaaatgttagaagaagaagaagaagaagaatctgatcaagatgtagatgaagacgagaaccgctctctacagaagctgaagagaaaaatgacaaataatggtgaatacacaactgatgagcctgccaagaaaacaggtttgtttgttttgtttttgtgaatactaaatattagtgcttataaatcttaacattatttgttaaaaatattacaggaaggtttaaactttgtgcaaaaaggagtgatggtatagttggagaatctgttaatcgaaagaagaagcagatttcaactttgtcctccactcaaaacttcaaatccagaaaaccatatttcaattacaagagacacatctgcaactttatcacatggtatgttttttttacttttttacgattttccaacaacacgaaaacaacaagataactaaataaaagtaacatgaaaataacatttaaattaatttcaaaataacaataaaaaaatcaacaacaaattaataagagtagaccgtattttctgtaaataaaataaaaaaaatcgtaaaaatatataaaattccgtgaaaccgtattccgtgaaaccgtattttttttttatttttttaattttttttttaatttttttttttgttatttttgtgtatttgtgaaatgatatctatatttttaacaatacttttttttttttttttcatttgttgaatggtgaattctaggtgttagaagaagaattttggagacaaaatatcggtgatggaaaatgtgaacatgatgttactctatgtgttcttccagagaagacgaaatggcatttaaaactccacattagaagccaagctacaccaccaagagcttggtttgacaaaagagagtggcaggaattcattgagaacaatgatttgaaaattaaggatgtcttaatattcgaattgatcgagaaaactgaagaaattattgtgttcaacattatcatacaccgagtcacccaacaaagccaacaattacaatctcatcaaggttagtaacttaatgatttcttgttggggtaaatatttttagtgctaattctatatacactttgttggtatgatcagaagttgaaggcaacaatatgatatctgaaaccaactccaaagatgacaccagctgccatgctagtaaagacaagccttcatcttcaaaggatggccaatttttcggagaaggaacggaacaatgctgttatcctagtttcgaagtgaaattgggagaatctattgatgaagtacaggtatgaaaatgtcataaatatttaaaaacacgattttattttattttatttgtgtatatgacattttgtagcagattccgaatgattttgtaaggaaacattttgaagaaaagccagaagctgtgaaaatccaggacaaggagaagaaattttgggaggctgatttgagatggagttcagatcaagtgattttatgtgatggatggtctaaatttgcaaggcaaaatgggctacgtcctggagatccttgtctatttcagatggttagcaacgaaatggatcgtattgtgctcaaagttaccgttatcttttatgtttgattacatcacaagtaatcttcttgtatatcctagctagtacaaagaaaaagcttgtgaagtgtgttgatggtgagagacaactctcttcagctaggtgatgtgtgcatctttgagctaatcaagagatatcaaattcacatatttaaacaaatagtttgactcaacagtagtatatatgtagtaattatgcaaaatcattaatattataggaaaattctacaatgcacacccttaaaatggatatattgatgcacccctatctaatttaacatccgaaataattttttagtca

SEQ ID NO: 118993 - DNA, 859 bp, Cannabis sativa
taaattagtcataactattcaataataatctaatggacacaaaaaatgtaaccatgatggttatatatttaatgtaactattagaacctcctccaataatacatattctaaaattactaaccatcacgagaactttttttacatatatataatttgttaacaatattagaaccctacaattaatatagcccgttagagcacctctacgggttaaaatattagggtttttacaaaagaaatactgaattttgaacaaaaatttacaattttactgccacataaaatttcatattttacaatcttcattaattaatctcgtagttaattttaatttttttaatcttcatttgaggatcgttataattatgcaaataaaaactttgataataatcctcagaactaactagtactatataatgatgagcttcaggtaaataatgctggggtagcaatagtgagggctcctacagaatactctgctgaagactatgagattcaaatgagaaccaattttgagtctgcgttccatttctcacaactaagttatcctctcttaaaagcctctggaaacggaagcattgtcttcatttcatctattggggcaacagtggcttttccagctggtactctctatgccgcaacaaaaggtatgaatatatatatatagacaataataaaataattactagcttaattatctataaaaacattacaacaatggtctgttgtcctaaataatccttattattagctgtgattgttgactagtctatataagctaggacacgttgattctaagtgtatcaagattctgttaaggtgtagtgtattgaattagttaggaagttagagtttgtta

SEQ ID NO: 118994 - DNA, 1440 bp, Cannabis sativa
ctgttgttgttgctccgggacactgtatacatcaactggatcatcttcaatatgaacagaattgacataatccctggcctcttcctccaaatcatagtcagaaactgcaaaaaaagctctaatttagacccaagaaaaacagaacagttttcgacgaaacaaaaccccctatttattgttcaaatgacctggtggctcgggatgagggctaggaatgttcacttgggaatcaaatttgctttcggaaagctcgggtgtttgatgctgctggtaaattgtttcatcattaatgtactgaaatacatcattgagaacaaaataacctttctcttgaggagccaagaaaaaggtttggataaaatttctcctaaaagcaaagtcctttgctttaacagaacccgaaaccaccacgagtatacctccattccaagactcaagagaattgattgtcttaatctctatagcagtaaaattcagagacataataactgaatgaatttgctgcaaaaacaatcaaacaaaaaaacccaacaaacataaagtcaaacaaatcaaaacaatcaaatctacaaacaataaacagaaacgcattggtgctctttggtaaaattttcaatatttgttttttctgattcaactgaggaaaattttctcatttgttcttagtaaatctcaacaatcaaatccacaaacaataaacaaacaattattggtactcttaggtaaaattttcaaattttgttttttctgattcaacaaagaaaattttcaaatttattcttaatttctaattaaataaacagagaaccaattaatttatatttatttcaactaacgatatggaattcaacaaatacaatccaaacaaaatattaccagcatttcagaaacagtatcagttgaatcgccatcgatgcgaaccatagagcttgattcagagtaaaactgataaactagatcgggttgctgttgaagaacttgatagtactgtcccacaaagtaggagcctacctgaataatccaatccaaaaccaaacataaatatacataaatccatcaacacgctccaaatgtaaattcacacgtaaagattggatttttttcaaacatttaaaaagaaaaatcgaacctgaacagcactgacaggacccggatacgcattcgacatggttaagggcacagatttattcaaaatctagaaagaatgaagcatgaacagacgaaatcctctaaaacccaagggtttgcagaacatgcgaaactgtggtgagttcgtagtgagagagagaggtatataaaaggtaaaacaaatctatctataaatatataataataataataataataataataattaagttataaataatgattttatgagtttgttttgattgatttatgttataccctaattatatattttatttttcaatataattt

SEQ ID NO: 118995 - DNA, 1671 bp, Cannabis sativa
ccccccccagcgtcaacaagttcagacatggaatccgtttgctcattccctctctgcatctctccttgtccaattggatcgcacgaattttttggtatggatatcacaggttattccgactgtaatcgagcatgatcttgatgatattcttttttctggtgttccacacccaagaactcttgtcaatggatctcctaacccccaatatcttcaatggaacaaacgtgatcaacttctactctcttggctcagatcctccatgattgaaggaattcttgctgctgttgcctcctacacaacttcatctcagctatggcgtgctcttgaacaacgtttcacaagccaatcttgtgcccgattactcaaactaaaaggtcaattctctcatgtttgtaagtgttctttatcaattttctgattatgtggacaaagtccaatctctttctgattctattatcactgctggttcctccatttctgatcaagacttaatacttcaattgctgaatggattgggtctttaatatgattctgtcatctcgagtatcacttctcggagtgatgatctaactattgaagaagtgcaggcccttctaatggctcatgagagttgtcctgatcatcataactctcttattgatctgaccttaaatatgcaagccaatcttgcttatggaccacaaaagaatggtccatctcgaccatttcaacctgctgccaaaggctttgcaccagataattcctctcgatattttggccgaggtaatggcagaggattcacttccaatttgcgtcttatatgtcaactttgtttaaaaagtggccatacagcagctgtatgtcactataaattcgacaagaatttggttacctccaaacccaatgccaacaaccctcgggcttatcttgctgatatagaaactgaccaagacactaccagctactcacctcaagttcttcctaattttggtgatgactttggttggtttgttgacaccggagctacaaaccatgtcaccaatactcaagacaaccttgatagtgctatagtctatactggaaatgacttattggctgtaggtaatggtaagaaattggctatttctcatataggctctacctccttaccctcttcctctcatacatctcttaatctcaatttggttctcacagttccctctattacaaaaaatttgataagtgtttctcaattgactaatgacaataatatttttcttgaatttcataaaattcttgttttgtcaaggacaagaccactagccaagttctgctgagagggaggcttaaagaaggtctatacttacttggagagggttcttcaatctcaaaaccagccttgcaatgcaaccttacctatatgtcatctgatatgactaataattcttgtaattttcatactgataacaacatcagttcttgtaacaactttacaagtaataaaaatccatctttttccactaatatgaatatttgcactcccactatttttcattcatctcttagcaaagatgtaaacactttgcattgcaggctcgggcaccctagtgctcaaactttaggcaagtcattacctcagttggcacacaatggcacattaaaagacctaaaattttgcaactcttgtcaattaggtaaaagccacactcttcc

SEQ ID NO: 118996 - DNA, 1837 bp, Cannabis sativa
caacaattttagttagaaatattgatgatattagtgggataagttgattttagaaatattgaggtagtttagggtacttgaagttggccaaataccctagagatagagatttcttagtggctatgaaataataagataactattaataataaagtgttatcaagttctcaacattggccctcctgccttatcgcacacctacgacttcatacaaaaggccccactgacccactgcatacttgctcctctgagctactttcacgaagtcaatgatctaaaaatcaccgaaaaattttccctctagcttctgcttttgtcggctctcaaaactgtgtcacaagtccatctcccaaaatcaaccctgcatcctctaattactcgctaacttttgacagacttgataacacgaagtcttactcttaagacttgaagtcatcccaatcctctatctcccatcagcatatgctctctgaaccattcggcttacagtgtcccatacaacaccagtgtccccataaacacaaaacatggccatacatgccgcaaactaccttagtcttgatctcaacctatgcccctgcatattgtctatctgcagcttgcaacaatcatgcaagtcttcgcactgaacaacccatctgttgtagtgtttccctctagattcacacaccaaaactgaacaagtaccctcaagatatatctcgcaagctaatcgcatactcgcatacggtccctctattccaaatgccactttgatgaagatgttcaactaatgcctcagtctttctgactcttcgcccctggacatttctatgttgctgtagtacctttgtccttttgactttcaccttaggccaacattgccatggtgttatcttagtacctgagtcctatagactttcaccctagataacgggcactgcctgtgtcctgagtcttcttgactttacatactgaacaataatccatgtccatgatacctatcttgatgcttgtaatgaataacgagtttgttaagtgaaccgtgagtctctcccccacttcatctgttggtgtcctcgacaacatgcccacacacgaatgcctgaccaccaaactcttcatgggaaccatgtcttctaaaagtgcatcccgtaggatgtgactctcgagtcaactatctcatatagcacccctgtcgatttccatatgcatgcaatgttcgctcaacatcctacttattcacacttgcatcacgcccttctagctcccacgatgtactaatttccaatgatgcagccctctggcctccatgcaaactcaagcacccttcttgatcttcgcagacaaacatgacttcaaaatctcactagcacggctctctggcctccacacaaactctagcgccatctcaatgcttgcgctcggtcttcttagccctgctggcttcttagatgcattcattccacaactccacatctctatcgatgactttgtgtgacttacgcccactggctcttttacaagccaacacattccactcaactgtctcggcactaccatctggatcaaataaaagtcacatgcgaatacctctaagtataatcattctctagcgattgcggcctctgcccccttggtctccatgcgcgtcccacttgacacacacgtagcaactgaagcattccatttttttaaaaaaattaaccatctcgttcatccactctcgaccgctgtcgtgactaacaagaatcttgtggcccctgcactacttccacacccatgtcaacaagcttcctttgttgggttttatgccctaaataaaactcatttaaatataataagatttacttattaa

SEQ ID NO: 118997 - DNA, 1019 bp, Cannabis sativa
  modified_base (978)..(978): a, c, t, g, unknown or other
atgacttactatgattattttcttatagctcttgaaattgatatctctaattctaattatcaataaagattggtggcaatgctttcaaactggagtatgaccagttcacattaaacttggaatcggaaccagtataattcttgcgtgttgattgtgtctgacagccatctagattcatctgtttttatttttctagtttaatgtgtttgctgattttttgttcttgattgtttgttttgatttaacatttatttgtttaagtgtgatcttgaagcgcgctggaattacaaaggttaattcctatgtatcagagctaaatttctacaaatcaaaacttggttctttgatcatcaagggagattcaaatatcacttgcttccacaccaagaactcatcaagaattcatcaagaactcatcaagaattcatcaaggaattctataagaacacaaattgaaggagaatgtcgatggctgggttcaaactagagaaattcgatggatcaacagattttgcactatggcgaaagagtttgaaaggtatacttgtgcaccaaaaggtggcaaaggtactcagagatgaaaagttgttggctgagaagaagccataggaaactgcagagatggaggagatggcatactacaccatcattatgtgcctgttcaatggagttagaagaaagctaatccaagaaaagaccgcaaaaggattatggaacaaactagagcagttgtacatggcaccatcaatttcgagcaaaattaatcttcttgaaagattatacggggatgtgatctcgtttgagggtgttcatgcgacattaaagtcaaaggattttgaattaaaactcgagaaggagactaggaaagaagaagcatatcttgcaagagggagaagttcaaagagaggatcatcaagtgtaacgtccccacttcaagcctccattgggtcctcacacccacggaataatggctcttanacacgagtatgtcactctggctacttcatggactgatgact

SEQ ID NO: 118998 - DNA, 1308 bp, Cannabis sativa
tagttagggtgttacataaatacatggagagcgaggttcaaaaatcactagcccaacacgaggtcgtggtcaagcaatggaacaatgctcaataggtaatcaattgtctcactaaggaagccaaaaagtcaaagaatagtcttgaagaagtcgagaaggcattaaagaccaaaacggatgaatgtaatgaacttaagagggtgctcgaggagatagaggtcgaaactaaagagcgatgaaatcgggtcggccttcgtaccatgtatcgagcgtggatggccaatccaagcatggacacgagctttctcgaggaagatgaggaggaagttcttacttactgcgagaagaccaggaaggaggaagaagaggccgaggtagtgggagaagaggatccatccaagtttcctacaatgtaggcttggtttttatttatctctttcttctttctttttttttttgtaaggaaatggccctagagccgagacaatggtttgccccttgtggcactttttgtaaagacaaatttacgaaattggatggccaacattgctttttattttatctttaaatgcctcgtacttttatgtttggacttcgacatgtacttgtttgcttgtgttttgttcaaaatttaaacagtcatgttttgatcgtacacaaagtattttaggaattctcattactcgtatattcctttgacattaagtagttaatagcctactacacgcgtgagcagtttatcatctgccatgttctcgatttgcgagcggttattgatttcgccttgcaataacagttataatctatttcaagcaattttgaatatacttttaatgatcttgtcactttgagttatatctcatttataacttttaattttcctctcttagataggtttttaatcaaaaaattataattatttgatccctttctcgtcagaaaaatttgatcaggaaattatgtcagttcgacctctttctcgtcaaaaaggtttgatcgagaactttaaaaaaaaattatttttaaagtggtcggtttgcattataccatgtatttccagataaattatggttaatcatgtacatatgcccctcaagtaattttaaagggtcatgctttataattacttgtcgaaagaaatgattaaactttattcacaactgaaggtcaaaatactacattagtgatgtggtttataatcattaatttactattaatttatcaatcttccagaagcatctagttttgataaaatgagttttgatattcagggtcaatccctaacatattcctgttgggttttatgcc

SEQ ID NO: 118999 - DNA, 1235 bp, Cannabis sativa
aaaatgtaaacagaatagtactttggagggttttcccaccaaaatatgaggttggatggttttttgcaagtaaattgatagttaagggggttttgccgcaaattactctatttattatgttgttggtttaggggactaatttaaacccaaatcagtaaaactcattgatccttgtaaactcatctaaaacccattttcactttacggattcttgctaattcgtttcacaaaaatttcattaatttaaacaaataaatctgagaagaaaatcaataaacaagagctgatggcactgaagcttaagcttgtcaattggagtggaacaaatctacatcctgcgagttgattgccgatgcctaagcgcgcccaccaagggcctacaaggcgatattttggtttggggagttgaaatagtgagggtgatgttgtgtttgtttgtttgccctttttttttcttttaataattttattgaaaaaaataaggtttatttaaagttaattaataagttttttatttcaaaatgcatatgtgagtttgcttaaaaaaaacaaaaaaaatctgcatcacatcaaataaatttgataaaaattgcattcctgtttgatctgacctactctctcaagaatcttgaatgggcttataattttgggactcaactttctcctctttccaaacctccgaatttccttcattggagatacccaaaggaaaaaaaaaatccaaatttaatatctctacgttttggatctgcgtagcttttctgtctactctgtgaggcaagcatatgggctcgaatcttttcaatagcctcactcgttctttggacagcctcgggtccaagatacctatgttcaccggcttcatcctaatgaatgggtgaatgacacttccttccataaagcatctcatatggagccatgccaatagtgtgcaacattatacatttttatatatataattatataactatagtcatattcacatgagtaccttattattattacataataaacataacttctttccaacgtctattttgcattactttttaaatattagttttctaatcaaagttatataaggtaatatatatttatgtggagtaataattttttaaaatatattttttaatctttttataataaatggaatttgatatatttaataataaagttcatgatttggctatattatctttttactaattgttataaatattaataattatgtggat

SEQ ID NO: 119000 - DNA, 995 bp, Cannabis sativa
tggtaataaataaaagatttggacatccacataattattaatatttataacaaaattatttattattttattcttaataagtacttttttttaataccacttaatcatacatttaattaataatattaaattaatattaattaatccaattcggtattatgacataatgcttctttatctattatttataaagatgacctcctaattattatatcattcaatttattataaaaaccattcatattagtatcttcctatacaactaataaggcaataatctcaatactttattaacatttacttcctatttatttcaatatcttctcaaaataaaaaataaaataaaacaaaatattctcaaatcacaattaatgtccctacctccaattaattacaaaatcccacatttataatttaaataccaaattaatattatgttatctataatattatgttatcaataataaactcaaatttataatttatatatccaaaattaatattatgttatctataataaactaataaggcaataatctcatatttaaatactataattattcgctattaaattttataatatttttaatcacacatataataaaatatttgaatttgattttagtacgataaattatttaagaaaaattaaattaaaaaactttcatgtaaatcaaaataaataaaaaaaatacactgaaacactaatttttaaaaaaagaagtattaaaagacatgcattcttttcagtattatattgttatttatacaattgagtattgggtctcatataaaagtaataatttctagagaatatcgctaactaatcttaacgtgacacctttaggtggtactaggcaacactgatagataatgtatatattttttcaaagaaaaatgctaatgggtatccatagtacttagtgtcacgggctcaccttttcaggcagcggaagacccgtgcgacaccttgacttctctaagccaaggtcagc

SEQ ID NO: 119001 - DNA, 668 bp, Cannabis sativa
ttgaggcactctattagttgcacagatacgacttataccttgaggggttggctaggttctgaagatggtgggtgtggctcaatacattaatattcatgtggcgacatggtcattaggctattgagagacacacaaccatttgtagagaggccaagctaaccttctatattttaagcggtgacttttatgcgggtgaggtcacttacattgttttcgcacttacaccacactgaaaagatgttctatcttttagatgagcgaccttccaggcagccaaatgctcgactcaggaggtggggctttcgctgatgaactagataaaagcgacaacttcataccagcctcgatttttgaagaggaggtccctgctgctaaagctgcaactttgggtccactatcttctaaagagatagaaaggatggttcagaaactcgctgaaccagggacaatcgagattcgcaatactcaatccacggtgtcttccagggtcgatctggtccattccaggcatgctcctgacatcgaagctgaggagatgggagaagattgggaagttcctgatcacgagtcaggggaagaggaggatgtcgaggtaagtaagacggattcagtggacaatactcagctgaacaaacccttctcatccgaggatctggtctcgcaagtta

SEQ ID NO: 119002 - DNA, 753 bp, Cannabis sativa
ggccctgtatatatatatatatagttgataaattaagtgagcatcatgagatgaagactgatcatcactctcaattatatatctatatatataaatatttatatgtatgtatatgcatgcatgtgtgtgaatgaatgtatgagtattaaatatataaatactactaccggcatggcacatggtcggccaagagaaaaacttgcattgcatgcatggtaggaccataatgtaataattaagcaaaggccacatcaacaaatttatatatatcatcaataataagaaggattaattaattaatatcaattttctaaccttaatttcttttatttttaatatagaatcttaatttttgctaaggcttgttgattgaaccttttgtgttttgagaatttaggggtattcgatcttttgaatccaattattgacatgtaatatctttgtagtgttataatcaaagatattatgaccaatctatcaatttaatacactaatatactattttaaaaaaattggatccaaataaaattattttattaaaagagaggaaccaaaatcatatatcttaacaagaatatatagctcatgagttgagttgtaaataagagtcggaattttcgacacgatatgagtatgaaagcatgagcacgacccaacacaaagagagagagagggagagagagagaagagcaaaaaaggaaaaaaaatgttttttttttttcaaatttataatttttatgttaaattaattta

SEQ ID NO: 119003 - DNA, 1426 bp, Cannabis sativa
  modified_base (1400)..(1400): a, c, t, g, unknown or other
caaacacaggattactttcagcataatccaatcttgtccagtccagtccaatcctgcgtaccaaacgagcccttagtcatgtctttagcttccttagcaacactactaataatatatccttcactcatgattactgttttcttcaagattcacagaagaggaagattgggacagctaaacagattggacgcttgtattttttgctgccattcttcaatactagaataaaatcacaatgtaatcaatcatgtaattctactttttcttggcattgtagatttggacatccgtccataacaaccaccaatttcatcaataaaaagtttcatttgaatagttctcacaatgtcattccttgctccatttgtcatttagcaaaacaaaagcgattaccttttaattctcaaaataatattgctaattcatgctttgatttgattcatcttgacatatggggacctttccacatacatagcattgaaggttttcgatattttctaacaattgtcgatgaccatagtcgttttacttgagtttacatgctccaatccaagtctcatgtacaaactattatccctcaattctataacctcattcacactcaattttctgccaatattaaagggtgtgataatgcaaaagagttgaacatcacatccttttaccttcaaaaaggcatacaaatctgcaactcatgtgttgaaagacctcaacaaaattcagtagttgagagaaaacatcaacacatttaaatgtagcaagagctttggcatttcaatcttttactgccttagtttattggccatatttgatttaaactacagtatatctcattaatcgaacaccaactccatcacttcagcacaaaactcccttcgaaatgttgcatcttaaatcacctaactatgatcatttgagaacatttggatgccttgcttatgcctcttctttgccaagcaagaggcacaaattctctccaagagcacatgcttgtatattcattggctatcctcgaggaatgaaagcttacacactccttgaccttgccacaaacaacatcttccactctcgagatgtcatattttatgaaacaatattccatctcaaaggttccattcaaacttctcaacttaaccttttttttcctgttcaacctgtcattggtgctcactccccaactgctgccaccaatacactaaaaaacacttctgctgccaccaataaactagaaaaaaattctgcagatcaccctactgttgcagacaacaagtctgcaaccacaccagatatatctgcagcatctcttcctgccccccaaaaatcacagcaacaatttcacctactaaacctcctacatctacatctacacctgcaacagtctgttgggttttatgccctanataaaactctttacaatctgattagt

SEQ ID NO: 119004 - DNA, 750 bp, Cannabis sativa
gttcaaactcataccttttttttatcacttcatattttagtttcaatttcatatcaccatacatttgcatatattttttttttttggacatttggtcccatgttagttaatatatagtacgtaaaagtggataatgttttttataagggagggatgaatgtgtaaaggattttatattatttattttttttttgatgaaatggtataaagttgattggattgttgcaggtctcttgggaaaattgtgggagacaacattgtacgaagacatacatgtaacatgttcattgttcatggtatggtgaatatgagtcagattcttatatttcattttattaacatatagtgaaattcattttgattataatccatatatatttaacaaaggttaggtatccatatatatttttataatattagtctagtgtagaccatatcataatgcaataacatgtatctcaattaagatattactatatgttgttaattatattatctttttcaatcacaattttatttatagtacaaattcataagatttgcaagtaggggtagacaacatctaaaccctatgaaattataacgaattaattcaattcactcaattactaataaataaaaaagatattcaattaaaattagattgaattaatttattgtaaacacacaacaccaactcaaaaataggcaaaacaaaaagaaaaaaacaattaaaacggaaaacaattaattaaagcaaaacgaaatact

SEQ ID NO: 119005 - DNA, 1248 bp, Cannabis sativa
ttcttcatattatatatatgtgtgatataatattgtgtaatctatcttctcttctacttttcatatatatatatataatatatatagtgtatatatatgaattgtaatatcttattctaacttttatattattttacaatagaattacataattgtaatgtatcttgatttattttccattgtaataaaatctctaacagttcgaaccacgtgatatgtttctgtcaacctcgaatcgagcaaaaaccattcttgaacttttcttgtatatgttcttgcacatcgaactcaagctttggttccacttgttgtaacaatagcgtctcaaagagcaatatcaacaaaacaagagcaacaatgatgagttaatgatcataatcagaagttctaaacatgaactaataaactgaaatcaaagacagaaaaataaagtaaattgagaagaacagataacgtggttcgaacaagataaaagtgtgtcacttgccatgtccagaacagttttctcctacctgactgagtctcgatttgtaatgaaggtggatgattgttagaaattggtctacaattgagacatttttttttactcccacaactcacttaagactcaaagagaataaactaactaattttgttatgactgttggaggctctttaaaaatcataacctatataaactgtctctactactattttagtgagatgagttgtgatgatccaaggatctagagagatagtgagaacaaagagaaaggaaagagagagagaagagggttgtaatagagattgttctttttagaggagatttatcttaagtgagattattttggaaagtctccatgagcgtgtattgttacagtgctctgtaacttgactccttgtagctctttccattgatcaataaagattaccaaccattgaagctgttttggtcgtaaagtaggcaagtgacactgcattttgttcgactaccacgtaattcttgtcaatttacttttatttttctctctctctttttttttttcagtttagatcagcttttaattctgatcatatatttgtcattgttgttcttgttattgttgttgttcttgctctttgagacaccatttttacaacataaaaaagataacttaggcaattgtttaagaccttgcagatttttttttttttgaaagaatacttttattactaagcaacactaggcacatctgctattaataaagcagcagcacaagaaggtaacat

SEQ ID NO: 119006 - DNA, 659 bp, Cannabis sativa
aggagtcattatagtccgctgcaatcaatgtaaggttgtcttaaactcttatttgtttattttcataattttagagaatttttatttaggatgttaattcaacatacttactaataaatctagatcttggtaaaatattctcaacaataactgtatatatatacacataaaaacacatactttcttagaagcatcgctggcagagacggagcactacacgagcagaggttgagagtggctggaggtgttggtggaattttcagaaagggaaaaaaatgaaatggtgaaaaaatcagagagagaaaaatgggagaaccggggctgggagggtttatataggggaatattaccagcggacgcccaccggtaataaaggtttctgccagtaatataatatatattaatattttattgttattagcgacagatctctgtgggtaaagatccgccgctaataatatttcgaataaataggcgggacttttttagcattaaacaactctattaataccgacggtgggatccgtcggtattaattacttattcgccggtattccccattttaatatactagttggttaacacgtgctttgcacgtgtgttaaatcttttataattttattaagtttgtaatgtacaattaaaattaaaaaaaaaaa

SEQ ID NO: 119007 - DNA, 1970 bp, Cannabis sativa
  modified_base (1854)..(1854): a, c, t, g, unknown or other
acaaaactgtttacattttttgtatctgttcgtgttagaaattgtcatcatgttggttatattaaaaaaacaaaacgttatcaaaaattaaactcagggtcctatttttatcattttagaaaatataaggtctattttgtcatttaacaaaataaagggtccaatctgtaacttttgcaaaacacagaatctaaaatagtatttacccttttctaaaatatgtttaaatataattacaattacattctcattactttttattgataattaattatgtcatcttttaatttttttattagattattttattaatgtctcctattttttctttttctttttttcttaatagatgatatgtaccattgtgtatcattttcttaattccttttttttgtaaggtttttttttcatgtatatactaaatgaaaaaaatattacacaaatgaattaaataggtcctacaaacatttatacagtctagcaacaaaaatttacaaaaatacatcttgctgtaaccattcagcctcactaaccaccttcttcaactacaacttccagcaaccaaactagcagaccaactaaaaagaaactaagccagatagagaatcaccataaattttggcgacttcacctgagaaaaagactggaagaaatctaaacatatataatttcaaatttatgcaaaatcaagtagaaaaactggttcgaaactaaaattcaatcctagattacgattaaaattacagaaaacttatcctcctaatattaattttcaaattcataaaatatagttaattgtataaaatagatgagaccttaaatttacaagtagtttaatagtttggaaggttttaccgtaaacattttaacttagagagttaagtgtaattggagtgataactgaaggaattttgccgcaaaaatcttagatgaggaaatagatgtgtttgcatatggaaccgatcaccttcaaaagcctatattacacgatgaaagggtcacatttggctctattatcaatggataataagatgatcagctatattttttctagctctaaactactgattaaactttctcaccaagtagagtctatgattataacaatagcatcttaaagcctcctatatattccaagaaactcaacttgatttccatgtaaattagcatttcaagaccctttgaggaatggtaatgatgaatggtttgattgcataatttttgtgatacatgttgataaagtgtctccaaagaggatagctcataggttgttcatgacatttattttaaagttgacatttaaatttgattttgttagacaagtaatttcaacactatacgtatcgttttaacaagtaatactcacaaagagtgaggtcgatcctacgagaattgtagttaagtatgttaaaattaaattcttacttctatttggctaaataaaattttaaaagaaaattaaaatcagaaaaacaacgaaagtaagaagcatgtaaattaataaatgaattaacaatgaataaaagttaggattttcgattttagttgtatctattgattatgctttaacatgattctattcctattaccgatttctatgcaatagcaagtttactaaagtaattcatagtcttctcagatatataaacctcaattacgtgcaaattttctactctcgtgataaattaaacatgtaacatgcattaaacacagaaaccctataagctatctaaaccatgtaggtactctcgtcctatatcaaaattcagttctattttatagcataatcgacactcactttttaaatctcgcatcaaaatcatagacttctaattggtgatcaggcaattaaangtaattaagtacgaatgaaatagaatacatagaaatttaggaaaaattaaatcatattaaaaccaaaaattaatatcaaataatctccatccagaccctaatgaactgtttagcta

SEQ ID NO: 119008 - DNA, 1720 bp, Cannabis sativa
tataggcgacggtttacagggtataggcgacggttttaaaccgtgccctatacgatagtcggcggttttaaacaatgggcacgatttaaaactgtcgggaagtccacattagcgacggtttttaaccgtcacctatttttcccattttacgacggtcatataagcgacggttatgaaaaccgatgggaatactttaaacgactgtttaaaaacattgagaaaaataatttttatagtagtgtaatattatagtttagttttttttatggtcgtatatgttgtcgtttactgagatttttgaaaactaatacaatatgagaattaaagcttaagaaatataataaacgaagaatcaaaccataatttttacgtggctggagcgttaaagccttagtccacaagtcaatattatttaagattgaaaaggccttaagatttacacaagtgtttgaaccctagaatttgcatgagcactataagaatgagattctcaccctttgcatgaatgagttttcttacatttatagtgttaggattcttatatgtacaccttccccactgatggggtaaatataaatagtataatatcattttagctaatttggtgagacccagctcgtttgtgaggctttgatcttctgatgaggtggaggccacatgatgctcatagttgtcaaatcatattctacttttatggataaaaagacacataatgcttgtttgatatttactttatttacttatttggaaggtacaaattgtagacataatcttggaaataaaactatgatattgtgaaatttgacaataaattactgtgatacggagctggacatccagatgcccatcaatcactcatctagataatctttttgatgccatccagagatacgctgtgccaaaggtttatcttgtctgaaagattcatttgtctagcatccggaaggcttgtctttgctaatgaatacagtccactatctttgtcgggcctgcaatcaggcgtgaagcaactgagctgaaaccatcttggaattacacgtgtcctctatccagaaatatggataacatttacccccccaagccttcaaaacttaaggggttttagaggcttgctttcaaccttccaaatggcatgagggcatgtggacgttaaaaaggtggaaacctttttgaattctaaacaaatttatttatggttgacagcctattgctttgtgaaatgaagcacacatggcattatttctttggctcgtgtgcataactttaatttatggagcgcttgcagtatggatttgcgaaatgactggtgatcacgtgagtaactgtcctgagaagaatatcattatttgaatatctcggttccaaaccatgcattaaatgcaaatttgattatttttgcagatcattggatgtaaagtgtattttcttggatatcatcttgctcataatttgagttcacgcgaatcaccatcttcgttgtataaatacactaaaattttcccatttacaatgctttcccaaatttcattatgatttcaaatcttcaaagagataaagagcgaaaatagcttttggtgaatgcaccactatttcaacaagtgtatttatcttctttttcaagctcgtgagcgagaatatctaggaataccacccccagttttgaccattgattctgttgggtttttatgccctaaataaaactctttacaatctgattagt

SEQ ID NO: 119009 - DNA, 746 bp, Cannabis sativa
agggcataaaacccaacactaccaagccgaccaaactaaagaaccacgcctttttgattgtgacgtatttactcaacagagacataaattcctcatatggatggatgaccaagagtacatcttctgatctttccaggaggagttggatcaccgcaacacaaaaactagcgacctaatgaggtagttcaatcaaagaattggttgaagaagctaggatctcatcagagatccactccaaggaagactagttgacatatcggggagggtctatcgacaagctgtacaactagtttcttcaggaacaaggacagaccttcccttacctaaaggaggacaaaccttgccataatgatctaatgccgagaacagttagatcctaccaaccagcggtcttagggactaaccagggatcttaggctcaacaacaacccccatcagatatgctttggtcggccaactacctacttgtgaacatttggccgactaggggaatgatctccctccctgaggcatctgcgagcgagcaacctaaaggccaatctttaactggctaggaccacgaatgagtggaaagaccgaaaacaatttgagaagtgagactgatcacttcaggtattgagatccacctaactctagaaattggtgcgatctacctcctatcaacgcaccagcttcatcagacaagtggggacatgggcggcaaggctttgccaaatatagggctggccagccatggacaactgcct

SEQ ID NO: 119010 - DNA, 1240 bp, Cannabis sativa
  modified_base (1178)..(1193): a, c, t, g, unknown or other
gctgacaattacaactccttatgtccaaagttgactagccttaacacgcacatgcatccaaaaacaggaaacattttcgactaagtccccctcagagaagtgcgcttcaattcttctttcaaaggctaaatccaagcatgaattcagagataagatacgtattcagccaaaattattgaaaaaaaaaatagaaaaatacgcccgaatcccttcttacgcatctctgcaaacttcacaaaggtttagcccatcaggttgcataattggataaatggaaggatggcaaggaccaaggtaaggaaaatgcctaagtctaaggtgttcgcagacatcactcccggagctcaacctcgtccaagaactaaaacctgaagaagatgaacaaagaagcgaaggctcccctttcatagaagggaaccatctgttggttaactttgagcgagtggcctcctcgagaagaaagtcatgtgacaggaaaaattgtcacggtcccaggaaagaaagagttaagttaaaaaggggttcctgaatcgatcaagagataattaagactaatgggaaaaggttaaaacactggccgttggaaccaggtgcttcgataatacaatcagctcctaaaagtctaccacaacaaatctctaattaaagaacatcaaaaaaggaccctatttactattatagccccccgcggccagggagaattttaattgtgtcaatggtgaaagaagtatggttaaagggacgatatacctaaaaaaagaagaagaagaaaaataaaaaacaacattaatttgggaggcctgctagaggtttaaggttagataccgcccgactggaaggaagagcccgcaccagaaatccgccccacggtctttgtgtatagatcgtgaacaaccttcatgctccgtatgaagcgagaatggtggaaattctcctcctcaactgctagtttgcctgctacaaacccccaatcaagaacttggcatctgtaagttccgcctggaaggtcttattacaaaccaaaacaaaaagaaaagtttaggcaatgtctcgaggccttaccccaaccgcttgcaacttggtaggatgggcacagaaacatccacactactgtaggacgcccaggtctccataggtagttcagaggcgctcccaactattgttggaaattattttannnnnnnnnnnnnnnnctaacaagtatgtttcattaacatgctaatatgaattctaaaacaat

SEQ ID NO: 119011 - DNA, 1077 bp, Cannabis sativa
atatatatatatatttaaacttataaatatatttgatttttattggtcaaggccatgcctaattgaaatagagtcagcgtgtatcaaaattatttggctcaccttactctttttcaggatagatgccttaatgcaaatggattggcttggctgtacaattttactttttattcttaatgcttgtcatgttgtttcttatatactgtgctgaccatgtatatactgacgaagacttaatcctcattttgtttctttcaggcaatgaatggccaatatctttgcaaccgtcaaataacagtttcatatgcctataagaaagacaccaagggagagcgtcatggtactccagcaggtcagtttctcttttcaccatgatgctgtatggtacttccatttgcatcaattcaccgtatttctgcaattaatcagaccattttgataagaatgctcactgacttttcatttatattcgcactacatgcttgaattgctttgtttccttttcctttttctggccatggatatatgccttattgtgttctgttgggataataattattctcatatttgtgaacattacctgcttgcagagagagttttggctgctagcaatcctacttcaaagagcaggcctcacacactgtttgccagcgggcctccaacacttccgaacggtcctcaggttaatggtggtatgggtgctccagtgccaccacggccttttgcaaatggtgttattcctccaagcccaattccttcaatgcgtccaccaccgccacaaggtttggctttccaacacatgcaagtacccggacaacaagcttggcagggtcagccacagcaacccggccaaggtcttcccccaccgatgatgcacccacctccagtacaacaataccgaccacctccaaacatgccgcccccaccccaacagggaattcaacttcctcaaaggcctcttccgccacccatgggaatgggaatgggaatgggaggccaacaacaacagccccatcacatgggaggccaacaacagccccatcacatgggaggccaacagccgaattggcggctacc

SEQ ID NO: 119012 - DNA, 1965 bp, Cannabis sativa
gatgcgaaaactgaattcactaagtgttggtcgctttgcgcgaattgctgatcgctttgcttcaggcatgcctatgaggcatcctgttcagactgtaccctctgagaatatactcgaagttgattccacgtgtcaccatcatgtgatgccacgtcagagtgtaaaaattgggataacaccatgcataggtagttttgtaattaacaaactttttaaaatataatattgaaaaacaaatgttttaaaaaaagtttaaataaccgtatatagacataaatgtaaaaaaatggcaaaattgggcaccaagtgtaaaaatccctagcatttttgccatgaacttttacactatcaagttgtacctcttaatctcttatagtatagaatttgttaataatacctctcaaaatatattttttataataacctagtcattcaattatatttatttaattttatcgtgaaatgaaagttctaccactaaaaaattagtttgtagggttaagtgtcacaaatcgtataaaaaggaaaattacctaatacactattttttaagtttttttttcaaatttacagtttgggttgctccagtggtttctatgtgggttgatatgttgattttggttgcaatttaggttgctcttttacttgctatgtgggtttttatgtgaattctcgtaaaaatgcaaaaaagaactatcttgaagtgtggaccctattaaatcaactagatcatagggcgagactgtagaccatgatgttaatctaaccaatccaccggcactaccagcacccccataaaattctaggaatactacggggatgaataatgttaatcctcttttctgaatagaagcaaatgtttactgaaaggtgaactatcatactttgtcaagaagaagagttatgccagattaggaaaccagttcaggcagctctggtagaccaagtgattcctccagttcttgtcccagtggtagctaaccctagattagctctacaaccacatagagatttagcttttgaatgattgtcaagctgcaaccttcgacattcctgggtgttactaatattatgaaggcagagcaatggaggagtaccatcattcgtatcatggataatattggagtagttggaactaagtgggttaattgtgccactttcatgcttcaagagcatacccgttaccgagaataaaagatttacaaataatacttttcttttgagattctacggtgttaaattgctaatgaatgaacatctattagggatgaatctcattaaaataagaaccatgtagaaccaacaatggagatcgagtatcttaaaactaaagctcattactttaaaagatattgtattattttgatatctattttaatctatttattttaatatttatatatttatttaattaaaattactaatttagataaactaaaaaaaaggttaatttaatgtttataaaattatatatacttaggtagatctgaaaataaataaatttatttaccatccggggaatttgatgagtccatatttatcttatagatatcactgaaaaagccatacaaaccaattgtaccatctcatatcactcctccaccttttccaagtagattgaaaaaatccaagaaagaggagcccatcaaggagatccctgaaactctaccgaaagttgaggtaaaaattccatgtcttgaggtaatcaaagaagagcctcattatgctaacattcttaaggagttgtgtccaaatgagaaaatttgaatggtggtgagaaaataagtatagggaagaatgtttctgttgttcgccaagttgttgccgaagataagtacaattcaatgcacaattggtaaaactaggttttattgttattattttaccagcatcttgacttactaccatgtatgttgtttaacattctaaaaataaatttcgaaaataatggaatttaaacacata

SEQ ID NO: 119013 - DNA, 7132 bp, Cannabis sativa
  modified_base (3280)..(3283): a, c, t, g, unknown or other
atagagcaatggtcaattcacattagatcaatgcttttccttgttctgaagttattttcttacctgaattaagcttcgaccatagtcctatcttggtgactatctatgaagataggtcttgtgggaggaagccatttaggtatttcaacatgtggaaaaaagctcatgagtatgataacttggtaactaaggcctggaaggaagatatcacagggacaaaaatatactgtatagtgcagaaactaaaaagagtgaagatggtgctgaaacacataaacaaaactagctttacagacatacaaaagacaatgcttacaacacaggaagccttggctgagttgcaagctaaattgaataaggagccacagaatgtggaacttatgaaccaagagcaggaactaagaagtaaatttgcggaagttagtaaggccttttctagcttcatggcacaaaaagctaaggtgagttgggctaaatatggtgatgaaaattcacacattttccatgcttctttaaaattgagaaggattcaaaacaggattttctcgattgaggatgaacatggaaattggtgtgacaatccagaaacagttcaacatgccttcttagactattaccaaaagctattggggactacaatacctgccagaatgaaagttgttcaagcaattgtggatttgggtcctaaggtaacaagctctcacaaagacattctattggctgattacacaaggaaggaagtagaagaagctatttttgctattgatagggataaagcccctggtccagatgggtatggaagtgcttttttccaagacaattggaaacttgtaggggatgagttagtagaggcagtattatcttttttaaattctgcgaaaattttaaaagagattaatactacccctactactctaatcccaaaatcaaaatgtcccaagagtgtagtggattttagaccaatctcatgctgcaatgttatatacaaaacagccactaaaattctatgcaatagactgaggggaatccttcctgatctcattgctgcgaattaaggaggcttcacacatgggagattcattgcgcataatgtgctagtgtgccaaaacttggtaagactatatgggaggaaaaattgcaaaccgagttgcatgatcaagattgacttaaggaaggcgtatgacactatagaatggggattcatagaagagatgatgaaggcacttggcttccctagtaagttgatctctcttatactggaatgcatatgcacacctaaattatctttgctcttaaatggctctatgtgtggcttttttaacactaagagatgattaaggtaaggtgaccccatgtcccccttactttttagattgggaatggagtatctttcgagaatttttacaaaggtgggagagtggcctggttttaaatttcatgataaatgtggccaaattaagttgaatcacacgtgctttgcggatgaattgctagttttctgcaatggtgacttcatatccataatgcttttgcttaaaggcctaaaattactctcatctacatcgggattaatgccaaatgaccagaaaacagctatatactgctcgggaatggctgattttgaagttaatagggtcctggaagcatcaaatttcaagagaagttccttgccatttcgttacctgggtgtgccgatttgctcaaggaaaatttctagagcagaatgtcaatgtttactagagaagatgactagcagaatcaggtgttggagttcaaaaaatctatcttacatgggcagagttaccttgataaattcggttttgttggctatacatacatattgggctcagctttttatcttgcccaagaaactctcgaatgacattgaggcaacttgcagatcttttctatggaagggtactcaagaggggactggaccagggcttgtggcatgggaatacatatgtagacccaaatctactggcggtttggggcttcgcaacatacaacaatgaaatgtggcagctttggggagatatgtttgggacatagcaagcaaaaaggatttcctttttgtaaaatggatacacatggtttatttgaaggatcacaactggtggagctacactgctccacaagattgcagctggtcatggaagaaaatagttgcagttaaagataaatttcagcaaagaatggatatggagggcttcctaaaatagaggtatcgggtaaaacagggctatcatgatctatttcctgaacatcctaaacttccatggtgtaatctagtttgggataggctcattattcccaagcatagatttatattatagctagtgttttggaaaaggctgaacacaaaggagagagtaagcagacttaatcagagcattgtgtcctgtgtggcagggaagatgaaaccaatgaacatttattttttaaatgtgattatagtacaagatgtctgcagcaaattaaaaggttcctgcaatggaacacaacaacagatgacattacaaaactgctgcaagcctaccaccaaacgaagagatttaatgcagcaaggaaaagcatggtgaacacagtcattgcaagccttgtgtatcacatatggaaggccaggaatgaagctttatggaaccaacaactctggcttacctccacggctctacagaaaagtaagcaacttagcttgctgagaattaaagttttcgcacccagaaaagcaaaggatgaagacatagattggattatgagaacataaattgtatatgatcaaagttagtgatagaaatagattttgttgaagtgcaaaatgctgtgatgtaatgtttggtttgagcaataaaattcttattcatcaaaaaaaaaattataattattaaataaatagttttgacatttaaaggattaaaattgaaaatatggcatttgtgaaagaaaggataaattgttgaataaaatggtaaaattctaatttagtggggcccatcttatggctggtcacttaagggtaagtttagccaatttttatcaattttgtaatgtcatataatttaaatctaaccctaggagaaatcctataataggaataagatggttctcattcatccaatccaacctaagtttacctagttttcattctctgtcagacaactagaaaacttaataacctccttctatagaatttgaatctccttctcttcttcttcataattttgagccttatagtgaaagagtgcgtgcctacccatagcaagtctagtactcaatcatnnnntgtaagactgtgaagaatccaacaactgaaggagaatcgggctccgatcatgataatactttgcaacataaaggaacaagggttagagatctgagtggaatgagacatattatttcactgcaatcaatgtaaggtttctttaactttatatgtgcttaaattatattgttttagagaattcatacttagggtgttaaacaacatacatgttaggaaatctagattctgataaaatcatccccaacaattatatgatgatatatatttgcttttttaatgtgcgtacctgattttgtgatcttttggagaaaattgttgttgaatatttattgttctgtataatcaatttttataccaacttatcttcatgatctgttttcttgtctaagcattcatgattgatttttttttttttgaagtttttgtttctaaagaagacgatcgggaagaattgttgaggtcaccgtagctggagaagatgattggagttttttgttttctccttgaattctcttgcaaaatgtacttttggattcaaactattctccatgtaatatgatgatcatgaatgaataaagtggctgtaagttttgttatctttcatgtgttcatttgaattcatcttcaagttcttgttcagcattttctagtttatggtttcttccatttgctggttttgttttgggatcgatcttgctattgttagttgattaaaaatgtgaattaagggtgagtttttcacaacaaatggtatcagagcaaggttttaaaatccgcattcaaacctccaagattgatcttcaaacatcaagaaactgttgaaactacatgtctactggaagattcaaggtggacaagtttaatggaacaaatgatttcagtttatggaggattaagatgaaagccttccttgtgcatcaaggaattcatgaagctcttgatgaagaggctatgaaatttattgaagataagaagaagaagctagaaatcgaactaaaggcactcaatgccattcttcttagtcttggggatgagatacttaagagaagtgtttgatgaagagaaggcacttgggttgtggaacaaacattcttcaatttacatgaagaaatcactagccaacaaactgttcctcaagaagagattatatactcttaatatggatgaaaccagagagttgaggaatcatcgtgatgatttcaacaagattatcgtagatcttaataatcttggtgtcaaaatagatgatgaagaccaggccataatactccttagttcccttcccaaaatttatgaacattttgttgataccatctttaatgttaagtacactctcaccatgactaaagtgaagggtgcattcaaatcaaaagaaattcaaaagaaaggtgataagggtgggaatagcaatggggagggactgctgattgtgaatggaaaattttccaagaactacaagggaaatcaaaatcatcactaggctaatcagtctagaactggtgcaaagggtccaattgggggatctagttcaagaggcaacactggaaaacaatgcttctaccataaaaggagggatattttagagaagaatgtctggctttgaaagcaaaactaaagagagacaatcaacaatcaagaaccaagaatcatggagaagttgatcttgcagatggatgtgagacagctgatgttctggtggcataaagttctgactctggtggagaatgggtgcatgactcagggtactcatttcacatgacaacaaacagggaactactcagctatttttttagaagaacacaatggaacaatgcttttaagcaataacaaggcatgcgcaattcaggaaattggcacagtcatgattaaaaatcatgatggaaaacttcaaaccctgcaacaagtcaggtttgtccctgaacacaaaagaaacataatgtctattggaatgtttaacaagtctagttactcagtcaagattgaacgtggagtgatgataatgggtcagggatctcaagatcttatcaaaggtcaactaaacaatggcctttattttctagatggtaaaatagtcattggaagtgcagcacttgctgtacataaccctgtaacaagccaaagtagactttggcatcttagacttggacatgtaagccaaaggggactggaagaattgaacaaacaagggttatgttcaaggagaaattacaagaaaggctagaattttgtgatgaatgtgtgcttgggaaggcctgcagggtaaaattcagtaaaggagaacacaaccatagagaaactagcgtatgtacactcatactcttggggaccatcaagaattccaaccatgggaggagcacactatttcatgagcattacagatgatttcagcaggaaggtatgggtatacttgttgaagaataagaatcaagccttagataccttcatatagtggagaaagcttctagagaaccaaattgttaacaagctcaaagtactgaggacatataatggcttggagtattgctcaggagaattcaaggtgttttgtgctcaagaaggtattttcaagcacaaaacagtggtgaacacaccataacaaaatggcattgcaaaaataatgaataggacattgttagagagggtcagatgcatgcttgtaggtactggtttggaaagaccattttgggcagaagcccttaagactgcatgctatttgataaacagatgcctctcaatgccaaaaaattttaagacaccttaagaggtgtggacagggaagccacctagctttgaacacttcaaagtatatggttgcacaacctatgtgtgtatcaaacaagataagttgaagccaagggctctaaggtgtttgtttctaggatatccagagggagtcaagggctacaaattatggagccttgaaccagggcacaagaaatgcttgataagcagagatgttgtgtttaaggaagaggaaatgaccatgaaaaccaaggtaattcctgaaactattcaaacaacatagcaagaacaaaggaagattgaggtggacctcacaccaatcacgtgacaactcttcacagttagaggatacaattgaggatgatagtggtcaaggtgatctaatcagctactagctagcaaaaggcagtgtaagaagagaaagcagaccaccaaataggtttggttatgttaactttatcgcctatgcattaactatagtagaggagatggatagccctgaatcaaccagctatcaagaagaagttaatgggaaagatggaacaacttggttacaagctatagatgaagagaaaacatctctaatgaagaacaagacctggataatggtcaaaaaattagagggatgcaaattggtaggctgcaagtagattttcaaacacaaagcaggaattcttggtgttgaatccaccagattcaaagcaaggttggttgcaaagggattgatttacattgaaagaaggtgtagattttaatgagatattctcactagtggtcaaacaagtctcaatcagggcaataagggccaaagcagctaaactcaacttagaagttgatcaaatggatactgctttcttacatagagaacttcaggagcaagtctacatggaggttccagaatggtttgataaagaatatgcaggccaagtttgcttgctcaagaaatcactctatgagctcaagcaagctccaaggcagaagaatctcatatttgactcttacatgacgaagatagtgttggctttgtaacctaaataaaactctattttaatgtaatctctatcatttcattatcaataaagagatagaagtattttcatcacttat

SEQ ID NO: 119014 - DNA, 1197 bp, Cannabis sativa
gtaacagcaaataataacacctatttcgagggcttaaatttatcttcttcaacaattgcaactgcaatgcttaatctcataccagccatcacttttattatggcagctctagttgggtaaataataactacatactcaattttttttgttatgtttaaaatatataaaaattatatatatattataattaatgtataattgttgtaatatttagaatggagaaaatcaatccaaaaagcatgagaagtattgctaagataattggtacaattgtatgcattggtggagggatttgcatggccctaataaaagggccaaaactatttgttaatacaaaacattactcaaagctattattattattatttattaataatattggaggtgaaaatctgccactgggttgtctatttctcttcatcaattgctgttgcaattcattttggattgttatgcaggtatgtaatatttttattaatggattattatataatttggagttaatatatatatatatattcttaataattaatgtatatgatgaattaggtaccaatttcaaaggcgtgtccagaccatttatacagcacattttggatgtttttgttgtcaagcatacaatcatcaatattgacattttgtatagatcgtaacccacaaacatggcttcttcattcacctcttcagtttcaaagttgtttctttgctgtaagtatatatatattactacctaataacactactttacatttatataacaatgtacacaagtgagtgttgtggaggattatttgaaaagaaaaaaacaaatcaatgtatacttcaaaaattttgtctaataaactatattatatctgtgtatatataattttttttgctcaaactcaatatttttatctctctttgctaatagaacaatctcaatgcaaaaattaaaaaaaaaaattaattagataacaaaattatataagtatcaaagctcaattttcctaataatactagttcataaataatatccactaaaagtgcagatatatatattttttatttatttattttgaagagatatgaccatagagatatagattgatatatttatttcttcaataaatatttttggatggaaatttattgtttcgatcaataattgaattgaattcaaatcatcatctgctgataataaaaaaaaaaaaaaaa

SEQ ID NO: 119015 - DNA, 1219 bp, Cannabis sativa
agaattataactaattagattcttctgaagcttaattatttaattttcattaaatattcatatttaggttgtaaattggttatttataattaatttttttttatcaacttgaatttgaatatttttgaaattcaaaattaagttgaggaattctaggaattagttatcgagagattcttggaatattattttaagtttgaaaatttagttattttagaacaacttaaattagataattttaaatttattttattatatttttatttatttatttattttcgaattttatatatattttttgagaaaattagctcctttgtatttcaattccaaactgttttacaacctgtcatcatttgtatgacaatctatatatatacatctttgtgtagttacaataatacaacccaatctccatcttttttccccaatttcttaggcaaaattatatcaatccttaattttacctcttgtttaattcgatgcactactgctgctggaggagtgaggtttttgcaccatagaacctcatttcgacacttccaaatattatatattgcggttgccagcacagtagcaaatatctgctgtttgaacttcgacactttcgttctttttactgatttcagcagctggggtagagagttagttgttgaattccatcctatccatccttcaatgttctctaaacattccttgctaaattcaaaatcaaaaaataaatgtgatatactttcatctgctcgattacatagaagacatttactttccaaggtgatgttaaatcgcatcaatcgatccttagtttgcaatcggtttagaacagccaaccacaagaaaaaccgatgcttggggataagaaatctcccccatacctctccataccagctcttgcaacataagatggagtaaggagttgataaccctgtcggatagagtaattgaagcccgtaaattgctacaatgaaactttcttcttaatttcttccttcactcgaactatttgacgccaataccaactattttggttggaacttgcatagtcccacaagttgtgttttttgagatagacacaatggatccatttgacccataagttgtcttgtttcgttgcaatcgcccacacatatttgaattttatatatttatatataattttcgaaaattaaatattgaaaatttatttaaagttggaaataaattttcaattattttcgga

SEQ ID NO: 119016 - DNA, 1248 bp, Cannabis sativa
  modified_base (252)..(256): a, c, t, g, unknown or other
atccattcaacatgctccaacccaccaaataattacactcataccatatctacctcaaaaatactcattcattatgttatataaccgatcctattttacttataacctctttaagttatttcatgttatttatttttattcattataacattgttatgaaaccggtctaatttaattataattagtttgagttattttattttatttatttttattcattatgttacagaaccagttatatttcaattatannnnntttgagttattttgtgttattaatttcattcattatattatagaaccggttctatttttgtttatatttgagacatctacttcttatgacttttttcggcgacgcaaactatccggtgacttttccgataccagtgacgttccgacgacttctccggcgccggtgacttttctgacaaattttttgggaaaacttattattgttaacaaatatagaatttctatcctttttttttatagaaatatggcataaaaaagctcatataaatgtaaaaaaacaaaaaaactcataaccccttagcattatttatttatgccataaaaaagtaaactcttataattttccatatatagtgtaatctctactatatatatacatgtggatagtattcattgtgttagcgcagattttcgttaactatattaaagcctatttcgtgattgatttacacagaaataatagtagtaaaagaggaagaagtaacacaaagttttttacgtagttttgctgttaaaattctgtatagtccatgagtctatcttattagatttctctaatacaaaactagggctctttctctaaaggatttttcgtcctttttcaatgtattctgcccctatttatagttacataggaaggtagttaattataatcagatgaatatcccacaacaatattttcttgaaattatgggatttgattacgccccacgtaaaataaatgttgttattatttgaaaatcacacagctgtgatttatccgctattactgggtcaatgctgaagtggatttagatacgcttcaaagggtatctcgcagagtcacctcgctaggatagcaacaataactctgacagcgagctgaagctttttccgtatctttccaaggctaataatgtaaatactgtcgtttctgttattgaagacataatgctccatttgacaatcgcagttcttggtgacaaggtaaacttcagcagtcaacatcatttg

SEQ ID NO: 119017 - DNA, 2298 bp, Cannabis sativa
  modified_base (52)..(67): a, c, t, g, unknown or other
taccataaaagaaaaaatattttggcatctaacttgccaaaaaaggactttnnnnnnnnnnnnnnnngcactttagatgaacaaaatattttttaataaggaagtacctgcaaattaaagttagcaatagaaaataacaactcctcctaagtaacacaatcgaaaacaaaaaataacaaaataatatgctaacttttaatccaaaaagatcacaagtaccaaacacaactacccctgaaaaaagggtccagagttgagacaacaaacagtttaaaaatagaatattactcccccttttttttatctaagggccaaagacaaaaagacatgaaaatagatctatatgtctaaaaaaaaacagaaaaaagaaagaaaacttatgccccataaagcttgatcaaagaggacagctgcttggacatctcttgctgaacctcctccatggcagcaagtcgatttttcactagttgaacctcattcttgacttcttgtacatttgcaggagttgaactcaaacttgcaccagtagcagcaacagcaccagctttaggacgctttggaaaagctccatcaaaatactccgagggttggaaaaggtgccagtaagggttggctcaagtgtttcatgacattgtgtaattcgaagactctcccgagatttccattcaacccgtgcaccagtaagttcagtgagcatcaaatggcgatccataaacatgatagcattaggcacaccttctggtaattgcaaagccactgcaatgtccttgacagtaaaagataaccaatgtccctgaacatagactttaccaaaaaaatcagaattctcatcaagcatgtcattagtcaaattggcataaaattctttgacaatattttcaatatacccttcaaaactagtgagaatattttcccgttgatggtattgaacaaacttaacaataccatataccctatgagcatgcaaatcataattccttttactttcaaactttcgggtagcataaatattccaatcaccctcattatcacgaaagtaaaatctaaaattgacagctggagatggagagatattaccagatgaagaactcttcataggctgcttgcctttggcagcagcagatgccttggttgctgaagatgctcaaggaggtgctggagcagatttggccaaaggagactcgggttcgagttcagtgtcttcattgtcagaggagactttgatgtcttcatgaatctctttttcagaatggagagactcagatttggtttttcagaatggagggatcctccatgggttcttcttcttcagaacttgaagaaaccgaggggggattcaatttcagcttcttggctggaggagctagtttgtcatagcttcgttttgtgcgaagttccttcttgatagatgcttgctgggcacgagtgcgagtggaagcagctgttggagttgatgcagcaactcccttccctgatgcagcaggaggcgatgtagtggcaggtggaggagatccctttgaagatgaagatgataaagtccaacatttgtagggtcccataaattttttaaccacttgtttaggaattcgtttcagcttgggcttcacgggctgagattcacgttgaggaagcgatgaatctcctgggtttgaagcagttgcagcagcaggcagcaagattggagcagcagcaggagcattcgagggggcttgttcggattccaccattttccttggattccctaggtttttagtgttagccatgaatttctgaaagaagaaaggaaaacaaagaacaagaacacaaggaaataggaatcgggtaggtggtgagattaaatgacaaaagaagttggtttaaataatcatgtgagagagaaacacaaaaggaaaccaatttcaaaaattgagtaaccactagcccacgaacaccaaagggaaaccgccccactctttttctaattttttttaacaaataaataaaaggaaactagaattacaaagatattttccaaaaatagccaatttaagaaaatccttcaagatcaaaggcaaaatacaacggatattatatcaaactttaaaaggaaacatatcaagatgaatctatttagaataaatattgaaactttttaatcaaagcacaagttttcatagcccgcgatccaagtcaccaacgcctcccactcattttatttattttttttattttctttatttttgaaaaatcgaaaatgaaataaaatatgtacaatagatataaggtattctaaagcaagcaatttaatcaaaattcatc

SEQ ID NO: 119018 - DNA, 531 bp, Cannabis sativa
aagaaacattgggaatgttaaaaagaaatcataataattaaacattatatatattgtgaagaaattacagttgttgataacaaattgtttttattaacattctttctcaaatgaagtgaatggtgaataatacataaatgtggtggagttggaggtagagaagaagggattgaacttaagatgtataatgttgatgataatgatgatgagtagtagtagttttcaatatattggaaagcaattggtagatttcattatattttcattctaaagattgcccaaagcaagttttgctctcaagtccttgcgcaagatttttcctgatggtgacttcggaatagcgtcaatgaaaaatactcgacttattctcttgtagaacacaacctgaaatttacaaaacaaaaatattcatgttatgacaaatgaagttattaagaaaaaaatggaaaaattacactaattttcattcttctctaattaaaatttcactcaaattttatcacaaacctatacatccatctacaaaaaata

SEQ ID NO: 119019 - DNA, 1979 bp, Cannabis sativa
agtttgggatatgttcaatgtgcaggatgctaatataatcttaagaatcctgttatatttctcggcatcatttgatttctagtcttgggctggtgaaagttcttgccacttttctattaaaagtgctcaccttcttctttaggattttatagatccaaggactgccaacaacaataaaggtttttggtagaatctttggcaacttaaaatcccacctaaagtcaaaaaacttcatttggcgtgttgcttttcagaatctaccagtctgtttcaatctcataacaaaacatgttgacatcttccctttttgccctattcttaatgcttcttcaggaactatctctcacatcctcctatcttccagttttgcttctcgttgctggtatagcacgggtctgcctgctggtgcctctctccatctctctgttgcaaattggcttgattacatattccagtgtcttgacactgacagtgtttgttattttgttattgtgtgttgggccttgtgttaagcaagaaactctattgcttagaaaaataaaacgctcactgctacaaacattttaacatcagtccgtgtagctcttgatcattggctaaaagctcaagataacagatctctgtcatccttttactttggtaatatagatgacgaaactgagctttagacaaaactaggtgtaaatacaatcaagattaatgttgatggtgctttatttgataatgttaacaagtttggatatggcatggtcacatgaaatgacgaaggatttcttattgaagctaaagcttgttgtcgcagtggtgtttttgctttcgatgtagttgagattatgggtatcaaagaagctttaagatgggttaaaacccgaggacgtcaacatgttgaacttgaatcagatagcttggtctcggtccaagcaattcgtagtcactcttctctttgctctatctttgggaacattattcaggattgtgaaattttattgctttgattacctgatgcaaaaatttattttcttaaacgatcagcaaatcgcctagcatatcttgttcctaggaattttcggtaacatttgtgattataaagcaccagctgttatattatatattttgtatttggaatgctaaatttaattaagttgttatttcgtaaatatatatatatatatatatttacatatatatggtggggattgaagagttttattacactccaaaaatctataatacaccctattttaattgtttttaatttacataaaatttatcttttattattttactttcgttaaatatttttatcatatttatatccttaaaaaatatacatatcaaataaaaataaattttctttcaaaaattataacaaaaaagttaaaataaaacactatgtacacttattagaaaaaaaataataatacctaattttaaaaaagattatcaaaataaattaaaaaaagtagagaaattaacaaaaaattatataggaaaaaatatttaaaatattaacaatagtttttaaaaattattttaaatttaatttttttaaaatattaatgtgtatttaatatttatagtgtacagatagaatttctcatttagtcatttaaatatgaaaaaaattacaatctacctctttaaaattgttgtaccgatgtattcctatgtgttatggtatttgaaataattttttagtctaatttcttctcataatgacgtatgtttgagttatttaagaaattcggtaaaatttttaaaaattcaaaaaaatctaacataccaaaaatagagttcaaatactgtgttgtacgcgtaatgatgttattttttacacaagtgggaaataaattatttgaacactactttaaatttctcaagattttgtaaaatattttaaataactataatgtatacgaatataaaaaaatagattaaaaaatatccacataaataaaaaaaaaaaaaatacataaata

SEQ ID NO: 119020 - DNA, 1078 bp, Cannabis sativa
gaaattttgggtggattttcgctatgagaggctacccgaatggtgcatggaatgcggttgtttaggacatccttaccagaaatgtgcaacattcctggaactaattgacaatggcatcgaaccagaccttgcttatggacctgcaattaagggggctcctttgccaagttcgggttacgatcggtacagaacggacttctccaaaggccatgcttggcctttagttactcgactagcaaggaaagcaatgaccagtaccattcctgatctttctattcatggtcaaccacagccgaaaaaattgctttatggtgaatcttcagaccaacacaatgacttgcttcaggacacgtcaattcaccatgctactgatggtaatcctcctcagtcacacatcacacaatctcatgccaatgtctccttctcttttgcaccagccactttatcctctgcctcgctggtgcgaagtcatgatatgatgactgaggcatcactcaggtccaacgtaacagagcaacaacatgctaaaattgacatgccttcatccattactgagagtgcatctggccttgtggatacttataatctaaatcaattcaaccgtagcaatcaaaggggtgttcataacaatagacttctcataaatacatccatatcaacaacaaaggaagtctctccttcacagtttgctggaaaaactaagtgtccatcaattcctaatcctattccatcttctccaaatgaaagtgatttgtctgaaatttttatgcctcacataggaccaccgctgggatacattgcaacatacccacctgacacaacgaactccaaagttatcaacattgctcccaaaattgctgattctccagtctatcctcccatcatctccgactccaccatctgtagaactattgctgctcctgttggtaaagaaaatcaatcaccaaatcgctcttctaagaggctacctgaaagcatatctctgagaaaggctttgaagcgttgtaggggtctttcacttgctacctcaaattcagaattgtcgactgatgctgagttgaaccggatttcttctgaa

SEQ ID NO: 119021 - DNA, 2214 bp, Cannabis sativa
tcaaagaagctatccggcaggtgcaagttggcatgcacaaaatagttattgctagcagcacacctgccacagcttgtgccgacaaaactgcccacaccaaaacaataacaatggagggaaatggaacaataataattttggccaaggcagtgaaaagaaggggaaattcaattatacccttgcacaactacaccctcaagaaaacgaggagaagttcacatgcttctccatcctgacaaacacccccgaggccatcctagttgccacctaggcttttattccatacaagaagccccctccaatgaagaaagctatcagcaagagcgatccaaccaagttctaccgattccataaagattttagccatgacactaataagtggaagaacttgaaagaagagatcgagttcttgataagaaggaacaaccctcacctacattagtatgtccaagtcgattagagccaggcacagctgcttctactagtcactagccatttacaagtcatcatttgtggaccccacattgctgagaattaaaaaaaagtgttggacatatatgttcgaacactttgtcatgagcaaagaaatgaagacctggctttagaggaaagaaatcacaagtagccaaagttagaagaacatgccatcaccttcaccaaagaggatgtggcccatgttagatttccccacaaataccccctggtcataactactcaaataaggaacatgacagtggcacgctgcatgttggatgatggggcctcctccaacatcatcttcaggactgtatatgaaaagatggggcttcatctgaaagacctaacaccctgtacacaactcatgtacgggttctcaagtcaaggattgactcctttaggataaatctaattgcaactaacaatcagtgaaagtccagcacaaaacacattcatgacccagttcatcattgttgacgtgccatcagcattcaacgtcatgatagggtggccaactttgtatgacccgaaggcgatcacctcaatttacaacttatgaattaagtttccaaccaaacatggtgttagatgcttaaggggagaccaaaaatctgctcgacaatgttacaatatcgctctttacaaagaaaaagaggaagactttcctaccaagagctcaaatagtgagtccagccaagggcatttaagatccacctaaggtagggatgcagacatagatccttgctttggggatcatgtcacaactttggactggtagaggaaatagaagaaatggagatcgatccctccatgctggccaagaaactcaaaattggtcgaggtttagcgccagaaataaaatctacattgataaaatttctaagggcaaagcttgatatttttgcttagtcgcatgaggaaattgtgggaattgatccatctgtaatttctcacaccctaaatgtagatccaaacttctatcatgtacaacaaaagcagaggctactggataaagagcgagctcaagaattgaaatatgaagttgaaaagttgctagaaataacttcatcatcaaggcattctaccctatttgggtgtccaaccctatactggtgccaaagcaaaataataaatgtcgagtttacatcgatttcactaacctcagtatgacatgtccaaaggattatttcccacttccaatgaccaaccagcttgtaggtgccacaactggtcatgagatcctaagctttctggatacctattcaggttataatcagatcaagatgtatttgccgattgaggaacatacaaatttcctgacatatgtagccatgtattgctacaaagtaatgcccttcgggctaaaaaattcaagagtaacctaccagtgccttgtaaataagatgttcaaggacttaatcgaccacaacatggaggtatacatggaagacatggtagtcaagtgcaaaaaggttgggggcatacaaaagacctgaataagtgctttgaagtccttcgagaatacaacatgaagcttaaccccctcaagtgcccatttggagtcaactcgcgcaagttccttggcttcatagtgaatgcccgaggaatcaaagaaaatcttgaaaagatccaagctcttttggaaatgaaatttcctataaatctcaaggacgtacagagtttaactagccagatagtagcactatatatatttgtatcaaagtctacagataagtg

SEQ ID NO: 119022 - DNA, 1363 bp, Cannabis sativa
taaaccctttctatccacgtgtcactgtccggttggtccacgtatattgggcaaaatcaggggcaacaggaactaacatttgatccgttaggaaattcaagattctataatggtaaaccaagttcctggccatccacattagtaccttccaaaaacaaaagctgtaagaatcatgttctctcagaaactttaatgagtgaatcaaagaaactaataatatggctaagagttcatgattgctcagtattcaggtcgatctactattgatcatcattatgagatgaattatgtctttatatcaaacgacatgtttgataaagacaacttaattacatattggtccatgtcatacataatctctattatatacaataccttcacttagatgttatactacattaataatccgaattgagattatttgcacaaaataacaggcatcagtgaaccgtactataacaattgttgattaaaaattctataactttaatatgttggttaatattttatttatagttaagtgatcttaattcttagtacaatacaaatcacaacattatataataatttttttgatattcatatataaactattcaatataaaatattaataatttaacattcaaacatatatccaaatatttaactaatatttataataaaaaatatctttacagactttttaaagcataaaccctaacacaaaagttatagaaaagttaatataaaatttagagttattatatacataaagtacaaaaagaatatctaaaatataattttaggcataattttttttgtcattttaaattctatactttaaatttttaacaaagtaaaaaatcacatacaatttttaatataatttatataattaaatatttttatgtattaatatttattttttaaaagataaattatatttcttaagtttttaaaataattaaaagtaatatatataaataaaaaaaaatctaaaatttaattttatacataatttgtttttcttttttacatttaagactttaaaaaattattaaaaataaacataaaatatttagagaaaatgttattgtactcaagtgttgtcatacacatcccacatagattttactatataaaattatttatggttttgaaaaaaaaaaattaacgattaaattacttaattcatttaaagaaaatatatttaattcaaaatttaataataaaaaataattaaattatgaaatgtacatatcataaagatatatatatctattctatataaagtgtgtctatataacagaattcttggtttatgagaaattcatgagtgactttttatttgtattaaaaataaaatagtttatgagaaattcat

SEQ ID NO: 119023 - DNA, 1074 bp, Cannabis sativa
  modified_base (1024)..(1025): a, c, t, g, unknown or other
gcgtcgtgctgataagagaagaaagcaatatccaacatcaagtctactatgtcagcaaatgactcattgaagctgaaggtcgatatcctttgatagaaaaactcacttactacctaatcttagcaacaaggaattaaggccctattttcaagctcaccttgtttgggtatacaccaaccaaccattgcgccaagtattacaaaagcctgatgcctctgggtgactacttaaatgggcaatcgagttgggtcagtatgaaataatcttttaaccacgtacaacagttaaaggacaggccttcacagatattgtagttaagtaaacatgcaaagaagaaagcaacagaaggaacaacccggagccaatacaagaattgcttccaaaaaaaatgaagaaaaacccacttggaaatcacatgtggatggatcagctataaaccaactttctggtgcaggaattgcccccgttacacttgggggcaacacctgcacagagcaatcaaatttgggttcaaggcctccaacaacgaaccagagaatatgaagcactcatatctggactaaaatttgctcgggaggtacatgctgagtacattgaggtcagttgtgattcacaattggtagtaaatcatgtctcgggagagtacatggcctggggagagaaaaatgatggcatatctaagcaagatacaagatacaaatttaaaatatttaaaataataattaatctaattttaaatatttgtaagtgaaaatattttaaaaaaataggaaactaattaaaaatattcttactttacttttcaatattacaatttaaagtacaaatttcacattaaaatattacattttaggctacatcacctaatcatttttaaaaaaaaatactaaaataggatcgaacccgcgtgaagcgcggcttagcccctagtatatacataaaggagaagtatgaggcggtgatatgacattataaaattactctaaaacgatttttctcttctctccttaattctctcaatttnnatattttattaaagcataaatctaaaaattgatattttactattatatt

SEQ ID NO: 119024 - DNA, 2131 bp, Cannabis sativa
tcttttcatcttatataattgatcagaaaatctatctatttaagtgtcttaaagggactaaattatagtgagttaccatgactcactttatattgagcttatttttactaatttttaacattgttattttggtaaactccatgtttcttgaatcattcttaattgttaatgttggtataatcaaaggaacgattgtcaagacttgaagctgcacttgccactaagaaaggtaagatcttaaagacttgattcttttctgtataacaaggtaagaagtaagtttgtacttattgtatgcaaaattgattcagatgctggaaatgaagaacttttaaaggttataagtgaacttcagtctaagcttgaagctacaaatgtagaactagtttcagaaagcgaaaaggtgtagtgaaaagtttgtgtatttccattttgttctttgcttatttcattttggagtgaagattagaatgttaaaatgattctgtctctgttgtttttcaggctcgaaaacttgctgttgaaaatgctaagctccaatatcgaattcaacatcttgtttgggctgttgagaaggctgatcattatgaattggaacaaaccaagtgagttgtagtgattgttaatgttatgttttgcatcaaatttattgcaatttgtttgaaataatagacttataggttctcaatgatttatggatattggataatgtggttaacttgataaaagtatttaatcatgaaaaggaaaaaaaattggtaaacattattttctctcacaaatttaatattaactttgttaagagaaggggaatctttatatcaaacataagaaaaatattgatttctgcttgagtaattcagtagtcaatgaagttagcatttttgaggccaagccaagttttttctttctttcttttttagcttagaagtcttataataatttgtactaaatttaaagttcttatttgactagccaagagcagggaatgcacccccaaccccaaacccatccccattcctcttttatggccccattcccgcccctgctccgctcccaatgggttcggggtaggaaaatctcaatagggtatggggatttattgggtacccatgaagattaaaagaatgataataaataaaataatataacataaaaataaatagtttttttaatttaaataaacattatgtctaaccattattatttatacttcatattttataaattgtaaaagataaataaattagaaacataactgactacatatatttgatgttaagtttgtaagtaataacaacttaaaaaagatattgaaaaatgaaatgaatacttatatattaaaaaacatttattatagcagtaaaaaaaatcaataatcttttagtcaataagttatacgaaaaatatttataaaattatatggaaactatatattaggatcagatatggggtgggtagtatcagtgccccaacttgttctaaatccgctttgggtatataaaattgtctcccatcccgtcccttaacccatcaaagcgaatattccccgtcccattcagggcgcgtatccacaggtatccaaccttataggtcaaattttcatcactagccaaggatagtattatagtagtattagaggtggttttcttttaattaagtaatgtttaaaaactattatggggtaactttagtacagaaagtggattgctttggctgctatatgacaaaagctaataactattttgaacagttttttttttatcaattattttggtctcaggtgatgtgtggtcatggcagaggggaaattatttgagatattggctggaagtggaaatacttgatggttcaaccaactttgctgcatcaattgttgcacatattttatctctattattaggtcattgtgattttaatatacattttgcacagtttcaattcaactatgagttttggatacacacaaaaatggaaatggttatagtcgattattaagtgtttatgaaaaatgagtacaagagtccatatatgttactatatgccaccattttattttaccagatagtaatctgatttagacaaaatatatatatatatatatataataataataaaaactagtttgcta

SEQ ID NO: 119025 - DNA, 2541 bp, Cannabis sativa
tgtgaatagatctaagatcctggtaaaataaattccaacaatctttccattcgtttcgtttttataatccatcgatttaaaagttataagttaaggagatcgattatggtttttattagaatcgtttttcttcataatatatgatttggtcaactctacattttagctatattaatgccttatcgatttgattgtcgatatgtgatttggtcaaccatgtatgttagctatatagtgccttaatattgggttgtatatgtcatagagatatcaaacaatattgtaatacattgttcaatattgcattttatatagttattgtgaaaatgtatttctcttatgttttatttcttgttttatgattgaattactaattgttttgaatgtgttgtgttgtataagattgtataactcaattggagaagcaaatatgtctgttgggcctagaattaaaagaaaaaattaacaatgacccacacattttcaaggttgtacgtaaccgtaaacttgttgaggtaatgattataatctgaattgccatgtggtattcaatacacattttttttttttgatgaattggagaattgtattgcacaaaccatttacatcctaagagcacttctcaactagaagcctcaattaatacatatatacatactttgtttttacactattaccaatcataaaaccattctctatttttacatttcaattttttgggcaaaaccatgataatttgccttttgattctccatttcaagttctcaagtaatctgttacaactcggcagctctccatgccatatgaacttattccgagcctcccaaatgcagtatactaaacctgcaataacagcagccagcacattcttcttgaatctactgacctttgatcttcctatccacctaatgagcagaggcagatctgaagctgaagctctccaacttagccaacacttggctgcttgaagacattgtacagcaaaaggacattgaaaaaataagtgttgtgtgctctccttttgtgtgttacataatatacaatattccttcacttgcagtttaaacttcaaaagcctatcctttctctttagcctattcaacattgccaaccatagtataatactatgctttggaacatttaatcttgcccaaacctcatggctccaagacacatggtttgtacttggtttaaacaaagtgtaacctgctgagatatagtatttttgtacctgaaatatagcaggatcttgcattgctttgaggttgtccttgagagctacaagcttcttccaataccaactagagtgaatggaagccaagtagccccaccagtcctccctcttgatgtacacactttgaacccatcttagccataggctttctttgttgtttgcaatagcccatatgtatttgcatatagcagccttattccattcctctactcttttaattcctaatcctccatcttttttctgttggcaaacatctccccaagccacagcccctgccccatagaaggtatcttgacctttccacaaaaaggctctacaaatagcctctatgctcttcaagatcttcttaggcataataaccatttggctccaataagcttgaatggctaaaagtaccgagttgatgagacttattctacatgcaaaggacaaatttctcgagctctaactcttgattctagcagtcatcttttcagccaatagttgacagtccttcctagatatttttttagaggaaataggaattccaagataggtaaaagggagtacctgttgttggaaacctgatttttccagcaaccatgcattggacttctctcctagacatgttgctgcaatagcaagctattttgctaggattcagattcaagctagaagtacttgaaaacaatttcagtgcttgtaacatgtattcaatacacattaaattaaaatatctcatttttgatcttgaaatataaatatattctcagaagataccagcgaggttcgagaggctatacggtgacacaatgcactcatcacatttgtttattcaggtttattggggacttgacataacaacaaggcttacgactttaaatgagactctcggtaagacgaagtacgagctaagatggaagtttggtggagttcacttgcaggggattctctgaatttattgcttcaatatgtgattttagcaaaatggctgaagatgagtaccctccccctcctactaggatagtacttgctagcactcaggtgactattatggtaccaataatttggttttttataattatgattgtggtttatgttaatccttacacatatttgcatttctaaaatcagcaaccatcatattcctatgtccaagacatgaagaatgaatttagcgttggagatgttgtggaaatcagtagcgaggaagaaggttttcagggttcatggttttctgcgactattatcaattacctcgggagtggcaaatactactatcagtacagtactgtttgatcaaatgatggtggtgttggaaatatttt

SEQ ID NO: 119026 - DNA, 997 bp, Cannabis sativa
ataagagccatttattccgtgggtgtaaggacccaatggagggttgaagcggggacgttacaaaatagtagatactttcgtcaaaacccatcaccgtaccctcatcaagaaatgatctccaacataaatcattaatcatttcatttccaacatcttccacctcaagttcaagttctggcttcgaagaaatcaaccagtttgccatccaaaggtgaattaatagtgtctttataattttatgatcctttggatatatagcacaataagagaagcatcgtctctgctctactgcaaggtgaaggtagcttaacttcaaagcaggcaagatggaaacctttatcctccggtaaattccaaagctcactacgcataacaaaaagccacacttcctcctcttcacttttgaaacacattaagcctcctaaagcttttgctgctaatagaactcccttgcacttcttcactatctcttttccaatattcacaaggttaggttgctcttctctatggttaccaaatgcatgttgcttgaataataaccaacattcatcgtctgacaaaccagtcaagtaatgatgcattggtgttgttcctataatggatgcaacctttttcgaacgagtagtgacaaccactaaagcacctttcgatctgcactccaatatgtatttcaacttgtctcgttcctcatgatcttctccacatatcatccaaaacaatcaagtatctatttctttgaagcatgttctgaagttgtctctgcaaaggatccatctccattgcttcacaagcacattcagttttggattctatgatagctttgatcaatctacgcacatcaaagtcttctgaaacacaaacccatatcttcagctcaaaatgtgcattgaccctttcatcattgaagaacatacaagccaccatattcatgtccttttccaataatcttcttcgtcataagatcctgaaacaaacaatgatcaggaaagaatgagat

SEQ ID NO: 119027 - DNA, 845 bp, Cannabis sativa
tatttctactatatatttcgtcttcttaattggatcagaagaggtaggacccttctttttctttctcctgacggacgttgtttgtaacgccctactaggcatgctacaataattttccaattaacgtaccatctttgctaatcaaagagtttttctcaaaaatcgtgctaaattaaaactttaataaacttcaaactttatatatatatttatgtacataaactgggatcctgtattttaacttttacaaatattttcaaaatacatttgcaaacttatcgcacagcgactacaaaatacaatccaagatgtcccgagaccaaacactccaagtcgcattgtcttgacatgtacaatcaccatccaagctcggagctcactcttgttcaaccttcgcctttcctttacctacacatgaaagtagcaactgtgagtcaacagactcagtaagaaaatcatataacaaatagtatattaccgacttgtatctaggcgcccatacacatgtccacaagatttatcagataagtaacaacgttcttaacatttggtaatattgaccatgatatcatcaactaccagtactatgatcgcactacgggcctgacactatgttcgtactgctatgatagtatcaacagtacccaaaagtacaattagcaataacataactcttaactagtactatgcacgtactgccaaactggtactatgctcatactgctatgatagcgtcaattaatactttctggaattgcatatcagtcaaacccatactatgcttgtattgctgacccaacacgatggttgtgtcgctatgatatcaatgttgggttttatgccct

SEQ ID NO: 119028 - DNA, 991 bp, Cannabis sativa
  modified_base (376)..(395): a, c, t, g, unknown or other
  modified_base (946)..(966): a, c, t, g, unknown or other
cagcataggccagccagcctccaagcactgtgtggcaggccagcctgcacctagtcgttgcatggccagcaagcttttgcctggtaggcctttggtgcacatccttcatccctagacagcaagttaagcaaggaattaggccttgacaacctacgaaaatagggaaaaaatattagcagcttccctatttttaggagataataaagtcatttaaatattattatttaattatgtaaatataactttatttaccgatttttaaggagatattagggatgtaagctctacaatagaaagagcattagttaaaccctaattctctaagtcttaagctctaagtctgaaactcaactatcttctctctctctctctctcnnnnnnnnnnnnnnnnnnnnacacacacacacacacacacgccctaggcatattctctccatcacttgaaattttccaactccattctcatatgtaatgttacgatagccacttcagattccacaacacttgtgatctaagtggaagtggtactatctctggtattaatacaaccaaaaggagagtaggtcattacccactgactaagggggtcaaacctctgtaaaagctcatgtcttatttacttatctgttcatattgtgcaacatgtggcaagcatcagtaataaatacgactccactatcagttggccaaatctaaggtcaatagtttggtactttcattgagaacaagttgttaatttctctgatcaaacgtcatggttaatacaaggagaactctggctatgacatttgcttccttgggtcttctttaagatcctatggcagataatcctgatgttcgtgttctagtcacaactagaatctccatgaattcaatggatgtggctgttggaaattattttaccaggatctattaactatcatgtatgtttgattaacaacctaannnnnnnnnnnnnnnnnnnnnaataaacacatataaagttagaaaa

SEQ ID NO: 119029 - DNA, 2221 bp, Cannabis sativa
tcaacaaatcattagtaacaaataataatcaaatatttgttaatcatcaaaacaaggagatctaaaagtttgagttaacagtttggactgacatgtgcaaaagtagtttccaagaattaaagaagaagttaattaccacaccaatgttaatcttgccagttagtgatgagaaatttgtgaattattgtgactcttatcaacagggattaggttggattttgatatagttcgaaatattaattatctatgcatctaggcaattgaatgattataaatagagttattctacacatgttgtggaattggaagcgacgatgggtggaactggtcaaagattatgactgttagattctctaccaccctagaaaagtaaatgtggtaggggatgctccaagttgaaaagggtctagggcaagcctatgaaatgaagagaacttcactaaagtgaatcaatattacaatatagtatgatttattagaaagaaacaagacaacccaaaaaagtgatccataactacaggagtataaagaaaagcctgtagtcggtggtcaagtatgaagagtgacattgtggaatatgtgtcaaatgtctaacttttcaacaagttaaggcagagtgtcaaaggtcagcgagaatatttcaactatatggtactcctaggtcgatcgcttcagatcgagatctaaagtttacatccaaatactagaggagtctgcaacgagcactaggtaccaagataggttgcagtatagtttttcattgtcagactgatagtcagtcagagaattactcaaatgtttggggatatgctacgggggcgtgtgtattagattttgagagttcttgaaatgagcatctccctctgattgagttttcatacaataatagttataagagtactgttgatgtggcaccgtacaatatattttatagaaggaaatgaagggaacacagaaattggaaagaaaggaaagttaaatcccagatttattggtccgtttgagtgtctaaaaagggtaggtcaggtagcttatcagctagccatgctccctgctatatctagagattacacatgtatctcaatgtttcaaaagtatgaggtagatgcgatccttatatggagttacgagattattaaattttaaacagacttgtcgtatgaggaacaaacgttccagatttttgaatagaaaagagaaaatgttacgggacaaagattatgtcgctagttaaagtgttgtgcaagaacaacaagattgaaagccgacttggaagttaaagtcgcaaatgcgggagctgtatcccgagttgtttagataaatttcgagggtaaaatttctataaggaggggatagttgtaatatctcaaaaaatataatgatatttaatcagacatattttattaaatatgtgattatgtgggcatttgagtaggattataatcttacttaacctaattacgagttaattagtgaaatatgagtaaatgaataaataaagcgtcatttattaattacgaagattttattagattatgggggtgctgtagatactattttcaaaataaaatattttcgggttcggtagtcatggaaactcaatagggtggtcagaaatgttacggcaatcaggttgtcttatgttggatttgtaccagattaatttagaactttaagttaacggtttgacgggattgagtagaaaaggctaaattacccttaggttttattctaggtttaagtttttaaggagggaaaaagtggtcattatggtggaatgttagaattttgtcctttagtgttttttttatgctgaactttaggttaaattaattaagttttttcttttatttattaagtttatcaagatagaaataaataagaataatgaaccaaaaattaaagaaaacatcttcttctctttcccttctctcaacagccctagagagcaagcataagaagaaattttaactccatttcaagcaaaatttggttgaagtagtgagctttagaagctgtgcaggcttggagttaagatttatttccattctcattgaatttcttatgatataggttgagttttgggttagggttctaagatttcaaggcttagatgtgaaggtgagttaagaatgtgtttttaggcttgatttaaaatttgtttaagctttaattggtaagaaatagtgactgtttgatttgaattggtttaggtgaagat

SEQ ID NO: 119030 - DNA, 822 bp, Cannabis sativa
tcaattaattttgtcagattgtttaaaacttgcttttctaatatttttttcacaattttttgatagaatttcaataggatttcagtagagaattattaaaaatgcaagttttaagcaacctgataaaattaattgaaaaaatatcaaaaactattaagaaaatatcaaataaataagataataattttttagatttctattgatgctacaaaaaaagttatacaaagttatcagaaatacaatttttaagcaatatgacaaaattaataaaataaaatatcaaaaacccatcaaaaaaatattaaataaataagacaatcatataaccatcgtaaaatgatcatatttgatcgtacctaaccttacgacactacatttcctgaaaccatcgaaaaaacatcaaaaattcaataaaaacagtaaaaaaatgcgaaaccacatatctaaggagttcaaagttaaaaacactgaaaatcaatgacagccacttaaatctaatgtaaacaaactatatacttctagaatataatacaaatagttttttaaaacatagaacccattaatttgggtgaaatttgggtcaccttctcggaggcaggctcctactcggtgaaattggggctttcggtcttcgaaaaattttcgaacgaagaagatagagaaaggtggaatggggtgtaggtggttagtggtggtgaaacaaggtggatattgtcactggggcttcaacagcgaactgagtttggtctcgcagtttgagtttatatttttggtggtttttgggtttgggttctcttcagatgttgagagagagagagagag

SEQ ID NO: 119031 - DNA, 2413 bp, Cannabis sativa
  modified_base (1436)..(1437): a, c, t, g, unknown or other
  modified_base (1506)..(1516): a, c, t, g, unknown or other
ttgtacatatattaaaccacaaacgtgaaaacaacatgcaaacataaatgacttctaatcttttattgataacaaatcagattagattgaaatgtgttttatttagggcataaaatcccaacacttggaataaagacttttgctaaatctttctcttagggtcgaatatacatatgagctttggagttagatttttaccactttattttaactaatgaaataaaagtgtcttttctaattttagcacttttctcttctaattatttaaataccaattttattttaataattataaataatgtcaaataaaatacaatttaattatatttattaattagacccaccaattgtactaagtaacaaatgaacccttatttcttttttcttctaaaaaatacccaaacttggtgacaatgctcaaataagacataggctatttttgaattctaatcaacttattaaatcaattagttgagtctacaagtgatattatcccaaataatgtggggaccgtgagcctatgtaaccaagctcctaataagaagatcttggaatttacaaagtaaatttcctaacttattaattccttctgactccactatagattcgaaattacactcttgattacatagaacgctctatataccaaatatagatatattatgaattatcattgttacaatctaaatagtcaatgattctctatagatgatttacattgagtagggacaaatttactattttatccttcaatgtattttatccttaaaacacttagctacatgtatataatattttaataaactaatatagttattgaaatgagcgctttatcatttatcgcattaaaccaagctctaaggaaaccatcattttacttctaatagaagctttagattccatatctatgattaacactctcactcaattgaactaccgagttcaagatgcaagtattgggctgatcctattggttagctataataaacaagtcaaattaagctagaatttaatcatctcaagattgagatcaattaatctaagatcaactaagtgaaattgacttaaaaaaagagataacgataagtttatgataccttttctactatcaatatcggtcaagtctgatgtatagccgatacatataatactactttactttgctaatgcattggaaagaacattccacttatacaagtgtaagtaaatcacattgttgattatcacgtcaatgtaaatccagtgcattgataaattataagactaaatagtttgaagcatataatcatgattattttccagtgtatagacaacactataatcatgaataactatatgtttaagatttaataaaaatttatatattaaacatataatcataaaattaattatgtgaatcatgcaatataaaatgatttttgatcttttattaattnntaaatctgattatattgaattgggttttatttagggcataaaatcccaataaactcccacttgcactannnnnnnnnnnaaagtgtatttcaattaatctcatcatcttgatgtccagattaagtgtagtatgtactattatctttgtaataagatctgacaggttgtattcaatatcaaccttctttaccattacatctcctttgtaacaccctaacccttagggacaccacgtgtgtgtttataaactagtttataattataaatagcagtttagataaaatgtaatttaataaaattttactaagtaatctaaataataaaattatggcatagtccttatttatgattgggaatcccctatttaaaatattacaaaacatgccattacagttttaacataaaatacatttaaaagtttagaacatttgaaatacaattcctcacaactcagcaccacttgctggtaagctgatatgtacatttactgaagaagattcttgactcatgaaatacagttttaacatatcagtacatttactgatatgtacatttatgattgggaatcccctatttaaaatattacaaaacatgccattacaattttaacataaaatacatttaaaagtttagaacatttgaaatacaattcctcacaactcagcaccacttgctggtaagctaatatgtacatttactgaagaagattcttgactcatggttgtccaaacatctctacctattacctgtaccacatagcacccgcgagtcacaaggactcagcaagaaaagtagtaacaataatcatataattcaccacacaatatcaacaagtaaactcacattgttagaatcaaataaccgtatatcattcacatatttacatttgaatcattacaaatattcaaaaatattgaatgttaatataaaaatatgttgggttttatgccctaaataaaactctgtttcaatgtaa

SEQ ID NO: 119032 - DNA, 927 bp, Cannabis sativa
  modified_base (873)..(885): a, c, t, g, unknown or other
cacacacacacacacacataggcttatactctccatcactgagctttgctaactccattctaatattgtgatcttaagagagcaaccttagattccacaacactagtgatctgagcggtattatctctggtatcaatacaaccaaaatgggagtaggtcattacccactaacttaggggaccaaacctctataaaatctagtgtcttatttacttttctattcttattgtgcaacatgtggcaggcatcagtaataaatatgactgcactgtcagttggccaaatttgaggtcaacagtttgctgctttcaatgagagcgagttgttaatttatctaatgaaacgtcatggttaacacgaggagagctctggctatgacatcgtcctccttgggtcttcctcaagatcatatggcggctaattctaatgttcgtgttccaataataattggaatctccatgaacccaacggatgtggtcacctccacaatctcagtaggcaccataaacctagccaccacaactggctacgtcgacacaaccaatttcgtttgtctcaataaccaacctttgccaccaaaggaagaccctccactggcaccttatactaagagaatggcccacgtggagcaaccccatggcaccacaactgaatatggtcctttgtattacgcgggagagacaggactaggaattggtgagccaaccattggcgagccccatgtagacttgggagaagatctcaagttggcgagacttagagaggtcatatgtcaagtcagccaagctgaagaattgcacgttgtttgctgcgatgtattcgcacaatagagatacaaatttctgagatggatggtgttggaaattattttannnnnnnnnnnnnttactaacaagtatgttggattaataacctaatatgaattct

SEQ ID NO: 119033 - DNA, 1817 bp, Cannabis sativa
tccacgtgtcccctcttgactggtccacgtattttgggcgaattttggagcaacatatactatgttcatgttaagtaatgttaagtgtaattaaagtatgttcaaattttttaattcagtaatgtatttttattttttaattttttaaattaagtttgagattttgattttttagaattctttttagctattgcggctacattggtatactctttagatgtaaatatatatgtatattatgctcaaacatatattttaaaaaaataataataataatagatacaatatttttaatttatagttaggacagtgtggttataataaagtatataaattattagaaatatacatatatattattaattatttttaaaataaaaagttgtgtgaaattaaggtttaaacatataattttttttatataaatgtgattatatatagatataatttttatttttaaatatatatataattaaattaattttttatataaaaaatttctacataatttttatttttgaatatatataataatattataaaattaataaaatttattctattaaataattgagatatttagttaaagttgacatagaaaactaaaatgttcctttaataaaaaaaaaaaattctttatataaccacatttatatgaaatagatataaatctctatgcgtataaaccctgagaaaaatctagctcaaacccctatctaacttggtagggtataacttggtagggtaacttgatttactcgaaaaagtgaatacacaaataaaatcaataccaagtaatttggttttcccttcatagcaacaaaaaacgctcacttggatgagtatgtaatttacaaattaatttacaaattaattggctttaaaacatcaaatcagaagaatattgacgagaataagatggcaaagaaaaggagtaaagttgtttgttatcaaaagtagggatgaaaatgaggtgtgtactaagtgggtaatgcacctcccactttcgtcctcattttttatttatgttctccatcacactctcatcccgtttaattcgcgatgggttcgagataaggatttccattatatatggagatcatgtagtacacataattaaaacaataataattataagaaaagaaaaattatatttgaactctcaataaattataaatacaattttaatggaaaacaaaattatatttttatttttgtacaaaattatcaaaatatacaattttaaatgataagtctattttaatttttataataattacacttatttttgcttataaaattaatattaagtattttcttcaagtcttaaaaaaaaaatcattaataaagaaaaacaattgaggtttcatataaacataaaaaaaattatatgtttaagtattatattatctaattttttttattcacttatatataaatatatatacaaatataggcagtcgattttgtacctagaaatgcaaaatacaaaatgtattccgttgtacggcaggtgggtccaaagatacgtaataatgtgtaagaatttatttatttatttgacaatcgattggtgtgggttggtttacgagttgtcaatttgattttttaattaacaaataaaaagggacaatcaaattactatttgggatagttaaggtacgaaaaagtacaacgaaattactattctggatagttaatagtacaaacatattgtagagagtgggtccatattgttggagtaaggttattttcgtcttttcattccttcatatcttctacatgtttgtgcgatggtagttgagtatattatatca

SEQ ID NO: 119034 - DNA, 703 bp, Cannabis sativa
tatatatatatatatctatttcatcgtaagagatttgtatatgagaagaagggatcaatttagaaaaggccctattacgatggatggagaaaagtctgaatagttaattaattagctagggtttttattcataaaattttatcatagatcatatatagcgttaaatctaatgttatgtcattccatattattaaaagtgtctacattatttcgtagcatttttttaaatgaaatttactactattattagagctttaaatacaatatttataaaacttaatagtagggtgttaaatagatttcgcctattattatgcactaggtaatagttattatttataaagaaaaaatatatcaaataaatttgtgtacagaacaaacttcagttatcatgttttctttaaggaataataatgaaaagttacaaataaaatgatctaataataattatttacgactcaaaaattttattatcttgaagtgaaattaacaaattaattagcaatagaatatttttaatgctccttaattataggtatctagcttattttgatagctaatatttgaataagtgttgattggatttttagttaactgacgatgtagagaccacttagttttaatttggaattagcacataattagggtttaattataaaactagaatattaattatgatttattattttatggagatttattt

SEQ ID NO: 119035 - DNA, 985 bp, Cannabis sativa
taattgtgttgcgtgtttgttggtctggtatattgaatcgtaagtcattaattgtttctattacgtacaacaaatcggtattagagaacgggttgtaatcatgaatgtcgcaaagtacatatgatgttgaaaagtttattggtacgaaaaattttagattatggaggatgaagatgaaggctttgttggttcaccaaaggttgtacgaggctttgctatgctaggagataagtctctttgtaatttgatgtctgaaaaggaaaagaaagagactcttgcaaaggctcatagtgcgatcatttgaatctcagagataaagttttgagaaaagtttcaaaagaagatacagccgcagatgtgtggttgaaaattgaaagtctgtatatgactaaatcattggtgaatagattatatctgaaacaggccatgtattcattcaagatgatggaagaaaaataagttggagaacaaattgatgaatttaacaagttgattcttgatgttaaaaacaatggtgtcaccattgaagatgaagatcaagccaagttgttgctcaattctttaccaaagtcttttgcacactttaaagatacaatgttgtatggaagagagtcgatcacactcgatgatgagcaatcaatcttgaattcaaaaaagctgaatcagaggagtgagtcaaagaattctggaactggtgatggattgtttacaagaggtagaagtgagaaaatagaaagtcacaaaggtttaaaaaatcaagatctaaatcgcagtttgatagccaaaagaatcttagatgctggatttgtaaaaaaacagggcatctcataagggcgtgtccaaagaggcattaaatgggtagttcaagatcataaggggatgcagtagtgagtagtgacagttatgactcagctagtgcttttctagtaacctctaagaattcagattctgaatggatcttgaattctgggtgttcattccatat

SEQ ID NO: 119036 - DNA, 1591 bp, Cannabis sativa
  modified_base (113)..(115): a, c, t, g, unknown or other
tgggctttggagttagatgaagtagcggattaaattggtgatgactcatgtaatcttagttttctcttttttccttgagggcatccctttcttcaaaatatatatatatatannnatatatataaatatatatattaacgcaattgggtttagtacgtgcgtggcaattttaacaactagagatgttttttgttgatgtgtgaacacatatcttctacgcgcatacttcttggaatgaccatccacgtatgggaggtctggaataagctttggaccaagcaaaattaagctcattggctaagatacttgatttgatggaaacaggatggaccaccatgcatatttattagttgacctgcctaaaacctagctggaccaccttcatcggcattgtaatacatactttctagtgttcaagctgaacactgcttctacgtaccacatttattagtgagcactaaggatgtaatatatacgtaattaagtaccctatctagtcttcatatgtgattggcattgtgacaagatttaaagtttgtttttctttctttttgaactttaaatcaattgttaattaatcaacatttatttaaggaataataagacaaaaacgatatgaatatactggaaaaattggtaagcattatcatgagtcatgactgatgagttgggaaaatctaatgcatatcttttaggacagtggtgggaaccttagtcattaatatttaatatggtaacgtaaattgtcacttttttttgtttgtttgtttgtttttttggtgggtaaggtaaaatatcacttgtttgttaataagcggctaccactacttcttctactacttatgttacggacgaaattgtttgcaaaaaactgtcgacatgttgttagttgatactgaatttatattattatactaagcttaatttagattggtaaatcagaaattcatgataatcaatattttgaatgaatatttattctatataaaatgtggttaaaatgtggctatgtaacaaaattattagtttaacgatattgtttttaggatttttatgttaactttaacaaatatcctattaattaacaaaatattctttattaattttataatattattatttttaaccgaatattctattaattaattattttaaataataatattataaaattaataaaaaaaaatattttgttaactaataagatatgcataaccacatttttatgtaaagtagatatatatatgtgttaagtgggtatgcaacaacagttcggatcatatcagttatataaccaatgtaacattttcctaaaccagtataaatgaaaatgtaacaatagtggttttgagttttgacagaaaatgaaatagagactatagcgatttaaaacataacgatacgaagaatttgctttgctttagctttcacagtgtctcaatcattcacactgcgctaatatgaacagttgtgaagaaaaatgtacgtataccaacttgaagcacatgcatattaatattgatgagacagtcaaatggattctaaaacacacattcaattggaaaaataacaaaagagagagagagagaga

SEQ ID NO: 119037 - DNA, 872 bp, Cannabis sativa
  modified_base (815)..(822): a, c, t, g, unknown or other
agagagagagaggtgttaaggttaagctgaggcgtttaagtgtggaattgggtttgggtttgggttgggttagttagcttggctagcttatctctatgctttatatataaatattaaatacctcttctttattattattattattattaaattaaattttaattggccttaattaccgtcttgccaccaaaaactattgtgagattattgaataaactaatcactcacaataccacaccaccgcctcacgcgagaatttttaatgatgatactgtaaacgacatgtcgtttataatatttgtactctaaaattttataaatgtatattttaataattttcattttattcaaatatattatatttaattagagtagtttttttttttttaaaattttttatttatattcttaaaaaatgtatttatcaaataaaataaaatatttttcatatgataaaaaaattaaaataaaaatttttattaggaaaaattagaaaaataaaataagtattgaaagttgtgcccttttcaaaaaaaagaaaagaaagtaatataaaataatgtgagaaaaaaaaaagataaatattacttattctttataacattacttattcataataataataattagaaatagattgatgttgtttaaacagttaatttttttttaattattgagattattaaatatttaattttattaatataataattatatatgtgctaaactaattcgtatttttaaattttaatatgtaccaatttatatcttcaaatttaacacatattaaattactagtaaaaagttacgtgcgnnnnnnnnatactaaattttatgctaggtattttttattatattaaaaggtaatacac

SEQ ID NO: 119038 - DNA, 2619 bp, Cannabis sativa
  modified_base (292)..(294): a, c, t, g, unknown or other
tacacacttggagaaaacacatcaaatctatacaaaaataaatactaattcatctaataattgactaaaaatgagtgtacaaatgtgcactcatcagagtactgaacatagatacgggctaacctgattaggtgatgtaattatgtgatatatgtgtgtcaagctatggtacgggcttgcctgattgggcaatgcaatagaggattatcacactaaagcctcaacttgtctgattaggcaatgtgatataatgaagattgttactttataaagtaatatatatatatatatnnnatttatattattaaatgaatatgatttcaattattggtataatggttttgtattaccagatacctgtatactgatgcttattcgtgatacatgccagtagtgatttggatttcatcgtatgaacaattcgtgatggtttgattttgattgtatataaatgagaatattcgaataataaaatatgtgattatcattattacttttcttgctgagtccttgtgacccatgggtgctatgtggtacaggtaaagtcaaagaaaaactaaatcaaccatgaggtgagagtcttctctagcaatgtacatattgaccttaccgccctacgtgttgagttgtcatgagtttttttgggctgtatctactttgtattttggttttatgtttttgaggcatcatcgtatatagttgttttgtaaaactttttataacaggggtccctggtacacgtttttatgccattataatgtccattttttaatgttttattttaattaagttttaatattatcacgatttttaataattaattaatctattagtgttaaactagtttataaaattatactcgtgacgtccatacagattagggcgttataccatttttaattactataatcaatatcattttattaagaataaatatcatcttaatacattaaataattaatgaggccattaatgaatgattattgaataatcatatttccactcaaaagtttgaaattagaaagtgttaacttttccattaatttcaaactcatcaagctttgatgttccatatgttagaacaattactaatttaaattagttggacattcaaaccttcatggtatatcttatatttttataaatctcattcattgaaaacggtttagttccactggaaaatataatttaatttaaaaacaatatttgttgttataaagaacaatctagttttcttaagatcattttctatttaaatgagaagtgcactcccactaaaaatactttattacttttgaatgtaattaattgttatgactattaaaatttaattttgactttttaaaattacactccttttagttgtcatattaattaagatttatttgtatgaacactttctatcatcattctcaatcttgatgtaattcaaccacattcattaaaactcatttaatatatttaaattatatctcatatttatttaaatggttagttataatctattttattaaagagattcaattattgtgtgttcaaatgtgaggtaattcaattagattattctaattgaatatgtatatttctactaatagtttcttacttaaatatttattatacatgattggaatagatttctatatccatttatatgtttgatagtaattcaaacctctcaattaaatctcatttaatcttaatgtttagcaatttagaatcaaaattatattttaattcttgacaaacttaaatgtagaaatatcgataagttactatagcaaatagttacttaattattagctactcaaaataaataattgaagttatttaaactttattttagaaatattatatgagcgttgaagtctttagttaacttttcacacataagtttgaaattaaataaaaattatctaaaaaacataaattgttcaaaaaataaaattatttaaataaaataatctttaaatgtgcaactaaaatttggaacgataaaactaaagaaattgtcttcaaaattataacaaagatgacttcttcattgctcttctaaaatgttcttccttcacgaactttgtagaagtatcatttctttgaatcatctctgtcttctgttcgcaaatctccaagcaagagagaaaataatgtcagtagtttagaacaatttaatccattgttgtttattaaggcaggaggaaaagcaaatcatatttacctgttggaattattttacccgtatctagatttactaacaagtatgtttttttaacatcctaaacatgaaattctaaaacgatatgaaataaacacatataaagttttagaaaccttacagtggttgcagcggaattgaatggctccttccactcagatctctaacccttgtatcatgtctgtagcagagtatcaccaagatgtgaggccgaatctccttctcttgaatctggattcttcacagccttacacactatgattgagtatcacttcatctgtgtgggaacttactctaattactctaggtatcggtttgaagagaggaagagagagagagggtttcaaaataggaagagtgaaggtggctcaaaattttactgaaggaaagagttttcatcatctttt

SEQ ID NO: 119039 - DNA, 1889 bp, Cannabis sativa
  modified_base (1837)..(1850): a, c, t, g, unknown or other
ttttttttttttttgacaaaactatataatattaataatagttcttagtatctaagaattcttgaagaaaaataaaataaaatctgatacataatacatataattaggcatacttttatatctgtcaatattataactaattattctcactttcacatagtatcctaatttagttaaataagtcttcttgactgactcaagatttaagttgagcgatatatatatgtaatagactattgtctcatttgcttattaatgagaaattctatttttctctctaaaaaaaattactttcattgaggtaataatacaaatgttattgatagagaatcatgaaaaaaagaaacataaaatactaaaaagtatacatggtcttgttggaatttgaacccacttatactacatgtgtaaacactacaatttccgttggttttcaaattaattttttttaggaactgtcgctaataaagttaaatcactgtttaaaaccggttaaaatagtattttcgacagttttaaactgtcattttagaatcttcactcagactatgcaaaacagtcacaattttaaaattctaaaacgaattaaaacatagtattcctgacagtttaaaactatcgggtatattataacttacaattttaaaatcgttggagatagcgcgttaaacataaaaaaatccaaaaataatttatttggttcaaacattcagatctcgctctctcttgtctctatttctctctcgtcttcaaactcgcaatagaaaccaccaccacaaagcgatctctctctctcactctccctctcccccctctctcaccatgatagtaaatctcaaggattggtggcgcctcttcctcatcggtgaccataggtctacaaaataattaatctctattatttttattttggtatctatatatttttgagatttttatagttcacaaatcgttgagtatctaagggtaatgatttcggcggagccgtggcccaaatttcaactctctgagactcttaaggccagaaaaaactcttattttgagtgctcgtcggagaagacaaaaaagactattcttttattattaagtttttttattggttgtgtatatatacatatttattgtgtatattggtcaataatttttgaatttgtatttgtatattattcttattaggggtgtacatcggtcggttaggtcggattatagtatatttttatactaacccaatataaatgtcgggttttgtaacccgtccaatgaaaaaataaaaaaagtgtaactcgtccaatgatctgttagtagtggattttcattggtttggtcgggttaacccatttaaaccgatctttattttttatttttattttcattattgttagtttttaatgttcaaataattgatttgaaaaaataaatgtatagtatatgcctttcaaaattaaaatatttatagtttaaatttcaaattaaatattataaaatacaaactttaaatgtaaaatagtttaactattaattgtaatttatatattatattatagataattaattttagtaaaaaatatgtaaatcggtttattcgatttgttcgggttatttagacgggttagaaattaatattcaactcgatattgggcggtttgaattttttgtaaagttattcgagttgtatttttatcagtttattcaatttggtttgggcaacttgtaaatttttttgaaccgccctagttcttattgttcatattgtaattttgaagatttttttttccgatgtaatgttatagctgattgtgtaaaattgtcgacaccgtctgttgggttttatgccctnnnnnnnnnnnnnntcaatataatcagatttgtttattaatatagatcagaaa

SEQ ID NO: 119040 - DNA, 2603 bp, Cannabis sativa
tttatagttaaatttgtttagtactcatcaatagataatacccatttagaagtatttcatatatatatatttgaaaaattatttatatatagaaggaaagaatgattattttattaaaaaaaaataaaagtaagaattaacatgttgtaggtaattgtattttttaaaataaaataaagaataaagaataaagaacagaaatcaaaattagtttattagaataattgcttaaatttttttaaaattttcataatgacctaaattttttaaaattttactaatagacaatacaataccttatgatgtgttattccacatgtcaaaaaattttaatttatgtactcacataaactcatccataaaatctctattatatatccatattgactactaaaaacattatactttttttgaggcaaactccattaaaatgttattatggtggacgcctttaatctatataatctttgttttgtattcattctcttaaaatattttaaacaaccatttgatctatatactgaaaataatttctaaaattctagtttcaaattttcttcccggagctaagaactacatatccaaacgctttaaaaatatatgatgactactaaatatttcctccctataaaatatatataaactcaaatttaattgtggtaataacaataacagcaaatattaaaataaaaataaacaaagagaataaaacttaccaaggatctttacaaagataaattctaaaaagaaattctctcagctcttcaaagatttagtgaatttgaaattttcaaaactatacattatttaatgtggataaatttaacttcttgatattccatattctatttatctccttgagattttcttgcttcaacatcattcgcatctactttagttttatcatttctattcgttccaataacaattttaataattgcttattgtgaatactttgtatttggaggttttctagagtttttgtaaatgagtctaatctctcaaccatataatcaattttagcctccatcgaaaaaaaaattatcaaataaacttacacacatctaagactcatatatgcatcactatatataatctttttaaaaaatatatatcacaaaacactcaattttaattctgttattatatcaaatatattcattgttgtttatttctctctaagagtaaaattgatatcagttggattatttgtgatctttattctttcaaacagaaattattttttgaatttttatattatttatggatttgatatcacaagtatattaatattttaaatttttttttatatataatacaaataggatgtgattcatgataaagattattattactattatgcatgcatctttgtatgcatacaataggatcagggtcggccctgccctgagtaaaattggaccctagaaaaaaaaaattagcccctttttttaaaaataaatagtatttttaaaaattattaaaatatatatattcattaaaagctttttttttaattgggccctaggcgcgggcctagtccgccttagcctagggccggacctgaataggatgtgattaatttgtgtggattgcaataaataaactccatagcaattttctaaaagttataaaaaatacactataatattcaataattaatttttaaatcattcatggataatcaaatgtataattcaataaaaattactattcatacaacaaatcaccaacaagttacctatttattgtatttttttaaaaaataaattatttattgtatttaatgtttttattcataatattaaccattagatcaagatctaaaggttataaacaaatcactaaaaatagtgattaattttaatcactattatacaaggacccattttaaaattagcataaatataaatgaacttaatattcattacaatttaaacaatctcttctttttttaccctataaaagtcatattgttttttttactatataatatagaatctataaatttaaatgttataaaaatatttgttataaattttaatgtacttctataattatcgattttttttcttttaaattttagtacttttttgtttaatatttaattaaaaagtaatttaaaattaaattaattataattttatttaaatttttcattaagaaaatgaattgaattaattattaatatattatgttatttaaaagttctttcttttttttttaggtttaactaaatatcataattttttaaggactctttgtgatatatattgataactgaagcttttatttatttggcttttatctcaataaaaatgtgaatccatctttatataaaataataaataataaaattttcttaaatattatataacaccctgttttctttaagacatgtgattagtgtatatttctcctttatgataaaagtataatttttatgatgttataaaagttttacataatttagaaatgtgattagtgttagacttataacctataaatatatcactcacactacaacattcaacaccattagcggcggagtcctttctggccgctaaagggcattagcagcggacctcggccgctattggtcc

SEQ ID NO: 119041 - DNA, 2242 bp, Cannabis sativa
ttgttagtaaatctagatcgtggttaaataaattccaacaacttcatcaaatagaaagagaacattaactaggtgagaatacaaccaagaaagtaatatataaatattaacgttggtagaatgctaacaataaagattgtttatttatgttgtcaagcatggttgataccttgaaaataaggtttgttaacactctcacaattgttgagatcatgaatcagttaactgaactttttgggaagacgttggatcgagctcattttgatgcgaccaagaacttcataaatgcacggatgaaaccaaatttgaatgtctgtgaacacctactctagatggttagttatttctaggaagctgagatccatggaggtattatagatcaagaaactcaagtgaacttgatcctaaatagtttaactccaacttttataccccttactccaaactaagttatgaataagttgactttttactctcatgagttagtcaactatacctttagacgtttaagtgtttgattagaggcccacaaaaaagaggtaacaaacctcctaattgtactaatgctacaaatagtacggctaaagttgagacaaacattgcctctacttcaaaacccaacaagaaaaagaagtggaacaacaacaaaaagcctcttaatgttgttaacacaactaataaaggtaaaaaggctgttaattcaaaggcaaaaagaaatggatatgtttctattgcaatgaaaagggccactggaaaccccagtatcctaagtttttggcaaataatcaaggtatttctatttcaattgttaaggattcatgtgttctagagaattattatccctttgggttattaattctagacttactaaccatgtatatgtttttattttagctccagctacttaaacttagattacaatcctagcgagttgagatggatagttggacagaagggtggacagtgtccaagctagaagacaaagctcagaattttttttgataaattattttatttttcaaacaatttagtttgaaaattctatttcctattgcagacattattatgacattttttcaaagtattgattaaaaaatttctctttaaaaggatttcattatgagtagcttttataaaattaagctttatattctgagacatatatgcaaataccaaaattatatttgtctatttatcaagcttttatgtgttttacatttattattgatacaaaatctatggtataaatcttattaatattctctttaacaagataatctctacaaagaaataataccacataaacacttgaacataaattcaatatatatgaataattgtcatttatattatgattttgtttaataaacgaacttgtgatctgataggggtggagaagtaattaatatatacagttcaaagatcttttataatgaactctaaattatatttagaacttactaccgcaaaatctctataacacatatattttaataagacattgatatatattctactcattttcatgaagagattaagggtggaccatttcatgactagtaaactagtagaataaatttatcgttgatcgtgtatatgttctattatttcttacaatagtaaagatacccttaaagtccctagacatagaatcacagtaccttatcatagtgggaggatttttataaatccatcctgttattattttgataacattaatgatgacttacaatgatatgttcaagaaatgaactttaaaataaaactaagaaaagttaatctaaccattcacatggatagttataacttatgagaattatgaggaaaatataggaactcttgctatgtctatttaaaagacacaagcataattcatggtctttatgaatttttgtttacaacaaagttttatagtatctctggtgataacttattcttaataagtattatacattaatgtaatactagaatccaatgttgatgacttagtgtagaaagaatttattgtttttgaaaaaagataaatgtcacaacaggatgtgcctaagtaccgatggtaagaggttaaatacaaacttgtgtatgtattaaaccaaactcatactattgagtgggagccatcaaaagtgtaatccaataagggaacatcttaaataaataataggtttgttaaaaaaaatattttgaataaacaatttaattaaaacaaacaatatccatgtaacaaatgtgaaaaaaatat

SEQ ID NO: 119042 - DNA, 742 bp, Cannabis sativa
attttaaaatttattagagcaacttgagtgtggacaatatttttgttgcttgcttatccttaccaataattttcaaccaattaagtacaaatactttatataattatcaagggacgaagaaaggatttttttcaaaaagttctgcaacactctaggggattccccctctttctctttggtcctttcttcgtgatgctatacccaatctctttctttttctccatctttcgtttttaccctttttttcatgattattaattcaacaattaatgctctttaatcacacatcaggtcgagttcttcatttaatgctcttttagaaaacccttcgttatactctttcccaaactggactgaacactggaccatatgcagtatggctggtttgattttaaaattgttggcatctatggtaggtggtcttatcaagttaggaagcaaataatccttcaggctacggtcattgttgccattatttgtgttgtcagtcatgactccttcttgttcaatctctattgcagcaaataatcccgtcggtttccataaccctcgcctatacaaccgtcgtaaaatgggcataataggcgacggttcaaaaccgtcactaatgtgggtttcccgacggtttaaaaacgtcgcctataactgggtataggcgacggtttataaccgggtcttatactataggtgacggttagtataggacactgtttaaaatcgtcgcctatagtataggacacgg

SEQ ID NO: 119043 - DNA, 1580 bp, Cannabis sativa
taattggattggatcggatgatgattttccaaatcaaattactaattggattggatcggatgagaaaaaaaaggttggattggatcggatgcccacccctaggcatttgtgcatgaagcccgtgtgatgacaaaaagcatcagaggggttaagggtgaccaaataagtgcaagaagttgttatagtgttttcattcagtttataatgtttctatttggtccatgttcacagtctgggaagaaataattttttctactagaatagacgttcaggtggaggatgaagctatttgggaggagtttcaggatgaactagatccatagttgggatagaaagaatgattgaacctcaagaggatgtggaagaagtaagaatttgtgaggcagaccccactaaaaaaacattaaggtggagaggaatttacatttggtggtgagagaaaattatgactacagtcaagaaaaattaggatgtgctagcatggagccattcatacattatgggaataaacccaaacactattttccatgacttgaatattaatgaagatgcaacacccgtctgacagaaaagaagacccttggatccgataagggcagaagctgtgaaagcagaagttgataagttaacttccaatgacttcctctgggagtcattgtacttggtatggttggaaaatttggttttggtccccaagaaaaatggcacatggaaagtgcatagacttcacaaacataaacaaggcttgccaaaagactgtcttcccctactgcggatagaccaaatggtggatgccacttctggatacaaattgttaagcttcatggatgcttactctggctacaatcaaatgaagatgcatattttggaataggagcacaccatttttcaaacggataaggggtttactgttttaacatgatgccgtttgggttgaagaatgtcggagccacttatcaacggttggttaacaaggagaaacttgggagaaatatggaggtatatgtggatgacatgctcgtgaaatcaaggaattttgtggaacatagtgatgatctcgaggaggccttcgtagttatccagaagtacagaatgatacttaacctaaaaaagtgtacattcagagtgttgacctcgcttttagccaacgacaatgagtcttaattgtaagcgataatatagatataatatgaaaagataaataaagaacacaaagttttaaagaggttcggccccgagcagttcagtaatagcctagtccccttggtttgtattgacttaagaacaaagaatacatagattcttctcttaaagctcttacaatgatatctctgagtatactctcttagataatttttttcgaccctttgcccagtgagagtagatcactatttatagggctacaagcttgagggaaggtctcccttttgtttacaatgtctataattggtaagattacacattacatactacactgattctgggatttagatagcttgccatatctctgtgatacgatcccagatttttagggattgcttttatgcttcacgatgcaagtgctgaagttgctaagtgtt

SEQ ID NO: 119044 - DNA, 717 bp, Cannabis sativa
atattgacatcaagttccttgttggaaaagaaatggtgcagattggacaaatttgtataaaaaacttaggtacaaattccatgattgcagactcttttacaaagattttgccacccaaggtctttcatgagtacactgtttatatgggtgttttagagtatgataatatctagattcaatgggagtttatctttattatcatttgtgttttatatttgtttcatgaaacttgtgtattttgatatttttctgatcgaaattatgttattcaacaagatgatcaaccgttctacttctaccctaataaccatgataacgattttgattttgtttatgcttaattataaaattatttactttaactaaaaagatataagactggaagtaattttatttattagtttggataagagttcttccatgactttttaagggtttattcttgctcacacacttcatgtgcaacttggatcgttgagtgtgcaattttattgtataatgttcaagggaatatgtttgacgtataagttcttagataactcttcctacttattaattcacgtagcattgtatagtaataatctttctccctcatgaggacctattcaaatctaacattcttgaacacattactgtcaaaacgtggtttaactatctcatttgtaggttccttttcagttttccaggcagaagcagttgctttactagtaggtttgc

SEQ ID NO: 119045 - DNA, 3718 bp, Cannabis sativa
  modified_base (257)..(260): a, c, t, g, unknown or other
atatatatttataaatatactttgaataattctatgcatgaacttgtaagttgtaatatataaaagtgggtcatgatcatgataaaaagtttgtggtttttaaacagtttacgaagcaatatattatcgttattgggtttgagattgaaaagaaagaacaacttatattttgtgtgtgtataataaattgataattaatgaaaaagaaaaaaaaaaagaaaatctaaaagacgacacaataataataataataatannnntaataataataataataattggaggaggtgatgagtttggagtttggagtagtgattctatataatctggagttttgttttactgtcccgaccaatccttatgtatcagacttattcaaatctagctaatatatgttatgtttttttttgttagttcagtttggagtttcgacaccctattattgcaacctttaactgtgctttccttttgtcctattattattataactatataacaatatttgggcaaaatttttttaacatttctaattgttacacatatatatcaattttaatcaaaaagaataacgacaaagtattttattttacgattttgttacagtcgtatctttttagttgttaagtgtcaattaagttcgttaagtatcagcttaaaaacacatgacgacatatttctttaacttatttaatacatagtccaatttcgtcacgtgtttaacgaccaaaaaatggtaagattgcaacaaaatcgtaagataaaatacttttgctgcaatttttttttattaaagtcatatatgtaacaattataaatattaaaagagtttcaccatgtgctgattatatatacattaattatgattaaaaaaaatgcactagttttaagttctaagtaaaaagagaaaagaaaagaggtgtatactctataaccccctactgtatagtctcatactttagtgactttttggctacattttagaatgataattggctttataaataaatacaaaaattttgtgcatgttttttttttttttacttgtacgctttttcagaaaaaatttcttagaaaattacctatcctaaaattgtttcatgtcaagcaagtttaattttaaaatttttaagtgacgtactgcctaaaagaatatgcatcttgtggatttaagtaatatctatcaattcattaagctttttttaaccgtatagtcccacatatacaatcatagaatcattacatttaattttacccaagtgtgatgtggggtggcacaaattacttaatcttttttcttacagatcacgggagtctgattgtgttattgtactttatattatatttggtaatttacaaaaataaactttcaatatttttggtacttagacatgttatgttccttcgtttttttttagatttagtgttaaaatatttttatagttggtacttggtagagctaatcttatacattggtaagctagttctgtgtctagagttttactttttaggggctcatttgaaaatttaaagaccttactatttaactattatatttaattacaatcacgagttttatatagctaaaatgtgaccagcatagtggtaatctcagagtataagcttttctcaaagggcctgagttcaactctaacatgtgcataatagtattccacttcaagcttttattcggcatccaccacgaacttgaaaagtatgttttgtccttatttatacgcttagttttttcaagagatcacccatcgtaagactattctaggtcaaacatacttaactttagaattctcaagtaatgggattgcacaatttacgcgatctttcttcttgcgaatcaactattacatggagactagctacctagggaaacagagctggcaaagtgctaatagatgatcctcatccagtcaagaaagcttattgtctaacctaagtgtatatttagccaaataatcatcatggagtcgcaaaattaaaggtgggatttgacatgatgagttaaaattatctctaaaaatttagacaataaatatatatcatttgctaatagctactcacttcattagtataatcagtactgttattcaaaattatagcgagtgaatccgaatgggttactttttttataaaaaatatttataaattaataaaagaaagtaagagttacgatcattacataagatattacctggtatgaaagaaagctaaaccatgctagtaatatttttggcgaaatcccacttagccacattatggacggcaaaattacaaactttaaaaatgaacgaaaaattacaacttaacaaaatgttagaaagatgtctgtataaacatagatagttgtcaatactctaactagaataagcttttctttagcgttttgataatcatctcaaagtcactctcaatcgtcacaaagagatgtttcatctaaaaaggttgcttgaatatgaaaagcaacaacttttgcttgaaaaaccaagattctggaaaggtaaggccaatattagtaacataaaccaaccatatgggtttatattgtaaatatcattttataagaaataatttgacaaatgccatgttttatataattagacctccaccatatgggttaggcaaggtatatggtacattttcccgttgaatatttattcttttaaatttgttcgatcgttgatacttgtttattaagaccatcggagattaaaaattgtgttatgtttagccaaaaaaaaaaaaaacgttttgtggtaaatttatatagaattttagtattgtgttctaatacacaattacaaaattttgatataaaatttattatctaatttatatatttttattaaaaaaataaatttaataactttattatcaattttattattattttaatatataagataataaaaaataatataaatacttcataatttaatgctatagttaaatatattaataaaatagtacatatgacataaatataaataaaaaaatagtacatttattgtgacgtaaattttacatcatagtaaacattgtgtcaaatttggcacaaaatttactatgtgctaaatttacatcactttttgacatactaactattagaacacattttttgttaaataatttatattttaacttttcagtatttatttgcatctccattaaaaatgctaaaaaaaattagttcataattgagctgttgtggtaataatcaagttacatttttttaacttgttttaggctgttaaaaaaaaaggctttgttttaggctgtttatttatatacatttttatgagtaagataaagataccattttagcctcctttaaaaaaaaaaaaaaaaacattttagcttaatataaatccaaataatgatagcaatatctttcaaaaaaaaaaaaaatgataataagaaaaatctaggacgaaaattttcttgcgtagatttaaaaacaatatatattattaatttgggcctattttgctttgtcattgggctttaataggactttaagctcagtcatctttattatggggaaattaacaaaaatactggaatttagattaatttttacaaaaataatgtcatacaaaaaattttttcaaaattacagtgtttttataaaacaccagtaaaaaataaagcagaacaattcaaaacaacaataaaacactagtaaaacaccagtagaataccagtgaaa

SEQ ID NO: 119046 - DNA, 2074 bp, Cannabis sativa
  modified_base (740)..(760): a, c, t, g, unknown or other
  modified_base (826)..(834): a, c, t, g, unknown or other
  modified_base (1509)..(1515): a, c, t, g, unknown or other
  modified_base (2031)..(2043): a, c, t, g, unknown or other
tttaaaaaaatattaagaatattttttaaaaattatttaagtttatattttttttaataatggggtgtatttataagtttatgaggtgcaaataaaactccccccaaaaaaaattggtgttgagattggagatgccggaccttaattggctagttggttgtccttttggagcataagtcaactttttgggcattcagattagttacaacccaaaatataatggtttaggcccaacattaataggctagtgaatgtctttgggcttctttttacagaaatgctcagctttaaagggaaaatttaaaaatatagattaaaaaaataattacataaaataatattttttttttaaaaaaaaaaatataattatttctttatattatttcagtattttataaaaataatacgaaacaataagaaaactatataaaagtaacagaaaaataatatccatacaaaaacaaaaaataatatacaaataataaaaaatcaataataaattaataagagtagaacataaaaatatataaaaagaccatattttctctaaataaaatcataaaaatatttaaaatttcgtagtacttttatgttttttttttcgttatttttgtatatttgtgaaataattcccaaaaaatacttaaaatatgtatccgctagacacttggcagttagcttaccaactacttttaccgtgggcatgataatgggaattttttagggaaatttacatggtnnnnnnnnnnnnnnnnnnnnnttacaaaaatactatcaggcggtatttttttacctttttactgtgttttttttataagtttcatannnnnnnnnactgtgttaagttttcactagtgtctttcactagtgttctactagtgttttatggttgttctactgttggtttgagctgttctgttctatgttctactagtgttttataaaaatacagtatttttgaaaatatttcagtgtgacagtatttttgtaaaaattaactaaaaattaactcaaattcaattaactcaaattctagtatttttgtaaattttccaattttttatagtttgagcaaaattttcaaagttttagcaatacaacttttttttaactgaagtttacaaattcgtaattaaaacttagaagtttataaacatatatcacaatcttgaaaacaatatttatcaggacattttcatttttatgtttttttagcaaagcttacaaaatatggggagacagtttagttatctttcccatattttttgaaggtaaatattactttggactttgtgttttacataaattattaaacggatattctattttgttaaatgacgaaatagatcctgtatttttcaaaattgtacaaataggaccttgaactgattttgtgtcaaaataaaacttaataataatccgatctagagatgtcatgacaaaactagttacattttctgtatttgttcgtaataaaaattgtctaaaagttggttatattaaaaaatnnnnnnnttaaaaattgagctcatggtcttatttttaccattttggaaaatataaggtccattttatcatttagaaaaatagagggtccaatcagtaacttttgcaaaatacagagtctaaaatagtatttacctttttttattattattattactacacaaattgtattaaaaaaaaacccaaaaaatgtataattttcactatttaaagactaaatagaaaatgaaaaccatagcaagtgaccctaaattatattataacactatgtaagtaaatgttctcatttcaaaacttgtagagaaatgatcatttgacactatttattatttatattgtcttttgtcgtataaaaaaatcaataattttttttttccatattttttaaaattagaagcaaattacttaaaaattatgatatatctatattagttttgttgatttttttttttttgttttaaagttatgtcgattttttttttaatttgctatattagataatatttattttttattttgctatgnnnnnnnnnnnnntataattttgttagcataatacaaatatttt

SEQ ID NO: 119047 - DNA, 590 bp, Cannabis sativa
gagttgacgttatctatgttggtatttttattcttaattacagtctagtgttaagattgttttcaacaatattttttatattcctacttttaagagaaattaagtttttctttctcttttagttaaacatggatattcttttctttttacaaaaaaataatgtagacattatgtttgaatcttaaattactagaaattatttttattctgatggtctttacaagttatcattggctcccttagtttccctttttaatattgtaaatattgtgggtaagtgatcttatgttaaaaggaaacatccttcatcctcttgatgcttttggttgggatacttgtgctgattatgctcgtggaaaatttactaaaatatgaaaaaagactgctagctgtagtcaatctttatttgaaattatccacactaacattagtgggccttattccactacgttatacaaaaaaacaagttttttatcaccttcatagatgatttttctctatatggcttcatagttaataaatgttagtacaatgccaaaaatgtatagaactttccttagaataaaaaagtatctttcctgcaactttaa

SEQ ID NO: 119048 - DNA, 1918 bp, Cannabis sativa
  modified_base (48)..(59): a, c, t, g, unknown or other
  modified_base (137)..(139): a, c, t, g, unknown or other
  modified_base (1886)..(1890): a, c, t, g, unknown or other
ttgctaaaagaggtcttgttaaatttttaattaattattttaagaaannnnnnnnnnnnaattaattaattctaaaaaaggaatgtctacctattagtaatctactattacgggtcaaagaaaaatgtaaccatatnnntacaataaaaatgtaaccatttaatagtcacccacatatatttatagacacaactatgttttacctaacaccttaaataaaactaacatttacgtggctcggcacgtaacttttacctagtatatatatgtagttagagtacgtgaacgacatatatgtcgtgacaccatcacagggctggccctgaaatgaaatgtattgtaagcaaaaaaatttttttggactcttactataaaaataaatagtatttttaaaaattattaaaaaaatatttatatttttttaaaaaaatatttttttatttgggctcttaagataagtaggtcctagcacacatatgcctaggatcatcactgtattgtagctattacattctttttttttttcttttcttttctcttttcattaattaatttatatttatatatttatattattctttgtatttataaaattaagaatttaagagattatgtataaattaaaatataaatatcttaaattatttttttattataatttaaataaaaaattattaaattttgtatatattttttaaaacattacaaatttaaacatatattgaaaaattaaattaaattcagacatattttaatttattgaattttattgattttgtagtattattgtctttaaattaattagtagttttatttaaatcattaattagatataacaactgtgataattttagtaaattaatataatattaaaaaaaatattttattttattaaaaaattaatataataagaatatttttagtgtaatttttagtgttgcaggtggtggagtagaaagagtttttaacaccaaatttagtgattaggtcggagataatcttagcaagattaaagtttaaactgttatatatattggttgtaccaataaaaaaaaaaaattaagttaacgtttagtttaccataatattaatgaataggtccattatattgtattattgtttatttttctattttaacaattataaaataaaaacaatagagttatttttgtcgatacacattttattccattactatctcataataaaccaaacacaataattttaattacagtgttcattcaaactacaaatcaaatattgaatcaattttcattacattcttattttattatattttcattagatgtgaagaagtatattgactctatttgtactttttttggagatcttcatacttcttttttcccttcccttactcgtgcgttaaggaagcttggaatccacctccacaggattcgattaagctgaattacgatgttagagtgggacttgatagtatgtgtattgcagttgtggccagaaaccatcttggtagggtggagtgggttcatacggatcgattgagttttttagatgctctttgtgggggaggctagggcgtgctgtttggcgcttatgattgcgaaggacctcaagtccaagttcattatcgtgaagagcgactcgaggatagtcatcaatgcgcttaatgggaacgattctcaatgggctattgaaaactatgtctctttttgtaatagttcttctccctcgtttattggatgtaattttactaatattagtagatcttgtaatttgtagcccacaatgtggtaaattggcttttgctcattagaggtttagttttattccgctatcaaccattcctataaacttattttgtaagggaattttgattttatatacttaaaaaattaaaagannnnnttattaaaccaaaaacctaaaccctaaa

SEQ ID NO: 119049 - DNA, 1955 bp, Cannabis sativa
ttcatattcaatgacttcgtagctgtctttattaatgacattgtgatttctttcggcttaaaggagtatatgagatgcatcttttgatggtgttgcaacgttcttggaagcataagttttatgcaaaatataagaaacacgagttttgctaatctcaaatgtatagtgatgttagaggttttccggagttaacaggatgtggtgggatagtagttgaaggatgtctatgtccttagtggaattaagtgaaaagaattgaaataaaagttacctattgcactaaggctaacgttgccagtccgtgaggagaagattatgaattattgcgacacctctaaataaggaatagattatgttttgatacaattcaagagggttattgcctgtgcacctggataactgaaggagtgtgaatagtggtgttctaatcatgatattaaattggcgcggttatttatgcactgagagtttggcgtcattacttatctgatgaaaagtgtgaagtttatacggatcacaagggcttcaaacatatcttcacttggaaggatttaagcaagaagctgcaataatggttagggttagttgaagatgataactgtaagattttctagcacccttggaaagtaaatgatagtggatgctttaggtcgaagagatttaaatataaccagaaagagatttcactaaagtttgctaggaaatataaacagagcacggattgagttcgtgacaggagaatttgttggcattacgtagtagtttgatttattggaaagaattaaaaattgtccagtatggtgactccaaattataggggtacaaagaaagatttggagcaggctcggtaaaggacttttgattttgtttgaaggaattttatgatacaaagacagggtaggtgtaccagtcattaaggttaacgaacagaaggttttaaacgggtttcatactactctatacattttatacacgggaacaactaagatatatcacgatgttaaaatcctttgctacttatgaagatatattgtgaaatatgaattagatgcccaacttgttagcaatcaagaaatggtagagctctatgaatttatttgggtaagtaggaacagtaagtttctatgattctatctgggtacgtagaacaaatgtacaaagtcagtacagttttctttgtttgagtgggatatgattaaaatggattcgtgtgctaagttatttgttgaggaaataggttaaccctgtgatgcttcaatggtaaatatctcagattgagatttaaagtttacatctaaattctgaggaagtctgtgacaagtatgtgtgatagattttgagaattcttgaattaaacaccatctgctgaatgagtcctcatataatgacggttattagagtactgttaatatggcactgatgcggtttaaagattcaagttcgtatgttgctttatttaatggatggaaaaaaaaaagctatactaaatgtagaggcattaaatttcaagtagggaattttattcttctttaggttgtcccaattaagggaaatgtaaagttgagaagaaagagaagttaagtctcaggttaatcggtccgtttgaatttctggaaaggataggttgggtagtttatcagctaaccgtactccctgttttatctaaaatttccaatatctacttcaatgtttccgaagtatgaggtagaagcaatttacatatggaattatgaaaatattgaagttcaatcagacttgtcatacaaggaacaatcggtatagatattctaaattgaaaaagagaaagtgttgcggaaccaagactatatcactagttataatgttgtgaaagaacaatattagtgaaaggcaatgtcggagctgaagtcgcaatggcaagagctatatcccgagttgtttgagtaaatttcggggacgaaatttctataaggagg

SEQ ID NO: 119050 - DNA, 987 bp, Cannabis sativa
agtgtgttatacaggtaaacatattgaggcgttgtgttagtaatgtgatggagtttgaacaaaatttaatttgggagaagaaaaaaatccctaatattgaccaagaaagaaaatccctaataataatataactaaagttgctattgttgctgcaaaaaaaagttacaaaaaaaagttgtcatccttgaatgaaattttttgttggtattattcttattttaacattttttgctggagaattttgataaatataagagcatcttcattgatctattgttaaaatatagctatatcctataaaatgtttgctgccttcaataatgtgtcaaaaattaatccaaatttatcacataacagtaaaatatccaaatttaaattacataatataaaatttacatcacaataaatacataatttttatatttatttgaatgtcattttaatattttattattaaatttaattaatgccttaaattataagcctcatccgaaataaatgaggatcaaatgttggtgtttctgcaaaatattcacgataaagtctttcattaccttcaactctatcacgttgaataacagtaggacctacagtagatccacgacgacagcgtgttggactctcatttgtcatttttcttcttcagtcattaccatggtctaggggtaagcaacggtcggtttggtcagttttttatacaaaaatatccaaaatttggttttcagttttcatggttataatccgaaaaccgaccaaccattatataaatgtaaaaaaccgaccgttttaatccacggtttggtcggttagctgagcttcattttttttaaaagaaaataagtctttaaattttctataattatttcaaaactaaaacaaatagagtaatgtatcaaatatcgtataatttaaaaataaaaacttagttaaataaataatataaaatatttttttttaaaatttgttcaaattatttgtgctactaat

SEQ ID NO: 119051 - DNA, 2219 bp, Cannabis sativa
ggatccaggcatacccgtgacctgctaaggttttgtgtaaaattaggccctatattggtataaatacatgaaatacatgaatcaaggcccactggcaagatcctgactcgtggggcgaaggtatccgtacgaatagggaccatgtagtctgagacaagtgttgcgcaggcatcgctccagaatgtggaggtgtaagatgggcgttgttggacaaaggggatgttttcccttcgatggtgcgcacactatcatgctctaacataggggatgagatatgacatagtaggaccaagcatcagagggtagccatgtcgccctacaaagagcttccggaggcgcctctcagaatatcgtctctggatgtattccaacattcatctggaggatttcatttccgaatgagtcttgtctttggagacgagccttctgggcttcagatgggctcaagcccatctttcgtatggattggccttccctcacgaatgggctttaatccaggacatttcaaatcaatcacacttttggaaatatcacgtgccaccctttcaaaatacaaaaaatactatgaaattgcgtaatactaataagacattatacatttaagcatataattaatttaattaacttatatatatatttaataatagtataattgcgtgttaaaaaattatatgaacatgtcatatgttcaaaattatattcaatataattaaatagtaattgagcaaatgtgaatttcctttttaatttgtattcatgaataaattaatattttataacaaaattattaattaaatactcacaatcataaaaatattacacatacacaagagttcataattcttttttcgtaaaagaaaaatggaaatattcattaaaacggtaaattagacaaaattcattacatgataatattgttggtatataacaataatagactaaccaagccatttacaatagtaagaaaagaaacccaccccaccggtatctccaacgaaagaatcactaagccaccaacgttgaagcttcatgtcaaaagagtgaaaaatactaaatttcaaacctattaatagctatcagccaaaagatttgccaaaaaatagtgggcaataacaaccatataaaggacgatcctaaaatatcaaaccacaaaacatgggaccaataggaatcacaaccatgtaaaggaaaatcttccaaatttgaatacgataataggtagccatggtgaacgctcgaaagctagccatctaatccatatagtttttcttttctcctttttgggctaattcttgaaggaagcgagtgaaaattcaattaattataaaaattaaaaattacggactctaatctttaacaaatttcactgcaattttactttctaaactgcattttcactttgtaaaacattaaattagtgtatataagttgttatttgtaaaaactaaacttgtaatatatattatactaggttgagcaaatacttcattttggactaatacaacaaaaatataggacggcacaaccacacatctacattcataacctatatatatgtacagaattgttttgcaaaaacctaggtagacttactctatgttgttattgtagatagtatatactagcacattggggggcagctccccaaaattaaaaacaacagttttggacctacggacccacttagcaatgacatctgcttggccattagaagacctagcaacaaacttaaagttacaagactcaaaggattggattgcaacccaccaagatatataccaaagacgatcatcagcaataccaaaaaaaaccaaagaggaagtgaagttattatcagagaatataagttgtagttcacaattaagtatataatttatataatcacaaccaggacatctcttaccatatcaaattattagtttattaattataagctttccactgctctcgatatcccaggaaaatactcaaattacaaccctttcataatatttttcaccatatccctttattgtgtgttttcttcccatgatcttattatttcagctccatactaacaaattaatgttcaaaacttctctctactataatatgcttttaatttgatcattgctattaggtacataatggtgtctaacaccttctatatagacgtgttgtcttgcgattagttagttatgatttataaaaactattatattaaactatataagacccaa

SEQ ID NO: 119052 - DNA, 1512 bp, Cannabis sativa
attttatttataaaactatatataaaatatattagattaataatttataaacattattaatataaaatattaataatatttatacataatttcacatttggttatggttttgtttcttaaaataaaataaacataaatgttttatttttaaacttatttatgaactttttataaataaattatattaattctattaagacattatcataataagcatagatgaataatatgattataaatattaataataatcaacctagtatatatattagatgctccttcggttccctggcttgagtaggatcactatagtgcgactttcaatctgagagtagaggataccccacttttgctacataatacattgcttgacaggaatgggacttgaaacctgaggaaattgcaatagttttggggacaattcacttgattaatagatttccttttgatgaagagaattaacttgtttggaaagattctctggaagattccttctcgataaagagagtgtatcatgctcttactagtacttggcgtatagggatcatgacaatgtatgggaagcccctcttcatgagcgcactagattcttcatttacaaacttggaagaaacatcttaccatttagtggccgcttttagcaaagatttggtaattgtgtcaattgttccatttgtaataatgatgatgatgattcttttttgcatattttctttggtttttcattggcaagattggtgtggtttgcaagtccttggggtattagaagtgataccatgtagtttgactcatctcttcttttgctttagtggctcctcaataagactaattttactatatatgctagttctctttgatccatatttgggttgttaggaacaaggcttagtaggaaggatttattgccactactttggacatccaaagaagaatcccagcttgtgttgttgactatttatcttggagggagaaggagctagtttctcatcctcgaccatctgattagttgtttgatatacccaacttgcctataggggaagtttaagggggttatggcagttggggctattgtttgtggtcattaagaaaatggtggtatcattttggaggttgtcacattgcagtagcatgtgcataacgccttgcaggcggaagctgtggctctaatactaaatgttggattcgtaaagaatttaatagagttgggcatgatattacgaattgggctaaccatttgtatccatcacaggcccattgttttaagtttctatataaagtttggtggttaatggttaccagaaaaaaattatgttatttacaaagaagaattactttacataatattttttaactttttttttttttttgttaaatttacggttaaaattgttctagtaattttgatgtgggttattatgtagattttagttgcaatttaagttactcatttagttgctgtgtgagttttaatgtgaatttttataaaaatataaaaaaaaaaattattttaaa

SEQ ID NO: 119053 - DNA, 724 bp, Cannabis sativa
ggtaacacacatcgtaagagaggtatagagtaacctttcatatacagttttcccacgacgatagtataacgaggtattgaacaaaagagtttacgtgcctcagttttttctatagcaagttccctattaagtagataattgactattggtgtcttccatgttggtgaggcgtccatcatctcaacttcttccttttcacatatacttgggtcgttcaaaactttaactggtaccagatttaacttatcaagtttattttgcgaggccaatttttccagtgcatcggcatttgagttatgttgtcttggaatttgttcaatcttaaaataatcaaacttctcgaagttctttcaaaccttctctaagtatttagccatttttaattctttcgccttgtattcacgtagaacttgattcacaattaattccgagccactatagcatataacattttgaacttttaatgcttcgactatccttaagccaggcaacaaagcttcatattccacttcgttgtttaaagtatcaaattggaatcttaatgcatagtggaatttgaagttatcacccgacatcattatcactcctgcccctgagccattcacattcgatgccccatccacatataatttccaagtttctatatcgtgcttgacgagtggatcttcttctgagattatcccttcaattaggaaattgggcaaagcttggcctttaactgaag

SEQ ID NO: 119054 - DNA, 1108 bp, Cannabis sativa
  modified_base (431)..(446): a, c, t, g, unknown or other
tttgattgtgaggtgggggaaagataaagatagttccaccatgctttgtcgggagaagccaagaaaaaattataactttgattgaataatatttcatcaccaaaacctttttcttgtatctacatttttgttttcatatatattaatttaaactaaacatctctttctcttatagtttaattgtagctatatatatagtgtaaataattagaatttttgagatagttaccaatgacacaattaacctaggatcacatatcaaactcttataactcacacttaattaatcttcaaaattattaatataatcgaaaaaataagaaaaaaatttgcactaagtgattttttttttcaccaaaataataacaaaaagaaaaaacatctctctcatctcatgcaacctttccatgcattattattattattattannnnnnnnnnnnnnnntattattattattattattactacgtggatccagcccagcatgatgatataacttttttttaacctttttctttaaggtactatttttcactttttaccttcgatcgtgtgagtctgagatctttatttctttttaacttttattattattattgtaataataatgtcctacataaaggtaatttcatatattataatattgaaaagttaattttgattgtttcccaataatagtcataaaataacacatatttataggtaatatatggatgaaaaataaaatgtttggaagattaaggatgaaatttttttggaatttaaagactgaaatgtggatagagttattcgaatattcaaagaatttgtgaaattggcccaaaaaaattaacttaaaagattcaaaatgattttttagcttttgtaaatttgtaaattttatatagagtacatatgaggtcttttaattgagaatgctctgtatttgtataaattggttttttagagtaacgaaaacactaactaattcatcaaaaaataaataaatacataaataaagagttaattgcagcataattctaaatgctttctgtaacgtccccgtttcaagcttctattgggtccttacacccacggaatatggctcttatacatgagtacgtcac

SEQ ID NO: 119055 - DNA, 963 bp, Cannabis sativa
  modified_base (57)..(72): a, c, t, g, unknown or other
  modified_base (921)..(934): a, c, t, g, unknown or other
aggtggtttagccgccaatatcacgtaagagaattataacattaggtatttttgccnnnnnnnnnnnnnnnnaggtatttaagtgtataaaatgtgaaacattaaatatttatgacgcaatttaaccgttttatttattataataactttatgtgagatgtatttttattttattgtattacgatcaatatttgtaaatttttatatatatgtgtggttatcacaaatttttacatatataaaaatattgtttaatttttatatcattcataaaaataattaaacaaaaatttcattcataattaataaattattttttttaatatataattttaaaaaattattaaaactactcatagcacggatttatttcctgacctatctacatatttatataaatgaaagtataaaataaattaagtgatattttatataatttttctttctaattttacttatttgtgaggctttttcattttataaaaaaaatttgatgtgttaaatatttaagaaatgattctatattgtttaggaaccattttgtaagtcctatatagtataaataagtctattaatcatcacttttgtttgtcacattttgtttgtatcgtatataatggctgaataaaatatttttattattcaatataatcttgcgtaattagttataacatattatttattgttttatcaaaattttaatattaaaaatatttattataaaataataacagtaaaaaaattactattcaccatatgattatttgacaccttaattaagtaaaaaaaaatctcacacataaaaataaaaattatatgtgagttcttaagatttgttttaagaatttttttaattaggcgtaatagggtttattaaaaattaataaacaacaatctatataggctaattagtaatttttnnnnnnnnnnnnnnacatgtactaaatcgtgccccttgaactt

SEQ ID NO: 119056 - DNA, 1340 bp, Cannabis sativa
gatgagtgttaatgtgattatgaggaaaacgattttaatttttacaagttagataatatatacagtatacactaattgaagactttaggacctttgtatacgtagctgtatctagacttattacagcatacaaactcctacaatgagttatgactaggacatcttttgatttcttatatggagtgacactggaggactacgtagtttagtcaatgataaagttgcattacaggatcaaactagaagaaaataatgattattattattattaagtctctaacaactggtcaatttcttctgaaataaaataaataaactactggtcaatgagggcaatattggaacatgatactatagtttctgtacttgagaaagttcacgagctggcttgtggtggcaacaaagatgattgcttcctaccattatgacatgacaattttccatttcattttctgcataaatcaacaaattaagaatggttattggttagttgtcttaatttaatgattcctatttaactctttgaatcaagttgttaattagttacaaatttctccctacgttacttaccaacccaatacatctagtcgaaatgtgattagttacaattttttttgtctttaaattttgttaattagatgattatttttgttggatagataaaattaagaaaaagtagaaaaatcattataaatttgaaaattttattttctatattactattttgagtaaatacaaaaattaaaaagacaaatttgcgcatccggggaatcgaaccccggtcagtaccgtgggagggtactatgataccactacaccagatgcgccttgctgttaaggtgattattttttaattacttaaccgtgctaagaaaatgtagttttcaaattatttcatttttttttggacgtggtgaataaatttacacataattaacaaagcaagaaatcacaatcggcagtgaaatttctttaaactacgatacctcattgtctaagcaaaggtagggacggatccactacactagtacttatgtgggggctatactaacaatatttaaaaatattgtcttttaaaaaagtttttttaaaattgataattatagatcaaaatagtagaaaaattcttacaaaattaaataaatattgtaagagtgattataatgtaagtaataagtatgaatatttttttaatgataaataagtctccacgaaaattttgaattcatcactaattaaaggatatattttaccaaagagtaatttgcggcataaatacctaagttttatgccgagtagcagataaatacctaagtcctatttttggcggtaaaaatacc

SEQ ID NO: 119057 - DNA, 2411 bp, Cannabis sativa
gcaataaccttgtctcggacaaaatggagatccacttcaatgtgttttgtacgagcatgaaagaccggatttgaggcaagagagccagcccccaaattatcacaccagagaatagggcagtgctgaaaagaaattccaacttctttgagcaaagattgaatccaaacaagttcggtggtggcaagagctaaagctcgatactcggattcagtgctacttcgagccacaacagtttgtttcttcgaacaccagctcaccaagttgccaccaaagtaaatgcaatatccagatgtagacttgcggtcatcgtagcaaccagcccaatcagcgtcagtaaatccttgaagatcaagtgttttggcaggggaaaaatggagtccttcatgaagtgtgctagagagatatctcaggattctcttgcaagcactctaatgatctgatgtgggcgcttgctgaaattgactcagtcgatttacagcaaacgcaatgtcgggcctagtcattgtgagatattgaagtgcacccaagacgcttctgtacatagttggatttttcataggagtaccagtatgttgagacagctttgtggtggagaacataggtgttggttgagacttagagtcattcatttgagtggaatttaacagatcctttgtatacttatgttgagttaagtatacgtggctgccatcacgaatgacctcaaaacctaggaaatagcttactggacctaggattttgagagcgaacttggattgaagtgtggagatgacatgttgaacctgattttgatcttggccagtgattaatatatcattcacatacactagtattaacagaagtttaccattagtgttgctgaaaaagagacttgagtcagctttgttgttggaaaatccccattgttgtaatgattgtttgagtttatcaaaccgcccttggagcctgctttagaccatagatagccttattaagtttgcatacatggttggaaaattggggatcaacaaaaccttgtggttgatacatgtagactgcctctttgagttctccatttaagaaggcattgttgatgttctctaaacaactcaactctatattcaatccttatagaggtgatcatatatacatctttatattaaaaattataagtttccaacctactttaataacaaatattgcataaattttcctcataagttatgcaagatgtcatgggccgattatttaaaagtttctgtctcatcttattgtaagagaagtttgacactcattggcatagttttaaaccaattaagcctcgcattttattcaatataagctatctaagaataaaaaatctaattatgttcctaagttacttaaataaacaatcaataatactcatatacactttgaaataaataagatgaagaattgtggaatacattcataatagacaatttactaataagaggatcagtgtctatatgaacatcattttaatataagctcagcaatgtgaaaactcttattgttcgtattgtttttaaaagttctaaaaaaatgaaaaaaaaaaaaagtacgataataaaatgacactctaactaaattttcttactaatttggcagtgggttgttagtgcgcgagactattaatgcgtgttaaaaacgtgtgtttgaattttcttttccacacagtaatctcttttggcctctttttaattctgttttttttttgtccttttttttcaaaaaaaaaaatatatttattctatataataaaatttttggtttatgaaaaattattgggtgatttttttttaaacttaaactattcaaaaataagttttttttttttgaaaaagaataaaaaaaataaaattttactatcgtaagctagtttcccaacaaatataaaactaattcccttaataaaactcactttaactctaaaaaaataaaatatatatatatatatatataaataaaaccttacgatcctaagctaattctcacaaaaatttagtcgagctataacctcatccagtgacggaccgagaatttttactatggggggcttatttatcataaaaaaaatatttatacctacattataatcactattactagatttatttaattttgtgggggcttttctactattttgatccataattatcaaaataaaaaaaattatatttaattttttaaaaggcaatatttttgttatagcccccacattattatgagtgggtccgtctctgacctcatcaccttaagtgacatatgctcatctcatcacctattattactctctctcacacactatatatatgtatgaataatgtatgtatgtatgtatatatatatatatatatgcttacactcatcagttatgaatttaagaaaattcaatcccatcatatata

SEQ ID NO: 119058 - DNA, 1266 bp, Cannabis sativa
taaaaatcctaattaacctttattattttgaaggaaaataggacataccttataagcctttatactatgtccattcaagttagcataggatggaacaaaattaagatttactttctagacgaaatttttaatcttaaggggaagaaaaaactttcaaagaaaattccaccactttgatggtccaaaagaagaagaatattgaccctaaccaaacctaaaaatcgagctctgataacaagtcttaacataaaactagccataaaaattatatcattttaaaattcaatatcatatgataactcaaaattatatattttcactaattttaataaataaatttgacaataaatttataaataaatgtttcattctttcatttaaattatttttaaatatataatatatttacaaaaataaaaattaaaaaggaaagataaaaaaataatccagtgtgtaaggattatttatcttacactgctggatgggataaataatctcatacatataagattagctgaattagttatacagtcattcatcatggtcaaatgctggattagtgacattgtctagtctcactattgttattcgatatcaatagtctccaatatcttttagaagtaccttataattgattagcgatattattctctaaaagttaatatattaaattttatgagattcgattcttaattacaccaataacaatataacatttataggagggtatcaagtaccagtaaaagtgatgtcttaatgtattttttaagctatttgtacactagtggacatgtgaaaaattccaaaaaaaaaaggggggggctatttcaaaaaaaaaaaaaagataaggagataattaagatagtgtgtggatgggaattttttgtttcttatagtgaggtaaggttttagttttgtcttttagggagtaaaaaaagaacgtttcttttttctttttttctttttttgggagaatcaaaagagatatgtttttgagaaaaatccagaactgatattttctttcttttttataataatcaattctaaaataaaatgtgaatttacttaattaacctcgaaaccatctatataagcaccaaaggttgggagaaacaaaataaaaaagttaaattgagaaagggaaattttatttacaccccaaaaattgataagtacacccccattttaataatttttattttatataaatttatatctttaattttactaagtatttttaacttttttctttcaatttatattctt

SEQ ID NO: 119059 - DNA, 1348 bp, Cannabis sativa
tttttttttttatatatcaattataaagttaatttgaaaaaaaaaacattaataattatactattattaatttatattcaggctggtggaagatcttgtttctacacacattgtcctggtttcgtaatcgttaatactgagataccattagaccaagtttacaaactactttcgaaacgtggtgaagcagtatatgttacacaattttttatttatcgagtaagttatataaatatatactaatacgatatatcaaataatctttaaaatttatttattagttcttactttaaaggttgaacttattactcttattttatgattttatctttctattaggacgcaataaatggaaattggtggcttgaatatggaaaagacgggactcaaattggtttctggcccggacgcatatttagtagtcttaacacagggagtaaccatgtggaatggggcggagaggcttacactccaccaggacaaaaacctactcgaatgggcaatggttttcgtccgaggggagattcaagaaaggacgcatttatggaccaaattacaatcattgacgaatctcataaacaagtcattgctgcaaatacccaaaaatttattgataatgtacatttatataatgttatggattggggacttaaaggcagttatggtcatgtcttctcttatggaggcccttttatatcatctttttaatttatatttttaatttctaataaataataataacaataataatgtattattttgtgttcatgtaatatataaaagacaatattaattttaataaagagttcaaaaatattgtacaattattattttttatagtgttatacataaaaaataattgttatgttggcaaatatttgcatagctaaccagttttgtacgaaagacataataataaacaaaataattgcaacattaatttattaacatgaagtaaataaaacaaaacgccttaaatctagtagttatatggcccccaacgtaggtatactaccaacgaactatttacggttaccctaatttgcacatgataaatctagggcattttacaaaaatactggatttagggtaatacttttcaattttactgccacacggcagaatttacatttatactgtcctcccccttttttttcttttatactatcaatactaaaacaaaagtatgaggcctccatctttcacaatcacagacataaccaccacaacaataccaggacaaccgaaaaataacccttaattccgacaagattgagcaaaagcagtaaaatcgacgtcaataaataatcatggcaaaacaacggtaaaacaacactaaaataatcaa

SEQ ID NO: 119060 - DNA, 1999 bp, Cannabis sativa
aaaccaccacctccgacgaaaatgcgaaacccatcagaccagacccatcacaaaattgcaaaagcccaccgaagacgatatcgtgaaacccaaccaaacgatcaccagacgaagaagatattgtgaaaccccaaatcgcgacaccccaaacaaaacccagatccgaaatcgtaaaaaaaggtatttgtttaaaaaaatttattattttaattggtttttaattgtttgtgcttcattgtaaagtaatttatttggtttatgttcaatttttatgatttcgtttgaatttcattgacgcccgtctgagttctggttttttatcaatttgcaacatatcgcgacattgttcatgatgctttgcgatatcgtcttaaaaatgttggggattttttaagggcgttgcttttctcgacatgtttgtgtttagcgatatattagcaatacattagcaatatgattagcgatatattacagtagtacctaggattttgtttcacgatgattagcgacatattgcaatatattttacgatgttcatttttctgatttttaacaaaatttttgacaattttgcagatggctcctgaacttaaacttccagtttcccagcatttcacaggacatcttacctatcggggtacagatagatttagatatatcaacgccaagtttactcagcttgatttggttgatacagttaaggctagccctttcggacgcttccgggaagctggagagttgactttctctggcactttggtccacagcctcctcttacggaaaatgaaagtagatacagaaaaggaagatgaggtttggtttcatgtagggagaaatgacatgagattcgaacagatagagtttggacttattaccggcttacctatgtgtagtgcccctataaaggaggaaatagaagccaagtccaacgaccatctagttcggatgtattttgaagggaagattctgttcagttggattcacttatgctccaacttgagaggtgcgaagtaaaagatgatgcctacaagcttggactgatcgctttcattgaaggtgtattagtatcaaaagagggcaatgtccaagtttggcttgacatgttaaagtttgttaacgatcttgaattcttcttcaagtatccatgggcgcaagcgtgcttttcgtaagttgatggagacattgcataaggatatgcaacattacaaggataatgttgacaagaagaaggggaagaagattgttgaggaggcaaagtacactattagtggctatgtacctatctttcagtactgggcatacgaagtgattgagaaagtgggcaagaagtatgctcactacaacgggaccaagttccctagaatggtaaattggaaaactctggagggccaacggaaacaagatgtcaaggcaaccgacatcgcactattgttcaacaatcgggtatgtttcttttatgttctgcaatattttttttgtaaaaaatgcttgtttaacagctgaatttgttattcgcgacttacttcacgacgtttatcaattttattcacgattaggagatttatattttttaaaaaagctttgtttattcacgacatatttcgcaaaaattggcgacattatgcaatattttatttagaaatcaactagccttttcgcgacttggtattgactatttgcgatatagtctaaaacattttgttccgactttttttcgctgtttttaattcttgtgtgtgtttttttttttattttgtagttggtggtaaagaagtgcttgtttccccggcctagtgaagaggaatatttcaagatcattgatgagggtaaagcccctctttattttgagatggacatcgaacaaacggtggagggtgatgctacacaggattctgtgtttgaaagtcaagtgaagaccattaacgaggtcgtgacaaaggcaaatttagttccaccaccaccagcacctgaagtgcacgagccatctacttcagccgct

SEQ ID NO: 119061 - DNA, 1381 bp, Cannabis sativa
tctcatccatgattcccaaatcaagaacaccagtagccccgactgaagcagcccacttcgcagagttgtgagccaaaaagttgcaattcctatcaattttcctgagcttggaatcgtccaatagcctgaccgtgctcttgaaccgatctgttactcccttgatgtcaataaactggttggtgttgcaagtgttagagcaatttgcaaccacaacttcgttatcacagaaaaaagcaactttcccccttgcaaactcagctgcattagccaaaatggtcgcttccgctaacagaggattcatagcagaaagcctctccgaataaatagtcacaactctgtcctgatcatctctaaatactgccgctccaaacgattggtttggctggattgacacatcagtacagcagttccaccatcctgcttcggaagtccgcgcaaaaccactcttctcacttttcggtttccatctggataggtgatcattgtaggaccgatgcactgagttgatgaactccgttatagggcgaagtctcgtgccatgagttacttcatttcgagcttcccagattactttgaaaatacagagagcccctgtcataaattcatcaaacgacaaatgccgtggtctatgatttttgtcatggaaccaagtcatccactctgtccaggagctacaagctaagtaatcagttctcattcccccacatacttccaaaccatattgcctttgcaaagtagcaatcccagaacaaatgtaatgttgattcctctccctcttcacatatgggacattccctagaataggggcatttttaaacctctataaagatatattttgttcaaaatattttaaatttgtgcaacgagaagaacggcgtgtgaaaggaagcatggggacgacgttgtgatattggggtagtctaactcgaatggaattgagagaagtggagctcaaagggtggtcgaagcttttggccatggtggctatagaggtttatgcggaaatggaagaaaacgaaggggagagaagaaaaagggtcggggctgaaaataaaaaaagaaaagagaaaaacttaaattttaaaataatttatttgttttcttaaaagaataattattttgaattaaaattatgacttggacaaatagtttgtcaacacggggcattttttttaaataaacacgcggatcatttaactagagactaacgaactaacaaaaataatcttgaaaactattaccgctaattttcgagattggaaattaatctgcatcaactttaagtttttgataatttttgtcacaatgatcccttttattattattattattattattattagaattttgtttcattttcctttctaaaaaaagttgaata

SEQ ID NO: 119062 - DNA, 1087 bp, Cannabis sativa
agtactcattttttctactttcaaatttttttaagaaaaaaacaagagaaaaagaaaccaaagcctgagatcatatatattcttcctcctcctcttttgatctcttcctctaaataaggcattccccaaccctaacactaaatgggtaatgaaagaaaagaaaaaacaaaaaaggaaggaaagtttacaaaaggaaaaagctttgaataatagaaagaaaaaattgaaccctaacagctaaaaggctatatatattcttttgcttttgacatatatatacatatttatatataaatgtatactcatctaaaacatgatgtttgccaaatatttagaaatcaatcaaagaaagaaatgatacaaataaacttcaaatatttggtttccattttggacttaaaacttcaaatatttggtttcttgggccacacggcaagcactcttgtaagttttgcttgttcttaccatacatatgaatataactacctcactcactttcagatatagcaattaatgtgttttaattttatatactcttgtaatgtgttcttgtttttctaaattatttatatatgcattaattaataataattattattatgaatatatatgaaggttttgaattcgtttgattctactttcctttttctcacaatgggaaaaaaaaaaagaggaatatggaataaattaatcttaaaaaaggaaataatatccttccaaataatttatcattaattaataacttaatttaatatggtagctaggtgtgatgatattcaaaacttaattattggataccaaaatgtgtttacacaaatgttgagacaaaaaaaagttcaattaagactatagcaatatcatttgcgtatgtaaccttatatatacactatcctcaaaaattaacatttagtgatggaagctaattttcgagcactctcaacaacttttttactctattttttaaaatattttaccaaaacttcaatttttctaatttacctcacatatttacattacaccatacttctttatatttttctctatatcatttaaatattatatcttcacatatattttattaataaaa

SEQ ID NO: 119063 - DNA, 1485 bp, Cannabis sativa
gctattcaggtctactttctattaatttactatttctttctcctctcttcttttataccttttaatcatcaacagtttttaaaatctaaactcaatgtgttagcatcattttatttggtgctttgaaatttgtttgctcatatgacaataagttgagttttatatttaatactgagttttatctctgggtgggtttctttttcattattttctatatttgttagtcagcttcattttttcttatcataatcatgtaattcaatttcaaggaatggtgcatttggtgaataatatttttgcatgttcatttacttaaattggaacaagaaaggacaatatgtgcttactttattattgtctatatatcgtcacaactcattgtaagttctcatttcatatttttccactggaatggaggtgtacaagataagtatatgctttgataaattacatattcacccgttgaatcttattatgctttgatcatctagttgatgaaataactttattttgtactgttgaagcatctattgatataatgtcaagtgctttacaatgcaattcctaccttatatttttcctattgtgtgttgaatgacagtggttgtgcaatgctgacaaatcctcacacaacccaaaactaagattagagtatgttagtctttgtctttgactcattctcatcctaaatgatattttgtaaattacttcactttttgtaatctttggctaaaattcttttttcagtgcattctttggatctctatacagatgttttgcaaggggagcaagagcagtctttcaagtgtatcctgaaagtacggaacagcgagtgttaatatatagttgtgcgattggtgctggattcgttggtagcttggttattgattttccccacaggtacacaagcttaaatatcataagaaaagttaatatgtaataacatagtatttgctctttgcttattttctgctaaatttgactgaaaattatttctgaaacagtgccaagaaaaggaaagaataccttgttctgacttgtagcacaccagttccaaagcgtaaaggcgacaatagtagtagagatgaagaagatcaaacggtaatcacttgctctgctctaggtgtctctatgcaagaacttcatgcaatctttgttctcgggatttaaggtcttctctttagatatgttagcatggaattgaatggagctgaattagtttttgttagaatttaaaaaacaattgataatgagaggagtaactcgtgaattttatatataatattttatttccatacattattaatgtgagactaattctaatagttttttaggtatgtgtttctaacacgaacaggccaagaaaaaaacaaagaattatggaaaaagggaagggcaaggaatggatactgaagaagaaggaacagatgagaagaagagggaatgttgtacctgctgacacaaaatacactgctaggaaaagaa

SEQ ID NO: 119064 - DNA, 922 bp, Cannabis sativa
tcgactggggtgcttcggaggtgagtgtgaactcgttggtggttcaactggaaagggctcggcttgattgggtgctggacgtgatgtcttcagttggtacagggatgggttcgacttggatgatggttaaactgagttgaacggttggagttcagtcgagtgggaaatggtgatacgtttgccggctggtcgattggacaatggtgatttctggtgggttggtgtcgacttggaggtggctcgggttgaatggatgaaatggttgggaggtttgagattagttcgaatggtgattcgggttgctatgagttcgggcgaagtcgactgcagacggcttggatgttgctggttcgtggctgggtcaagcttggtgcgaacggaggctatgggttcatgcaaaatcgaaggtggggttcgatttggtgtctacgggctcaggtgaatggcaaacgactgagaagagggaagtgaatgtgatgatgatgatgggtgcagtatagggttgaatgctaagtgggcgggtcaacattagctggggcccagttgaccaaaaaaatcaggcccaaactgattaaattagagtaaagtggggtctgtgtatctccaaaatcaattgggctcactcaattcaaaaattaagtacaaccccaaatgatttatctgaacaaaaaaaacatattccaatgattgcatcatgaagaccatttcaatcacatgtttttctttaacagacaactcactttattttttttttcaaaccccaattcatttgatcagcctagcacccaaaacaccacttgctaagcctttgctaaagcaactggctagcaatctgccaccccaaacttaatgcttttgcccaattcaaaatttcttcacttccacagcctttttcacttgattctctgcacaaagaaaagaa

SEQ ID NO: 119065 - DNA, 827 bp, Cannabis sativa
tgacttatttatttgatgacccaacacacattttatatatacaattgtgaccccaattattctaacacagattacttctctcattaaaaatcctaaatttgtggccaagcaccttaccatcacttcattctttccttcatttgaaaaataaagctaaatttgtggtcgagcatcttaccatcatagattttttaacacatttttttttgataatttttttagttatttatacaaaagcaaaaaacataataaacaaaataaaaaataaatgtagttagaaataaaaaaataatacccacattattatatgtaggttagtttagtgggaatttgaattttttatttttaaaagtactcggccaacccggttaacccaaacccacggacccgtgagcctaaaactcgcgaacacaaaccattttacgggtcgggtcgggaaaattttttttaacccagaacttgcgaacccgaaacctggtcgacttgcccgatattcagccctagccaaaacgtctcatacttgtattttttgatgctaaatgatgtgttgccatcacttaatcagattcaatgttctagtagaattgttcctcatttctcagaaatatcggtgttctgtgaaatcgggaagaatttaaggatatacggtagggaaaaaggctctagagagccccctttagagcaaaagagattcaagaagtggtcgaggtaaataactttatttttattttgggaaatttgcggcaaaagtccccaaaaaggtcacgttgatacagattagtcctcaagctccaaaaatagcggcaatagtcctcaagctccaagtt

SEQ ID NO: 119066 - DNA, 2267 bp, Cannabis sativa
taggcaagattgatgtcacgtggagtacagcctgtcaataagaggaccaagttatcatgcataatgtaccagttgacgaagagtctaaatactcaagcaggacaaagatacaactaaatggccaaccaggagggtctggccaaaccacccttggccgaccataagatggtaagggccggcgagcctctaacaaagggtaggctggccaacttcctttttggtagacacaattggtgtctctgcagctttcacgctggatagacaatggttcactatcagctacggattcactccaataacccacaaaagtaggggttcaacttcagatatttacctattctttaagaataattaatgggttattttttttttatatatttaatatgtaaaaaagtgtgacatctccttattctaaggaatattaagctactttgaacaagatctattgtaggctctcattaatataaagagcactaggctaaaccataaacctaagttctaatccctaagttttggagttctaactctcaaaaccctagctccctctcttctacacgccacctgcagtctattagagactaagtctttctcatctcacttacttgagatttgccttacatctcactattgtaattcataaaatgccactctaaaaatcaccaagcttgtgatttgagtggtattatctcttaaatctatacagctaaaatgggagtaggtcgttacccattaaccaaaggggccgaacctctataaaattattatgtctattttatttactcgctttaattgtttgcacgtagtgattttgattttaaataaggctccgctatcggctgactaaatttaaggtaaaaattttggtgctttcattaagatcatcatttatcaattcgataaatcaccatggctgtaacaaggagaactccagctacaacttttgcttcatcgggtcttcctcaagaccccatgactgctggtcctgatgttcgtattccaaccaccactagagtttccacaaacccaacggatgtagccaatcctacgagttgtgccaacttggcaggctcaacaaactcaaccaacacaactagtctggtcgacccaactaacatgggtgatcccaatgtaaagcctccactacccagggtagatccgccattggaacctcaaacagaaggtttggtcaatgtggagcagccctcacgcaccatgactaactctgttcctcgatattatgtaggggaaacagggccaggaattggcaaaataacaattggtgagcctcatgtggacttgggagaagactttgaattgactagacttggagaggctgtatgccaagtcagccaaactgaagagccaaacgatgttggtttcgatgtgttcgcccaatagaacgcgaattcctaatggatggatgaccaagagcccatcctctgagctcatcaggaagaactggattgccgtaatagggaagctagtaacctaataaggaagttcaatgagagaattgtcaggagaggataggatagagatcctctacaaggaaggcttatcgactgatcgggcaaggtctacaggcaaacaatctaaccaagttctttgggaacgaggacggacttccccatgcccaaagagacaagaatcctgctaaacagatcctgttgcgagattagtcagactctatggggggtcggtcaggtatctcttgctcattaacacccccactcggccaacctcaagccgacctacagagcaaaattcctctccaaaacatttcggagcaagtagttcttaggcttatctttaaccggctaggtctgggaatgggtggaagcacccaagataacattaactcaaggagtgagaattgaagtgattttgttccactattgaacaatcacttgagacagttgggtctaccaaacctaaacaattggtttgatcaaccctctaccaacacacaagtcgcaccggccaatcagaggcgaacaagcagccagacactgcccaacatagagttggttggccatgaataattacctggatagggctggcggaccatggccaattgcctgacccagggctggttttccaaagccagttacccagcctaaggctggccgaccatgggcataccctcacccagagggtgtccgactaggctcttgctaacctagggctgcagcccaaccaagaaggtccactcgaccaagccccaacagcatcagatccttctatgcaagcatagttggaccaaataa

SEQ ID NO: 119067 - DNA, 606 bp, Cannabis sativa
acaatttgtatttgttatgtgtgaaaattatgtaacataactaaacaattatatgtagaaatagtctttacaaagctagaggtgattggtttggcacatttcttagtgtttatcctaaacatgtgatcactataatattgagtacctcaaaatgaaaaataacaatacatatgtgcgagttagacacaaaatatatcatttactcaaaaaaaaaaagacacaaaatatatcaataatatttgcgcgttgttttgttgtttttataataagtaacaaacacagtgaagacaaaaggtaaggaagaatctttctaacagtagggaatattttatatattagtagtagatatctatattgtcacacatatcaccatgaatattaatttagtgtaagtaaggccacccatgacattaacagtcctaagccctagtactacttgtgccaacaactggtgacatatataccaccactagttgtagtaacaagttgtcacaagtggtagcattatttataacaatttggttgaatcgtgagaaagtttaaaatataattccatgcatgcgcacggtagatattacattaattaataattaattacaaattgta

SEQ ID NO: 119068 - DNA, 1670 bp, Cannabis sativa
taattatatataaaagtgtatgagaaaatgataataagtttttttgcacatattttgtaattaattaaaataatgtatacaaaattgtaaaatgccctaaaatataactagtattgtaataacacttttggactagattattattaaattttaatttgataaaaaattaaatttaaaatctattttgtactattttaaaaacataaaatataaattattatttaacaaaataaaaaatttatttaataatttttataaaatataaaatttaaaataatatttactctaaataacaatcacaatttaatgaaagcaaaatctttgagaacaacttacaatatttcataaatggagtactattcgagtcaagtggagaccacaaattttaaagtggggatgggtccactcgattactactattcttaactaacaacgaacacacacttgaaatgagaaaaaacaaatgcgtatctgtggctcttcagaccaaaaaatccacgtcagattcaaccttccgaaaataataatcataataattgagctaagaaaagctagagtcaccgagaccaagttccgaagttgctcacagcactctttgattaatctccaccgttaatttacctttaggtcctttgagacgcggttttgaccgaaatcgacctgcactttgaacgtatgattgaatctcagccgttgatttggcgctaatattgggagggcttacgaaaattataaaaaataagaaaaatctataggatagtggaagtgtttcgataaacccttatatttggcacttaaacagaaatttttaaccaagttcttcggtgattgtgtatattataattatttaagagtatttgtaaattttaaaaaaattttgaattatttataatgttaaaaataaaatttgtatattttttatatgcgcatgtaattttttcttatacataagtaattatttaaactttatttttgatattataaattatttaaatttttttttaaaatttataaataactacaatatacacgatcataaaaaaataaattaaactaaaaaaaaatgaatgtaaaaaaaatacaaaatctaacttttattacataatcttccaaatctatactacaccaaaagattatttaagtacacacatatttcttttctcataatcctgttattcaaattattttaaaccactagtaaattttaccatatatttataatagtgttaaataaatagtgtaatgctatattttgatacttttataaattttttttcttcaatgtgctaaacttatactaaatttagcacatacttaaattgtgttacactaaatttaacacaaagtatgacttaaaacacacaattaatgtatattttttatcgatattattaccatttaatactaataagttactttgatataattttttaattataatattactattatttttttaaaaattatatttaatttattaattatcatgttaatatcactaaattttacacattttttaatctatacactgaaattagtacaataaatatttaaaattttaaatattattttcctcattataaaccattataatttttcttaggacgcacacaattattatttattatttttaaaagggaaatttgattttttatgcttacatttagtta

SEQ ID NO: 119069 - DNA, 1060 bp, Cannabis sativa
  modified_base (1018)..(1026): a, c, t, g, unknown or other
aaaaaaataaaattattaaatcaaatgggaacacgtcaaccaccccttatgtatgtattgcacgtgggggctctcttagcttgacattccacaatgtttaattaagagttattgttgggaataagaaggagagtttagtttactcaaaattatgtaacaacaaaatttaaataacaattactaaatagaatcataaaatgcgatttgatttatttatttatttttagtagaactgagagttcataatacgatttgatttatttatttaaatttaaaatctcatttttaatgagtccaaaacatttcaattcatggtcggtgtacaagcttttaagcaactgtccaagccaaccaagcttcctacagattttataataaatattattaataatattaataactccaaatttttcctagaattgcttaaataaacaattttttttttttgtaactcttgaagtaaccaatttaagattcgatcttgaaagaaaatacatatatagatacaatgtatcaattagtgattaggttaaggccaagttttaattcaagccaactcaattgaccaagtgggacccaaaaatcaacttaggtaaattgttgggtcccaagtggtgttgagcttaatgatgatatttttgcaactttatattttgagaggtaggtatgtaaataataataataataataataataaaggctattttcttgtcaatgttcatggctgagcatcttatttatttttagtaggtatttttgtcttgctgagttaatttcaccacatttcaatcaaaaaaacaaaataaataagtaacatttttcaagacttttttttagagaatgaatcatttaataaatgaaaccttaggtattaagagggttataggattatatataaatttttgtttagaggcaacaatgtaatcctaagaacatcacattttttttaaaaaaaaaaatatgatctgctacaaaaaaagagcaatttgcggcgaaacccccttatgttttaattttnnnnnnnnnaacccccttatctttttttttggtggcaaaaccc

SEQ ID NO: 119070 - DNA, 2288 bp, Cannabis sativa
ttctttccctattttaggaataaaaattagtgcaagtaggcaactaggaacggtttctgtgaaagaaagactgaaagaatatgaatatttgcataatggggtaaatttcttggggtgtgtgtcattggagttattcttggagattgatgaaatctatgatgctatcattctatgtgctttcatattccttgatcttggttggtctttgggttttggaggttttcctcaattgtcttatagcattgtttaatgttgttacattcctttctgtgcaatctttttgttttatacattactagagtttggtgtctttcttgaatttggtttcatcaactactgctcaaaagaactgttgtcttatttatgttgtcagaaaaaactgttgttttactcaactgttggatgttatgttgtgttgtgttttattacagggattgctcgagaaagaagcaccatttctgaagatgttattagaggtgcctttaatgctactgaagaagggtttatctctgttgtgcggaggtcgttttctctaagaccaataattgcggcaatgggatcttgttgtctggttggaattatctggaatggtaaattgttgattgccaatgtaggcgactcgcgagctgtgcttggttctgtaggtgaatcgaataaagtagttgctgagcagttgactgtggatcataatgcaagcagtgaggatgttagaaatgaactccggtctttgcattctgatgatgccagcatagtggttaagagagagggagtttggcgaatcaaaggcattattcaggtttttccctttaactgttattgtcccatgcttattataagttgaactgattgaccttgacaatggctatgaatgtgtgttctgtgtacatggcagtggcacttaatccttgctttttttcactttgttatgccatcaggtatctagatccataggtgatgcatacttgaagaggagagagttttcactcaatattccgagatttcgacttactgaaccactccgccgtcctgtactaacagcagaaccatcattgtacactagagttctgcataacaatgacaagtttttgatcttcgcttccgatgggctttgggaacacttaagcaatcaagaagctgctgcaattgtgcataataaccctcgagcagtatgttcattatgtcttattaaaatgtgcatctttttctcattgtgtttcctgtttgatcatcaattgttttgaactctcattgtgtttccagggtatagcaaaacgactcctgaaagctgctttaatggaggcagctaggaaagtgaggattacatacgatgatgttaagcaatgtaaagcgggagagcggcggcaaattcatgatgacatatctgtggtggtgatgtttctggatcatgtgacggggcaaaatggttctgtacctgagttgtcattcaaaggctttaacaacaatattgtagcatcaaattttgatcttgaaggaatcacgtgatgacgaataatgggattgtagatttgaaggtcaagaagacccaggttttcagctggatttaatttttcatttttcacattttttgcaacataatattgttgtttctcccaacttggttaacattttcttttttgagattgaatattctaaaactgattccttttttttttttcccacaagttgtgagtccttttgagataatgtcacttagctaatctaggtggaattttgttgagtttacatgatgtatgtagtcttcttgtgtatacactcggaattacatttggttcttctaataaaactgctcttgttaaccctgctttactctccatttcttatataaatgtttgatcatttgttttattttatgtacttataatcattgctcacccgtaattcttcttaattaccactttttgtagggtaatatcattttggaccatgtgttttgtaaaagttattaattggactttctgttttgttaaatgacaaaatggattttatattttctaaaattgtacaaataagatactgaactgattctttgtccaaataaaataataataatctaatctaaaagtgttatgagaaaacttgttatattttatgtatctgttcatgttagaaattgtcttaaagttgattatattaaaaaagaaaattgttgaaaattattgcaaaatgcatggtctaaaataattactaatatagatgaaatcttcataccaaccactccttattcctttttttttttttttttttttcactataacaattattttatt

SEQ ID NO: 119071 - DNA, 1484 bp, Cannabis sativa
  modified_base (666)..(668): a, c, t, g, unknown or other
attggaccccaaaatcagactcgggacccaacccgaacctaggacccaaacctaggcctcagtcccgggcccgcactcgcacctagaaccggatctggccccaggctcgacctcagacccaaaccccagactcaaaccccgaacccgaacccaacctggtcccgacctcgatctcgacctcggacttggcctcgaacctggacccagaattgacttaaataaaattaacaaataaaaataaaaatgaagtttacagaaaatatttttgtttttttatttttgaaattgaaaaataaaaacggttataggacacatttttgtttttcaaaaataaaaattttacttttaattatttttgtaattaaaaaatttaaaaataaaaatattaccaattattttaaaacacgttttgtttctcttttatgtttttaatttggtcgacctctacatttatttaaaataaatcaaattacataaccaaattaaagaacaaaataacataaaatcttttatctctaacaccatctccaatatcaatattatatttgaaaacacacactaacattataattaggctaattggatttttaccccttaaattttaatatgtattaaattatgcttcttgaacttttctcgcagttaaaaattccccctaaactattnnnattgttgaatttaaggactttgtccaattttattcaattttactacttcagtgattgtttatgtactaaatcatgccccttgaattttgatatgtactaaatcacgtcccttaaactttcatctatgttaaactttttttactaaaattggacaaaagttcttaaattcaacgatctcaatagttcaagggagatttttaacgaccttaaaagtttaggagacatgatttggtacatgtcaaaattcgggggacaaaaatcctaattaaccttataattattattcaactctgatacaatactaaaaattaacaaaaaaaaaaaaacacatattctttattattattattattattattattattttccaaataaaatagaatatattttaagtatattatatagcacaaataagatatattaatataaaaataatcatgggtagtgtactcagcatatatatagtggtatttcgttgtagtaccaaaaatagttgctccaaaatgtgtcaaactttggagaataaaatcaatatttttaagtaattttgtggccaccttaagctaaagctagtatctctattataatatgttgtattggatatttttttttattaaatgttgtattccatttgagaattactattagaaggtcggactaatagtaggttgtataagaggtactaaataagaaaaatattatgtttggttaaaattttgtattaaattaattattaagtaccagaaattttaatataatacaaaaattgtattataaaattatttgtattaacttgtattgtaatatttatataca

SEQ ID NO: 119072 - DNA, 2088 bp, Cannabis sativa
tacatgaccatgagaaaaaatttcactaaaaaattatttcgggtgctaaaacaaacaagtatacatcaatgtatccattttaaggggatgcattgtagaattttttcaaaaaactataatttataatttattaattttagtcggtatgtaatattgcgattcttctccatgttccaccattacatcaatactcctattctatcaattcaggtgagaagaatttactttgttattgagtttgaatggtttatgcaagagatgagaacgatcaattcaaattgaagccacccaaataaaatcaattacgagctttccttgcaagaacgatttaggttttttgtcgctatttcccaattgagatttctctggcctagacttttcttctccaataatattgcgattttccaaacaataacatatgcgtaatgcgactgagtgaaagagcatccctaaaattgagcttccctcatgattagaagttgtgttgttaccagcaattccacaaaatcaagaagccaatcgcaaaaagttctaatcgctaagcattaaatctaacaggttctttttttttttcttcaaaaaataataataaatggaatgtgggttttcgcttattagtccttacttaaaatagtttatctttaatatctaatttcgtaatcttttccccgttttaattgcagggtgaaatatttattacttcttcatttgcacgcgtagtgttcttgaaagtcagtaaattcccccaagatgagaaggtttggaacttaatttacctcataaaagcatggaatattagcaatgaggtatgaacttaattgtaataatatattttgtaggtatgttataggcagagaattgatattagaagagttgcaggtagttagaattaattgaaacaatatattttgtaggtatatttctaccataattatctttaattttttatgaagaaagaaaatttctattaatcgaactgagccaattacatccacaagaggattcctcatcaaaagagaaacttacaagtcaattttattcatgctagacaacttcctttcttctacaagattaagtttatttttgaagctctctttaaatgtactatctatacaactatgattcatacacattttcttatttatacacaaattttaatttagataaatgccataaattacacctcctaacatatttttatgaacataatataatttttatgacacattctaatatatattttttaaaaaaattatatgtgttttatttaaacatattttttttttcataataaaaataataaaataacaaagcccattaacttaaagcccaacaaaaataactctattcatgtatacatacacaccacatatatttctttccttttttttaataattttttttataaagtagatgctttttttaaaccaataaacaaaacatcacatgtgtacgcacacactaccataccatgtaatttctatttgaatttaatgtgattggccaaaaaaaaactaccccatgacaatagtaggagactccattattatcctatgggtgaggagacttttagagcctttgatcatacatctaatggctagaaaaagcttgggtgcacaataatactatggatcttattgtatcaaattattttctaaatttaattttattatttctataattaaaaaatatgcatgtttatttattttattttttacaaaaaagtatatttacttgcacatactaacacattctaataaatataatatatttttatgacacattctactttgttttttattatttttaaaattatatgtgtttttcctttaagcatatttttttcaataacaaagccgattaacttaaacccgaaaaaaaaaataagtccattaatgtatgcatacacacgacatatataaagtagccctcttttctatttatttttaacaatttttttacaaagcaactctttttctttaaccaaaaaaaaaaaaaaaaatcacaagtgtacgtacacactatcataccatgtaattacctctatttgactttatttttataggctaaaaaaactacacccattat

SEQ ID NO: 119073 - DNA, 1174 bp, Cannabis sativa
agtgatattaaattaaattagccgtttcttataataattattaaattaaaatgtgaacaatatataatatttaattagactaataatattataacacttcataataacacaaacattacttttggtatttattttaatgataatatgagtattttaaagtgttcaaatagtgatctagtgttatattttaacaattttaagaaaattatttttccaatagtatattaaatttagcacaaaatataatattgtgttatatttagcacacaataaaaataatttttttaattataatgttatcagtaatctttaatatatattttataataagaatattaccattaaggtctttatggaggcgattttttcataataaccgaccgattccgtagggtctttactacagcgtcggttgtttttaacccctgtagcgttacttggaacagcgtcgatagtgaatttcgtcaaaatcgacgctgaaatgtcttaaaaaccgcttctaaagtctaattttatagtagtgatgaaatgttatcgtatctcagagcacaatgaattgataaaatgcattattagtgtctagtatcttcctcggtatcataccgttattggtctaattatatatcggatcctatttaactttaaaaaataacttttaggaacttttttttaccaaatttagctcaatatttacatgttatattagagatatggtctaataaagcatgctaattgagttgtaaatggaattaatcaaattaatttagccccacaaagcacaagtaggtgcatgcataaaaagaaaaataaaatttaagaaaaaaaaaaggacaacagtgtaggaaattggtgtgattgggtattttagtagccagtggttcacttctaagtccttcccctatctttagttgaccttaaatataaattataaaaatcaatctcaaatcaaaagtgattaaaatccaaataattgtagagagagagagagaaacattccataggaaaaagtaagataagaaagaggagcaggttgattgatgaggtggtcctctcatttagatattgttttttattttttattaatggttttcttctatttattctaaatgggaaatttgattttctatacttagaaaatcaaaatttttttttccctaaaccaaaaatttaaaac

SEQ ID NO: 119074 - DNA, 929 bp, Cannabis sativa
  modified_base (871)..(883): a, c, t, g, unknown or other
agggcataaaacccaacagcagtctcaatggtagctgctaaacaaccaggggacttgaaggaaattgcagagagcagcaacaacacgtttcatttgctgcaacaaaccgagagcatggtagaacatcaggtatctactgaacacaatgtgattatttttcctgatggagttaatggataacaataatatagggtgttggaatgtgagggggttgaataaaatggagaagcagaatactgtctttgatttgtgttgcatgaataagtaaggagtttgtggtttgttggagactaagctcaagaataataaagttagtgagatgatggctagaaagttcactaactgggattactatactagcacgactgttgaaagtagaatcttggtgatttggaggagaaactttactcgagttattgttgttagagaagacccgcagtttattcattgttatgtgaagatgggaggctattctgaagcaatgaacattacttttgtttatggctttaatacaagagagaatagaaaaggtctttgggaaggaataatcaatcttaaggtcacttttatgccttggttaattacaggggactttcattctttgtttgaattggaggataggaagggaggcaaggaagtcactttgaacgatctacaagactccattgagtggctggctcaaagtcatatggacagactccttaagacaggttcgggttatacttggactaataatcaagatggggacaaaaggatctattctaaaattgatcatacctttgtgaatgaggagtggacagacaactttcctaagacaaaagctcactatagctgggagactacctctgtgctgggttttatgccctaaatnnnnnnnnnnnnnatataatcagatttacttattaagatagatcagaaataacatttaa

SEQ ID NO: 119075 - DNA, 960 bp, Cannabis sativa
taacattaaatcaagaaagtggcatacccagcagctctgacccatccagggtgctcaggtgtccctaatgcttgagtcaatatgtcatttcgaccactagccaaaacttcacccgagtttactctttcctcgagttcaacctatgcattatgattgctaatagttaatactttataataacaagtcatatattcatgttattgaattgtgttagatatcacttactattcttgcggcaatctcctatccaagtctgtaactaggacattattcttcttgcgggattttaaccaaacatgatggtgggttggatcttgaattttaatttcttttttctgcaacaaacatgtaattaataagggaatatcttgaagaaaacacatagtgtatgtcatatagctcctcttcattttaagattctacttaaaataaagtcttcaaacaacaaaacattacaagactatatcatattatgtgccatagtgtgttttcaaacaacaaaacattagaagattgtatcatatttaatgaatatatatataacaaccaatcaatactagctagcaaatgaaatattatctagcacttgggcatggtgtggagcagtaacatttcagattagtgacttgtttttaaatgtcatatcttgttgataagctgtatttatacttgtgtactttatattcaaatctctcaataataattaattaaagtcacttgtgatattttattagttcgatcaagagaagagaaatatggtagggggtttatcttgaaacttattgtttagttgctttacaagaaattaacagttcaattcaagttttagctattgattgtgaagttcagttaggaaaatggtgcagcgtattagaatatctaaaaatatgtaattcattaccacatcctctcggagagtcaccatgcctctaccaactgagtggtgccttgatgtattct

SEQ ID NO: 119076 - DNA, 1247 bp, Cannabis sativa
  modified_base (921)..(929): a, c, t, g, unknown or other
ccaaaaagtgaaatttccctttactaaattagagaattaattaacggatataaaaatagaataaaatatgtataattagtacaagtaataaacaaatgtatagttaggtaccttgcattattatttgaaaataacaacatgtatatataattcacatacaacgttgtgttatcatccatgtttttcttctttttgtatatatcttaatcttatttataataaataatcaaccaaactcaataaataattctcaatacagtttctttcggagaagtatagtatccaactcaattaaagcattattaacctaacatgatttagagtatattaaataataaatactctaaaatatagttttatattctggttggttattttaggaagactacaaatgagggaaagactggccaagctcaatatatgccaagattctgtgtgtaatttgtgaatatgatgaggaaactgttgaatatctatttttttttaattgttaattaatatagtttcaggtgttttttggagcttaaaaatttgttgcaatggcatacaaagctcactgtagtatctcgaccgataaggtggacaaatcaagcaaagttaagcagattttcaaaagcaaattctcctaactgctatggtatacagattgtggcaaaatagaaatgacagtatgtggaatgggaaaagtctaatagtaaagactcttgtacaaagaattaaagaggattgtaaaaactagagcaagaatatatttgcctgaaaagatatctaaaatagataatgaatagtttgattcattgtaaatagaagagtatacttgttatgtcttaaatgtgttggataggttgtaaaagttgtgtttgatatataaatttttttggttcattaaaaaaaaaccaataaataataataataataatnnnnnnnnnaataataataataataaggtttatttgtaccacaagtcgaattatataggttttcgcaagttgtatcattatactttattttatgaaatattatgtttaaattataatttaactaaatagaaagaatgaccaataatttttaaaatactgtaccaaattaattttatatttactctgttacataaccacacaaaacacgactacgtttactagtttataatagatcaaccaaacccaataataataataataataataataataataataatatgtaacgccccgatattttgccttattttacaaaaatactatttt

SEQ ID NO: 119077 - DNA, 1616 bp, Cannabis sativa
  modified_base (574)..(587): a, c, t, g, unknown or other
  modified_base (1003)..(1007): a, c, t, g, unknown or other
aaaataatttccaacaaaaatttggtatttaaataattagatttgataagtggtaaaaataaataaaaaaggcaatttgttttacttaagcttaattggaacaaaatatggcaaaagtgtattcagcgagaaaattacattgtatacttactttattttatttgtttttatttttatttttattttcatattttttaatatatacccacttttatagataatgttcttattatatcccttaaattgatgtaaattatgtgctagacttaaatagagggtaaaagtatattaaacaactcacttacaaaagtaggtactttttaatagaatatataatatgagggtagtatttttttttttattaatgaatataaaataaaatgtattcttcaacttatcccgtatttggccatgatagtatttttgagcccattgtctttattttagcccatctcatctcatctaaccctattgtaaggttatataaagaaagagatgagagctttatcagataacttaattataagtgattttaacttaaacctgacaaaagaaagctctctctctctctctnnnnnnnnnnnnnnctctctctctctctctcttaaatagcctagtctaagagtgttcattggaccacatctaatatttttaggtttatctagattggatccaattatatattggatgttagattttcgatccgatccaattaatttcagtcatccaatcgatcaaacatccattagatgttggattagatcggttctatccgttagatgtatttcatatatatttattggtttaatttgagtttattcaatattttagacctagtattttttggatcgaatcagattcatctaatattttaagtccaatatgtattggattggattggatccacttatccaagataaaaaaagtaaaaatttaatgttaatttttatatatacatatatattttatgtataacaatataaaatctaattactcatttaannnnnatgaaaatactaattagttcgattcgatattggatgtattagatttttggacaccccatctaacatctgatctgatccaattggatattcaaaaattacatccaatccgatccgatcacaattggatatccaatatatagcggtcggttgtaattggatcagttggttgtcattggattggatcgatttatgcacacttctagcctagtttatttctcttctcattttcgtgtttcatatagtgagttgagtaccagcccacactatttaaggtggtatcctaatctttgtggaagatcgtgaatatttgttgcttatcggcttaaggaagcaatctaggttcatcacttggcaataccttgctataaaaaggaaatcgagagttaaaataattgaacagaaggagttattaattttcgctgcaatcaatgtaagattcttaaactttgttatttgatcgttttgttaatttaatattttaatgtattagattattatgtgataatcaatcatacattcaactattattttcaaatggaaaacttacaaaaatactagaatttggattaacttttacaaaaatactgtcacacggaaatcttttcaaaa

SEQ ID NO: 119078 - DNA, 1261 bp, Cannabis sativa
atcttttaaaaaaagtaaaaaatatctaacataaaattagtatacgtgtctcacacgtaactttttactagtatatatatataatagtgtacaacgtagttttttaaattatcttgtaaagttttgagaaatttgaaatattttaaaatagaaaaagtacaattctattcttttacacataaaattaaagagatatgtgtgcaactgactatttgaatcttattttcaacgcattaaatttatttgaattttttaaaaatttatatgatattttaaataactatgttatacattgtgttgatggtaagaactcgtcgacaaaattgtggccgacaaataaacttagaaattaaggttagagtgatataatagaaacttaagaaagatgataaagtgctactgttgtattgatttttgaatataaattacaaataatgattttccaaccccttttctcatggaggaggactctatttatagtggcattattggccttagtatacatgtggtcccaaaagcgtaaaacacaccctaacttgtacccaaggaatcagcattgtaggtgggtaatggaggtagtggtggtcgggtgttagattgtattgacacctacaaatttggtctccactactctttgtatgtccaatgcttgcctaggtcttgcagtggcgtggaggatcttttggctggttccccacatgtatgtggtacaagacatcgtttgtcttgtatcttcatgccttgcatcctaaagtttatgttgagattttatgctctaaataaaacccatctcaatatagtcttattaattaatgaataaaagaatatgaaattattttatgttacttggttcacatgatactttcatgattataattttaatatataaattctattgaatcttgaatttatggacaatcatgattatagttttatctacacagtgaaaaataatcatgatcattgttatcctaaattttgtccacttggcgtggcatgtccacgtaagccaaagatagaatacatgtggagtgcaaccccgtcaatagcaaaacagagcctccatgtaagatattgcaaaaccatcatgcagcgaccaaagggagtgaagcgagcccacaaggagctgtaccaacaaccttggtcgaccaagaggatcatagttcaatgcatattgttgtttcacgatctagtctctgtgtcgtcatagatagatgaggtatgcactcacctaaaggtgaaagacctagaatctgtacag

SEQ ID NO: 119079 - DNA, 2623 bp, Cannabis sativa
  modified_base (37)..(69): a, c, t, g, unknown or other
  modified_base (2337)..(2339): a, c, t, g, unknown or other
caacattaaatgttttttctgatctatattaataagnnnnnnnnnnnnnnnnnnnnnnnnnnnnnnnnngggcataaaacccaacaggagattattcgaaaatccaaattcacttctaggacgtcttttgaagcatagatactactcaaggaattccttccttgaagcccaccttggccactctccttcattgacatggcaagagattcattggggaagagaacttctcatcaaagggttgagatttaaaattgataatggttttcagattcaaagtggtcatgatccttggattcctgggaatgatgaattccgacctattagttactctgggccaccttctctgccggtttcaacttttattcttgacactatggaatggaatttacctctccttcaagattatttttctcaaattgacattgatcgcattgtcaccattcctttgagtttttatcaatcacaagataggatgatttggcattacaacacaactggagagtatattgtaaagtctggcttccaccttacaaattcaatctctgagaaaaaccaagaatcatcatctgatgacttcaagatctagtggaaatttttctgggctttacaattaccaccaaaagtaaaaatctttgcttggaaagtgattcaacatgctctgcccgtggcatcagccttgcacaaaagaaaaattattgatttagcgtcatgttcgaggtgtaatagtgcttgggaatcgatagggcatgcgttgttctcttgtacttttgccaaatcggtatggaaaaagactcgctttacaattgactatcaacacgctcatggtatgtttaatggggattatatcatacacttggcaaacacaatgaaaaaaactgaagttgaacttttgatatgtgtgttatggtgtatatggaatgatagaaataaggtcctacatggtggttccaaaagagacccttcttctctggttgcttatgcagtaaaatacttggataattaccgctctgctaaggctcccagctgtaagactcaggatttacataccaatacatcaggaactgttgtgcgtaactcttcacaccaggatggtccttcgcttcagcaaaatacacactagcaacaacaagttcttggcaccctccctgctggtgtaatatgtgaaaaccaaccaaatgtttcatggtaggatgcacatcagtaacatcgtcctttctctggaagcaattggaaaccaacaactgaaatgtcatggatgccacctgcaggtaattttcttaagatgaatgttgatgctgcagcaaattttaacgacaagaaattcagaattggtgcagttgttcgtaacaacaagggagaagttattgctgtgttttctaagccttctcaaggttgcttccgaagtgatgaaatggaagcaaaagcgctcttccacagtcttatttgggctactcagcatcaattgccaatagcgcttatggaaacagatgcccaaagagtctccactgctttaaattcttttcatagacttatcttatttttctgatctcattgatgatgttcgctgtcaggggcggagccaaaacgaaacacttaggggggccaattatttaaaatttatattttgaagaaaatatttttatagaattgcacatcacaaaaattattaataaggacatgtttagatataattgtataattattatgatattaatttcataattaaacggtctaataattatattatatttaaaaataaatgatatatttatatgtaaaaatataattacatatcaattttaatctctcaaaaaaaaagtatttaacacaaaaaatttttagtaattataataaattttataaatatttttcaatatattgtacattagtaattaattagtcaaaacccttttttcttccaaaaatattcatgcaaagtgttagaggtatattatattttattttctttttctagataaaaagattttgtgttttttgtgaggagagatcaaaaagatcattttgtgtaaccataatagagattgcaaataataatttccataaatgaaaaaaaattctattggataaggaatacaaaagtactacatgtaattttagtgacctgttttctatttactaaattacaattttcaattgtatatctccaaaaaaaaatcacaataagagtatctttaaagtttttttaataaattaataatatcatcaagatacataaatatctgttggaaattgaggggggccatggtcaccccaacccaaagagtacccccgcctctgttcgctgtcttttatcctcttttcctggagttactgttnnncatgctcgtaggcaagctaatcaagctgcccatggcttggctaagtacgctctagagttggatgaagatgtatcttggataagagaaataccttatcctattttctctgttattgtaaatgaaccttaatttataataatatgaaaaatttctcaaaaaaaaaaaagaaaaaaaaaaaacttcctctggttgaaaatttaagatatgcgaaggactcactcgagaatcagagcatgcaaacaccaaatactgttcatgtaatcaattcagattaagtaaatata

SEQ ID NO: 119080 - DNA, 1728 bp, Cannabis sativa
ggaagggttaatagcaagatattgatggacttcttctgtaaataaataaaaagtttatcggttggcttggtatacaatgtgttttccaaagcaagagggtggcttaggtttttgtttatttgtttttcacaatcaagccatgttagtagcacaagcttggaggattcttacttgtctaaatactttactaactcgaatttataaagctaaatattatcaccatactacctttttggaagctttaggtttgtgtttttaatctatatgcatttttagtatgaactaaatctgtgacgaatttatctactcatattgtcctattttgaataggattatagttcatttttgaacaactaaattaggattcttactatctaatttttctgtttctttcttccaattttatgtttaattgtttaaccaagtggttaactaactctattatccttggttaattttgttattattgttaagttttactcggttctctactgctactttatttgagctatagtaacattggatttccttgcagttgggaaatcccctagctatattcggcgtagtattatctaagggcgctctctccttaaaaaaaggcatctgaaaaagattaggaactagagattctattttggtatttaaagatccttagttgcttcgctcgtattcttttttaccttcatccgttagtactacacatcctattttactggtgaaagattaaatagatgattcaaggagttgttggaatttacctattctccaatagttgtttaacattgtatatcagcaatgtactagttctataccccttagtaagtttccaaaagctgattcttggctttggtattttatgttggatggtgcttattctgttaactgtggttatattgtggcctctacttttgatttgtctaaactgtctccttttaaggatgtgttttcagtttggtggaagaggttttggaggatgcatttacctaagaaaattttaaactttatctagtgagctttctatgagatacttcctactaatgttgggttgcagaaaaaaaaatattattactcattccaactgcccggtatgtggttacaattctgataccaatagccattgctttttttttttttttgtcatagttttaagaatgtgtggaaattattaaattttaatgtcttaaaaatatctttgtagaagttcttttcaactaataatcattaaagcattagaagttttatcgcaatcagactttgaattattccttgtgggatcttggtatatttgaggagacgggaaccaagtaattcatggccattaatttagttctccttaaattatagtttcacgtattcaagtcctctttgatgaattcagcaatatccagcaaattgctagtttaaaagagaaatatttgtgcatcaacgtctaaatggatcactccaccacttggtacatttaaattaaatgtagatacatcattaaatgataaaagtgctacaattagaattggagcaatcatttggaattcacaagaattagcaatagatgtatctcgaaatctttatttagggatggtatccttaattaagttttactgatttaggcaaggctttttatgatatctttttatgtttccaattaataatatgaggttagttttagatttttgtgtggttataatttatttatctttatgtaacgccctaactaccttaggcgtatta

SEQ ID NO: 119081 - DNA, 2361 bp, Cannabis sativa
aatattttttttcaaaaaaaatatgatatggtaggaaaaaaaatatattttctatttattttaattttctcatataattatttatgtggtccaataaaattgtgtccatttaaataatccaacataatagttaacagctaaatttagataaaaaattataaattactaacagtatcgtaattttgggagttttgccgtgaaaatttaggttttaagggttaattacaagcaaagtgaaattattaggattttaccgcaattaactctttttttaaaaaaaaaaaatagtatataggcctttttgtaaaagaattttctcggcttaggtggttctgtgtgggctcctacaacctcattcttgagttgactgtgattcgtacaatacaattaaatgatatatttctatatatataattaaattatatttttgcaccctatatatattctactatattttttataatgcaatataactagatgaaatgaattaatgtggtaaatattagtgttaaattgtaatatataatggggatgttacgaaaccattgatttttttttatgaatcagtagtattttcattacaccaataaactaatttacaacctaagagcatcccaaacaagggacctcaaatattcgtatgtaatacacaatttgagtataactctacaaacttacaaggatctaaaccattccaaatcttgttgcccaactttcttaggcaaaatacaacatattctttgtttaccatttctttaactgtacatacaactctatctacattacctacttttgagttccatatttgatcattcctagtcttccaaacatggtagactaagcttgacaatgcagccgagagcacttgcttgctgaatttgttgctttcgcttctttcaatccatcagttgagtcttgtgatatccaaagtggatgcattccaccctaaccaatctttaattctttgaagaccctgccttgaaaacgagcaagaaaaagaagagatgctcacaagtttcagcttgcgtgttgcaaagcacaccattggttcatcaataattctgaacctgtgaaatctctcttttgtcctcaatcttccttgaattgcaatccacatgaggaaactggtttcaagagtgtttaacctcccccaaactttcttactccaatgcacactatgttggggaggagcaagtaatttgtacccgagggagatatagtacttggattgggaaactgttgtacatctaccaaatctttaacttggttcctggcctccactaccttgttcaagtaccaactcccttgtgagggggcctcgtagccccaccaatcttcatcccatatgtatacactatggacccatttaattcatatattgtcttctttattagcaattgcccgaacatacttgaacattgctgctctattccattcagctaccctcttgaatctaatgccatcctctgattttgcttgacaaacagattcccaggcaattagaccagaaccattcaaagtattctgtcccttccacaaaaaggctctgcaaatagcttcactctcattaactaccttcttgggtaaaatcattatttggctccaatattactgaagagtcatcaacaccgaattcagaaggactgtcctacctgcaaaagaaaggctccaagccttgattcgggaagtcatcttctcagcaagcaatttgcaatcatgccctgagattcttttagcacaaatcggcgcacccaagtatttgaaaggaacattcttcctactaaacccacacatatccagtattctttgaatttctccatttttcataccactaaaatacatagcagattttgtaggattagggtgcaaacctaaagtgcaagagaataacttcaaaccttgtaacatgagatagacatattgattttttttgtaatttttagatttttactattttttcttttttttttcttttttactgtaccatgttttttaaaaaactgtgttacagttttaaaattacaaatatactgtgtttcagtaatataaaaaaaataactaaaaacaactaaaaggtagctctagaaaaacttaacaaacaacataaataactataaataacataaacataactactaagcaacaagaaaaataataaaacaataatctaattgcaatatgcaacataatattaataactcctcaatatgttttcgtattacgatttttttacttagttttgacagctttatttatcttttaatattactacattatttttttcattgaatttgtcataaattttttgtaactaaatgtgacttttagttacaataaaatgttagttgtgactaaaacata

SEQ ID NO: 119082 - DNA, 857 bp, Cannabis sativa
gtgtgtgtgtgtgtgtgtgtgaagcctcaccatccccatgactagccattatgacccatttttgctcgccccgtcaaaggcatgaatctctctcctgtatcaccatcaaagcaagtttcaaggtcatgccccctctacttctccctctctctaaactcacggcggccgctagacgaagtgagcccactcgttagaccaaggaaagccacgaccggtaagcctctgatctatttctctctctatcgtgcgcacatctctcactctcaatcggtctcacttttttttttttcaggtttttgtcgtcagctctgatggtggtagggtggttttcaagatttgttttggatcgaggaaagccacgaccggtaggatagagccacagctgaggaaagacacggtctcaaatctgtagtttatttatttatttattttgcttttgtgctggtgcataactgaggggaaatgttttgtttccatcgaatcacaatcgacagctaaaaaccccaaattatggcatccacatagccatcagttttgtgaattgatgggaaaagtattttagttggttataattggacagaaaatcctatttttatagtagtgaaccctaatctctttaatttcatatttgttaacaccaagagtagccatgataacgtggacatcaatgtttgacacatgggaagaaagatgatatctcagagttgattagtcccgagtcatagcaagttggcttaggataggtttgtagccctgtacccatgttgacttcggaaactccgtgatagaagtttggacttcaataaatcacttccaactcactatctttcaatatatattgtaccatgaagacatgg

SEQ ID NO: 119083 - DNA, 4155 bp, Cannabis sativa
  modified_base (1584)..(1594): a, c, t, g, unknown or other
  modified_base (3024)..(3026): a, c, t, g, unknown or other
  modified_base (3073)..(3075): a, c, t, g, unknown or other
  modified_base (4095)..(4107): a, c, t, g, unknown or other
acggccaaaaaagttcggggggcaagattgagtacatgtcaaagttcgggggaaaaattgctaattaacctagatataatatatgtaaaattttataatttttatatttatgcccaattacagtggaatgcgacatatgatctatttagtaacttagataggattttataccttagaaatagtaatccaatatagtttgacatttagaatgtcgaaaatgttcagggttatgatttaagtccattttacccctaagtacgttgattactttatgattaagcaaggggtagattggtctttttactctgattttgtctttagtgttttgaatggatttttgtagtaaaatcatttcttaattatataggttatatgctaaaattaggatttaatatccttttattcacttagacaaaattaaaataaaaaattattactctttctcccctagggttcggccaaaccaaagccaaaagcaactaggattttttcaaaattttggtttatttctaaggattctagcaaaattctaagtggctttagtcagtttcaagctcaaggtaacctgtttccttctcctctttgaatttcatagcaaagtttgagtttttcatgtgaatttcaagttttagtttctgtatagacttgttatgcttcgggtgtgttttatatgatacgttgagttagctaagtttgttgtggctgttatgttgcttgttgttgagcttagacaaactttgagctttgaatcttaagtttttctctttaatggctgaatttgagtgtaagggtttttccttgtgccttttggttttttatgtttgttgtggcttaaataggtgttctagaagatttagtatgatttggggaaaaattgagtttgtggtgaagtttttatagttttttgcggagaattgattaattggttctgacagtcctatagaaccggttaattgtttccctaatcctaggatctggtttttcattttgggaatccaatttaccgattctagtagtcttggaaccctatttcttgcgttttagtaatatttagggtattaccacactatccattgatatggaaacttctaattttaattttaagtccctcagaagtgatttagtgtatcacttatcaattttacgaattttgtgacttaagggcctgtaaatcgtcgagcagtagtttccattcaggttgactggcacacctaaattcaaaatcaagataagattagtataataattgcatatgtgatcacatgtttagcgtgcatgtttatgaatgcttgttagataacatatcagtaatgtcattattagtgtacatagagttgcactgaataccaacgaatatatatttcgcaaaatattaattgacgctatcacatcagtacgactagagtaccgagtataggctgatattatggttaataatattgtcgtgcaaacattctagactcagtacgcgtttgacgcgtgataggattataattgggtgtatggatgcctagttataacctggtttatgttatgttatgattatgtttttcttactaagtctgtcgactcacagatattgtnnnnnnnnnnnggtaagggcaaggctaaagctgaataacagtgagctcaagctaataaagattgtacatatcgaaatggttagacctggagtgttagatcctcgggacaacaggctgtattttggtggttgctaaacaaaaccttttgaagttaaatatttagtaatacaattgtaaattttaaagatagactcctgaattaagtaaagcttttgtttatttaattttaaaggttaatcttcaaaattttaattatccacgtatttctataaaccctttgattagtaaagaaatttacagcattaagaaatcataataacacacctaatctaatagggtgttacagtagatctccttctcagctttctgtaacaatttgaatcacccaaatcgtgttaatattgagggagttatgctcaaaatatagaagttgtacaaggtttcgagaaggtcactcggtcatgacaattcaagaggttagtccacaaaggcaatgaaatgtcacacatctaaggacatctcggctttctatatctccttctcaactttttatagcaccttgaatcgctaaaattgggttaatattgagggagttatgcccaaaatatggaagtggtacaaggctttaagaaggtcactcggccatgataatttaagaggtcagttggcaaaggtaatgaaatgtcgcttggccaaggacatatcatctttgtagatctccttctcagctttctatagcaacttgaatcgcccaaatcgggttaatattgagggagttatgctcaaaaatacggaagtggtacaaggcttcaagaaggtcacttggccctgaccatttaagaggtcagtcgacaaaggcaatgaaatgtcactcggccaaggacatctcagcttaagctctctatagcagcttgaatcatccaaatcgggttaatattgggagagttatgctcaaaacacaaaagaggtgcaagatgagtaagatccacttgacgaagaagccttggatcatcctcaactcacctagcaagcacatctcgagaagtcactcggcaagcactttttggaagtcacttggaatgaactcttgagaagtcactcgtcatgcaccctcgggaagtcatttggccatgacattgcacatgtcactcgaccaagaccttgcaaaacttggtggaatattcccaagcaagaggagagtgaagcgacaaggatgcgatcacaaggacaaggcaagcacacaaggagagtgaagcaacaaggagatagtcacaaggataagataagcacgcgaggagagtacggtcaggaaaaggatattgtcataaggacaaggtgagcacacgaggagagtacgaccacaccttctgtaagctctaaaagtaaagaggtacgaaaagtggaggtactgcaccggtaaagtgttgggattttatgcccnnnataaaactcattttaatataattttatttgttatcaatagaagattnnnagtcatttatgtttacatgtatttttcgtgtttatgatttattatagaatttttgttaaatctaaaacatatagttattcacaattacagtgatgttaatataatagaaggtaattgtgattatatacttcaaaagataatgtctcatgattcacaacatagtaagtctataactaatgttaatagagaattgttaaaaagataccattggtgtctaatatatactcttcggtgtcatactactattgttgtaattaagtattgagtctcatatactttacaaaaataacttttaggaaatatcagtaacaaatcatggagtgccatttataaaaggtgttgaccactagctagtacccaaatatattactacaaatttccatataaggcacgtttgaatttacaaacttgtgtagatttttactcagtttggctttatatataagtagtgtagttgttaatgaattataattgatatttaactaattaatggcgcttgtgatcatgatcatgatgtgtgacaagtagatgataatgatgcatatcagaatcctcttaccatttctaaacgcttactcattcgcatgtgatagtgtgttgatggatccacatatatatcttgttacaatatcgttgttaacatattttatatctatgtatattttacatcaagccctttgaccttttaatgtgtatcaataataatcataaaaactacatgtgtgtatgtatacataacaaaaaacgaactatatatataattttttagaaagaagttatcattccttcaaaaaaaaaaaaaaatgatgtatatatatatacttttttctttttggtaaaatataaactttaatatatatatatttatttgtacgcgttcaaaagttgtagatattaatcattttacaataacatgtgcatgtttgtccagaaattttatcatatatatcctagcagtcattcaggattgaattttataaggtgaatctagttatacatttagggttcgtttggaacgtnnnnnnnnnnnnnattgtattgtattatattgaattgcattttatgcaatatttttatgta

SEQ ID NO: 119084 - DNA, 2469 bp, Cannabis sativa
ttgtattatataatattaacggctattcttgttcctacttgcagcgatgtcatggtaatgtatcgaaatgagatgaataaattagctgaaaccctattagacctgatgtttgggtctttgggcctgacccaagaagatacgaaacaagttaagcccaaaacagggttgaagaatccatacggcccacttcaattaaactcatacccaatctgtcctgatcccaccaaagccatgggcttggccgctcacacagacacctcgctcctcactttactataccaaagcaacacacccactagtctccaaatcttcaaggaagggattgggtgggtgccagtgcatccactcaatggtgcactcattgtcaatcttggagatttgatgcaaattctatctaatggacgatttaagagtgtgttgcatcgtgcaattgtgaacaatacacatcatcgaatttcagtggcaaatttctatggcccaccaaatgatgtgaaactatcgccgttgattcaacttggtaatcttgatcatcttcctttgtatcgttctgtgacatggaaagaatatcttaagattaaagcaaaacacaataccaaagcacttgagtttatcaagaattgaacttgttacatataccaaggcactagttctcatatctttggtctttctctcatgttcttataaaccttaataataataataataataataaaatttctgatattttgctttgtcaattttttcttgtgagtggtacaaattgaaatgatttaattgtgggatttttgtgttaacactttgtgttctaaatgattgtagttttgagtgtttgccaatcatctttgttattgaataacatttccctgaaaacaagttgtccaaacaaacccgtatttgcctagaatctgctaccttcatggagttgctcataagcatataattattcaagagttgaatgcacaatctagtaactagttttatcctagtaatggtaagtgaaaattatatatttgatgagttttcataccatgtgtaaaaaaatttcaacaaaatcattttataagaaaaatttaaaaagaatagtaataaatatggaaagaataattaataatttctaaacttttgtatttataaaaatttagtctttacgttaggtgatttatttttataaattagcaattttatttcctaaactctaactactatcaaatcgtattcctctaaataaaaattagaaagattcataatttttttgggtaaaatttaaaaaattaatttagatcttaaaaaaatatatattttgaatgactaagaaaattaaagaagaaatttaaattttatattaaataaaaaattaaaaaaataattttttttttattaaaaagtccatttagacataaaaaaaatatattgaaaattcatttttgtacaaactaaattttatgggaacaagtttgagtatatttttttctctaaaaatctaaacataacatttttttttagattaatttctatttttttaaaagtatttcatatttttattaaatttctaattacttttcttcaatttttaagatttgtgtttgtaaatatttttttttaaacaagattcatttacacgggataagataagtcactttgtataacatgacttacacaactccaatccacgtagcactaacttcgttatctaaagtataattagctaaattatgggccacattattagcctctctatatacaaaagataatcatattacgaaagataatctaataacttatgtgttcgtaaatataaataagtttgatgttacctttacaaaatcttggtttgtttaaattagttattagattttcgataattttagttaatttttttatgatatgtatttaaaaataaattaaagtttaaaaatattttttctacaaataatttaggttgttcaagtaaacttaatattttgcttttctaaaaaaaaataataacttaatatttttcttattaatttaaaacttttctccaaaaatatgactcattccgctcaaatctctgaatctctgacccttgttattttcttattttctatcgtagagtattatcaagatctgagtctggattttttttctctcctttgggttggttaccaccgtcttccttactatgattgagtacttgacttgctatgtgtgggcatagcactctatcactaagggcgaattggttgaagaacaatgaaggagggttcgaatcactatagaatgtgtctctcatctactagttgtttgacagagttagaaactagatttggcaggttgaaagtcttggatgagatgagagtatcatgtcctttctatagtgtttcaaatagagcttaggaatttaaaaaaaaaaaatattgggcaaaattacacactaaggccggccacttagtggaccactctcttgttacaattttgccactttatttc

SEQ ID NO: 119085 - DNA, 1714 bp, Cannabis sativa
  modified_base (1652)..(1653): a, c, t, g, unknown or other
tgtttatatgacgaaggccaacattagggaaaacagataaagaatttctaatgtcctcaaccacgtctgaaagagcggatagatcattcttttggccatggactttgtcaacaaacagctttgaatcagtttcaaccactgccaaagggattttgatgttttgacaccaaattagaccagctctcagagccaaagcttctgccatcaaaggttaaaagtttcctgctgcgggaatggacaaaccagccaccaaattaccatgccaatccctaacaatagccccaaatcccatcttgctttgctctgcacttagtgctgcatccgtgctaagctgatatcaattttgtgggactgccttctctatgcccgaaacctgcagagtctgaactgttctatatcttttaacattgcacatagcttcctgataatctgaaatgaatgagttaatccaggcaacaatatcagcaggagcctgtttgaatttgcaaataactttttatttctagaattccaaatggcccacatagtggttaacaaaagcattaaattttctttattcaactgatcaaaaccattaagcataaattctttcacatcaacatgtctattagaaatataaaagcttcaaagaggagaagctttccaaattttagcagctctgggacaatctagcaaggcatgagtgacagtttctgagggatttctacaaatagaacaacaaggttgaggaatggttttcctaacaaataaattgatggctacaggaaggatatgatggtaaactctccaagaattttttttaatcttgggttgaatattcaaattccaaagagttttccaccaagcggtaaaaaaagaagggttagaggaggaaggagggagagaaacactattagcaagatgataagcagattttacagagaatatacccgaagtttcatgattccaaactaaagtatcaaccctttgaggacccccaattggaactttaagaatagaagaggctgaataatcatcaaaatactgatataacctatctctattccaaaagccctgatcatcaataaagaagctaaccgtattaacaagaggcagatcattacttctcagacaaggaaattttatctcaggaatccaacggtcttgaaaagtcctgatagagcatccattaccaaccttccacatcaagcctttttttacaagattcctaccccatgaaagactagaccaagtgtaagaaggagaatgccccaatttagcctcaaggaaaccattatgtctaaaatatttggctttaagaatagtggccagaagagaatttggagttgaaagaacacgccatggcctgattatgagaaacaagagacctgaaggcaagaccaccaaaaaactttgaagaatgaattttagaccctttccccattgaacccccaattatgtggtaagcacccatagtaatttttttttaacaattctctttttgcaatgataaactacactgtttttttcctttctaaattaccataattactgttgtaacggttaattgatatgaatcgtatctttgcgtcatgattcctctgtggcccttatgtaaatgttaaagtaaaaaaaaaaaaaaaggagatcatggggattacaatatataatgnnatggtcattacattgtaaagtcatgacaatacttagagtaattaatattaaattatgggta

SEQ ID NO: 119086 - DNA, 4223 bp, Cannabis sativa
gtttagagttgtttcatcttattttatttttattctttattcttctattgtaatctctctattatttctaacaatggattgtgtatatatgagaagagttatgcggacaaggcataactatgttagattcggtaattaaaattgagataaaccctattaatgccttatatgtaaaatagatatgtgagcgtaacacaggggtttatgtaacttacaaatattttagtttgaaataaagtttgtaacattgctggtaatttatttaaattaagtttattatttgttttaaatcacttggcttgtgaaccctgattaatgggattagttaattgtaatcacgacacatggcgttcctttgagtaggacgttacatatttatattgacaatttattttttatatatttattgaaataactagcttaggaattaatttgtatccaaagtataaattttaatctatattaatgaaaattactaagataggtaatattaaaaaataaataaatttattttccaaccttaagtataaatttttaatttaaaataattttttatgaacttattttaataagtaggtcgaaaattaataaattaattttctaccaaaataacaaaattttcaattaaaattttattttagtcttttgaaatttaactaacaaagttaactttcaatacttaaaaattatttttcctatcaaaataaatacatgaaaattactaacttaagtgttaaaatcaactaaaaattaatttacagcttaagtattatttttctatctatttattttaatatcagtatatttaactaaattaattatttagataaatctacatataaattttaatttaatatttataaaattaaactttggttgatctgaaaataaataaaaaattaattttccatcctcaacatgaattttaaataaatattttgaaaattacttaatttaaattggtccaaaattaatgaaaaattaattttcaactcaaattttattttctataactatattaaattaatgttgaaaaattaaatatatatatataaagatgaaatatatcatttttaaaattttaataaagtaaaataaaataaattttaaaaaataattctaattttgttgatctaaaattagttaaaattatttttcaagataaatataatttttatttaattaaatattaaaattatccaatatttaagtatcttgaatttaaaagaaaaaaaattcaagtttgctattaattttctatttaattaaatacttagaaaaatacaaactagtttacttaaaaatcaattatctactattatttattaaacttagtgtttgtttctctaaattaattcaaaaataatctattgaaaaattaatttcaaatattttttgaatttattatgttgctaagaaatttttattatcttaaactaatataattagcctgatacaattatttaaacaaggcaagtagacctacacaattaggattgttcatgtgagagaaaactagattcagtatattgttaccattactaatgaccccctaactctcacacaaggtccaaaagagagaaatttaacttttattaaattattgttactcattgaatatgtcaattctaaatgggcccaaataaaatctatcattgtgtgattattttatttaacaacctaattaaatatatataaaaaaaaaatgggctcatatatgcatctaagtccataagaaaaatataggctcacatatgcattaatttggatgaatcttttatcatgttactaggtttatgacatagatgaaaggaatatgaaaaaatatacctttattataaattatttaattgatttattaacaataaactatgattaatttggatcacgggatccattcacaagttaatcatagctatttaaatcaattaaataatagttttgttaaaattattaattaaagagtcatttacgatataaatatctaagtttaactcctagttataaataaatacctaagattaatttttggtggtaattatacttaagttataattctaaaacttttgtaggtacctaaatattaagtgttaagtaaattgccacgtggtaatccctgattagtccaggttattaaatatttatttttttaaaaaaatagtttacatatactaataaaaaatgacacgtggataatgattagacatttaatagctaggtacctacggagtttcacaaatataacttagatattattattgcaaaacttagatatttatttgcaactgaaagttaaacttaagtatatataccgcaaattactctcaattaaattgataaaaatttattaacaagttaactatagttaatttggatcttaaaatctattaacaagttaaccataataaatttagatttaatcaataaattaaataaataaaacatgtaacaaatattgttgagatatttaataattacataatttaacatattgttaaaattaactatataattcgaaaaaattataggattgttgaataatcaataatatcttttcaaaatttgaaatttcaactaactttaaaatatctcagttttcaaacatggttaactcagtcaacaattgagtcatgttgaactttagcttgttcatcatatagtttgtagtgaaagccttgaagtaaggagatagcgactcaaagatcatactcacttgagtcctctcgtcaataatagccctatgtgtctctgcctcatgaattagctcaatcatgtgcaatacaagagtcctaacagcgacacccttctttatcttacaatttatgtagctacaagtagcatcatacgtcttgtttgattagattgctgcccaaacatggcctgtagagaattcattctctatatcttcatctgtcttacacagaatatcgtccatgcttacaagcattaaaaatttggccttatttttggattgaatctaagcatcatatctatcccgaacatttttcaaggcatcggcagtgggctcctcagaacaccccttagttaggaaaaatttataattctcacaaactagcattaaattcaaattcgatttctatttataaaagttttcaccattcaatttttcaagtgctaataaagtagtgaggggatttggcatggtagacatgactgaaataaataaagtaacataatcattatacatgaataataagtatcaattcaaaattactgtaaacgtgatgcatgatcacatacaagtaaaacacataaaatcttgtttaagttattccacgataaaactctttgacaattgatcgtcgccttagggtcagtatctaatcattttcattgagcctatgagagaatactcatctttattattttaaaacctaaatatcttattttttttttcaaaatataaagtaccactattaggccaagttaacaactaaccactatgaagcttagttgcactttgtaagagtaacccattatttcagattttatgacttaacttagtaacgtcgccttaatggttgatattgcactaaaatacatcacttcctcttattgtagttaagagatcaactttgaaaaatagtatagatacataccttccttagggggacaaaatctaagccatctcgatgcagtctatactcctttgacaaataatggaggtcgtagattacattgacatgtacttattctcccactgaatattttaagttaatgtgtttattttattaattctcatgattaatacatattaaccactttaataattatgactaatttatttataataaaaggcttaaattataaataaatttctcgtcataatcattaaatttgaattaactctttaattcataatctaaaactattttaaattaataagttaattctaaattaatcttaaccaatttacatgctttcagttacaaaacggtaaacacataggacaattctaatacgttatgtttctactatgatatgcatgatattataactgtgtgtgatttttatgtacgacatgttattcactaatgcatgagcatgttattaatcaactattaacgaatatttatttaaaagctacaaataaacaatgatgatgaactgggtattaattgggtatgtctaattttataactttgaaaaattataaaataaagggtaaatagcggcataagtacccaaagttttaaatttgt

SEQ ID NO: 119087 - DNA, 1653 bp, Cannabis sativa
ttgtaaaagttaacccaaattccattatttttgtaatttttttttttttttatatatataaagttcaaatttgccatatgttcaaatttgccatatcttttcctcaaaaaaaaaaaaaaaaaaaaatcattaagaaggaatagagcccagattaaatgttgggtcaaattacagaatgttgaagtgggtggcccaaatgataaaaagggctcaagtagaatattttagaggaaattacacaatcactttttattttttattttaattttaattttttattagtctttaatttatatttaattttatagattaaaatatcattatgtgtattagaggttatatttaatactttaattataaaagaaaatatttatcaattaaaatcattttacaatagcatttgattaatgtgtaataaaaaaatacctctcaacttattctatattttttttaaaaggaaacaatgttctatcatctttatcccttacccattttgcaagaaagataaaaaaaaaattggtaactttgacacgtgcacttatcacgtgcaaaaacaaaaacaaaaatttggattaagaaaagggaaaaaagaatcatatttaatctcaaaacttcaaataacactagtcactttctttttcataaagctaatatttggaacacaatacgaatttgtttaagcactaagacatgatttgtactagaaaagaatagaaacaatttgttctgtccttttcaaaaacaagacaatttgtttagaattgtaatttttttggtcgattccaaattgtaattattatattccaaaaatatttatttggaggggaactaaaattattagtttattgaaatttttacataaaagaaaatttttgaagaaaaaaaattataaaaatacgtcaatacataagttttttttttttatttttaccatttaaattttttatttataaaaatacattattcaagaaaaataataaattattttttaaaatgtttaatagtttatttataatagtattattgttgtcataatgttatttttaaatgttttcttattttttgctaaaaaatatatatttttgtaattttaaaaatttaaaaatgtatttttataaataaaaattttagatcataaaattgtatataaaatataaataaatagtttttttttagaaaaataaaataaaaattcctagtttataacccaatcttttattattattattgttgttgtcgttattgttgttttttaacaaagtttataatccaactttgaatgaaagcttttttaaaaagtataaattaacatatgattttacttatctttaatatttaaatttatagtgaaaatatgtcaaaaaatattatagtaaaaaagatcttgttttattaacttaacactaaaatttatatatttatgacgttaactagtcaagaatataataaaatataatatttttctttggataaacaaacaataaaaaaggaattaaatctaaattttgagtcaattctcatcaaaatatattttgtcttattttttctattttggtggatattatagctatttaagatatcttataaaattttaaaaaattgagaataatttacaatataaaaaaggggttttttttcaattttacacttcaa

SEQ ID NO: 119088 - DNA, 606 bp, Cannabis sativa
  modified_base (555)..(559): a, c, t, g, unknown or other
ttacaatttttttacaataatttatgtacgtttctttttgttaccttttgtagtacttgacacccaataacaatatgtcattatttatggtatttaacacatctcttagcatttttttatggataacaattttttttacaacaacttctatgaatttttttaatgatcttaattcttttttctcatgaaagatttttttatatatataattttttgtacaatattttttctagtgaattatatattttttattattattaataaaatattattattttgcaccttgagatgtctaacattatacagatatgacacttaataattagttagtagttttttatattattcactaaattataattttttgagaactaataataaaatataccaataacggtatgctaccatttatggtgtttaacgctttctgtggtatttttcttatcatttctaatagataatgtataatttgagttaaaaaatgagtcaaatttgttggaatatttttttaccatgatctagatttaaactatgtatgttatttaacatcctaannnnnaatttctaaaacaatgtaaataaataaatataaagtttaagaaacct

SEQ ID NO: 119089 - DNA, 1342 bp, Cannabis sativa
agctgtaagtgcaatgcccaattcagactgtgaaacaaagctttcgcctccatctcatccgatcgaaagtttccttggactggtttcgaaagtgcagcaaccacagtccctgagtgatctcttataacagctcctactcccaagatgttgaggtcttggttgacggcagcatcaacattcaatttcaagcctgcaatagtcggtggagtccaaggaattgagttcttcctttgctgtactgctgctggaataggtgcagtattactggtttggttgcagacagcatactgttgctgatttctgtgcttggatttcagaaacttctccaaatattgagctgcaaagtcagcagtaatatgactttgcttcgacacaccaccatgtatgactttattcctctcatgccatatagcccacatagtacatacaattgattcaaaatcttgtttagaatgtatggtggataaatggatcaagtaatcaccattatacatatgggaagcatgtgtatggtcaatggtgaacttggtaaatttccaaacttcctttgcgttgatgcaattaaataaagcatgaccaatagactcccacgcattattgcacagagaacatgtagccgaatctagtacctttcttctgcataaaccagtagcaacaggtaaggcattttgcattactctccaagcaaaaattttgaccttagaaggtaagttcaaaccccaaaaagttttccaccaattcctatgtgagtccgagccactagaatccctcgaatctgccaaattctctgctaaatggaagcctgaattcactgtgtaacaaccagttgtagtgtgatgccaaatgaggcgatcatttgagggaaaaaaacacagtgggatggtggcaattctatccacatcaataggcaaaaaatacttgtttaaaagagaaagattccattctctatgacctgtgatgaaatgtgccactggtagattagctgggcctgaatagcttattggcttgaaatcattatgagcagggatccatctatcagaaccagccaagacattgaaaccacttccaattttaaaacgcaatccttctacgagcagttctctcccccaatgaatggcttgccatgtgagagaaggagagtgaccaagtcttgcctccaagaagctattatttgaaaaatatctgtgcttaagcaatcgacttagcaaggaatttggattctcaaaattcgccaagcttgctttgctagaagagccttgttaaaatgtacaaaagaacgaaaccccatgccaccttcaaattttgacttacacaacaatttccaacttctccaatgtatctt

SEQ ID NO: 119090 - DNA, 1099 bp, Cannabis sativa
taagtggtaaatgtgtaataaaaacaactttgtaagtaaaaatgtagtaataggcgtgtgtgagtaattttgtaataaattgtgcaaaatggatttttcatgtaaaaatttctaataaatatatgtttttcatatcctaaaatgttcacattaaaaaataaattataatagcatttttcttaagttcaatcgaacaattaggtgatcacgaatgattttttaagttagaaaaaagagagaaaagtatagaagttgtgatgacttgtgagagaggaaaaaaaaaataaaaaataaatacttagagtatatgtttttttgcttcactatacattaacatgtaatatagagtaattattttttagctaattaggatttttgcccctaaagtttgacatgtactaaattatgccctctgaacttttaaggtcgttaaaaatatcccttaaactattgagatttttgaatttaaggacttttatctaattttatagtttttaaaattatcacatgtcatttacataataatattttaaagtttgcaacaagtatttctgaatgcattgaaattgacaagaataaggtctaatgttgcaacaagtaaaatcttcattacacaaaatctaacttgagttttttaataacaaaatatgctcgtttattttgttatgccttaataatttaatttattttacagttattttcaaaaaaacaatttttataaatatttattaattcattgataatgtactcttgaaatatgtatcggtatttttcaaatgaacgttttttttttcaagttattgtcttcttgcaaaattattaattattatgtgttttaaaagattttgtaattttaaaattatatattttcactaattttaatgaataagttttttataaaaaaatttataaataaatgtgtgataattctttcatttaaattcttataaaatttaaaatatattaatacaatcaaaactaaaaaaaagataaaaaaaaaattctcatctgcatgggattatttatcccatcctagacaaatgagattagatggattagttatccagatttttgtcatgcccaaacactggattggaca

SEQ ID NO: 119091 - DNA, 2092 bp, Cannabis sativa
gtacacttgcgtgtacaaaatatcgcaacaaccatagattgccttgtgtaatttgcacactttgttggcatatttaggatcaacaaaccctgggagttgagcaatgtaaatgtcttcattaagatccccattaaggaaggcattattcgcatctagttgccatatagtccaagttttagatagagaaatggtgagaaccattcttatggtgacaggttttaccacaaggctgaatgtttcatgaaagtcaaatccagcttgttgatgatatcctttggctacaagcctagccttaagcctatcaacagaaccatcagcattttcttttactcgaaacacccatttgcaacatataggctctctaatggggggtagattaactagactgtatgttttatttttcttcaaggcattatttttatcagccatagcagcaaaccatttagaatcctttaaagcacttttgactgaagctagagtgagagaagccattagaacctttggctttctgatacctaacttgcctcttattttcataggatgattgataacaatagaatcaccagaagtctgagtaggctgattaacagtgagatcacctggtgcagcagtaggttcttgtgtaggcacaacagttggaacttgagcaggaacaagtgcagtagactcaatatcaaaatttgtggtaagaaagctgaggctgaataggtaaagaagcaatcagttccttattagaggagccacaagttgctgcaacttctatgtgagcatctacattattaacattagtttgtgtcttgacaacagtgttaccggtattcaaaacattggtaagaggttgattaggagcctgaggaacaaattgcatggattggttgaagcaaggacgaggagatggatgaggtatcctattgggaacagctgaagtagcaggctgtgagcttgaattggaagtaggattttgtgtgttttgtgatgcaaagggaaaaacaagctcatcaaataggacatctctagaaatgtacactcttccatcatttgaaagatatttatagcctttgtgacctaggctatacctaagaaaggtgcatggttgagacctatattgaagtttgaccttgttagatggtctaagatttggatagcataagcaaccaaacaccttgagggaagagtaatcatgtttgacattaaatagaacttcttaagttattgataagtggagagggcattctgttgatgagaaatacaacagacctgtaagtctcatcctagaatttaagaggcatactagccagagaaagaagagttaatccactctcaactatgtgcttatgtttcctctccacaattctattttattcatgtgtgtgagggcaagagactttgtgaacaataccagattgttgcagaaagtgggtcaataattgttattctcttccccaatcaaattctatttgcatgatgggtaagcctagttgaagttcaacttgatttttaaaccctatttgctcgacgtatgtagcaatggtaggatccatttgtttgagcacctcaaaatgtctatcacattttgtcttgttccatgcgtaagctacaagccatattttcttgttgcatacatcagtcttgaacttgtgaacgacattcatagtaatatgcttaaagcatgcacagtggcatgcttctggaaaaacagcctcaacaacatgttcaatgctttgatgcctgtccgatatgaacataaggttttcaaccaccccaatgtcttcctttaactaccacaagaaatacttccaagagtcgtgattctcactgttaataattgcaaagcctaccgaaaataattggttgtttgaatcgtacgcaacaacaactaacattgtgcgcccatactttgtcttcaagaatgttccgttaatactaatcacaggatgacaaaacttaaatcccctcctacaagcatcgagtgacaaaaaatagtacttgaaccggtcatcctctctcacaatgtcaataatagtacctggattcttctgttctagcatgtaggtgttgttgggttttttgccctaaataaaaatcatttcaa

SEQ ID NO: 119092 - DNA, 627 bp, Cannabis sativa
tcaatattttcttctcttacattgttatgtgcggtcgtttttgtagggtaaggttagttcatgtgctagaaaaggaaagcagtcaacttacggcattccatcggtaggggaaacaaacctgttttggtctcaaaatctcacccaaaactacgttaggcatttttttcttggattttattacatttttccctttgaggctttttgtttgttcttatgtttttcttacttttgaatttgttacctatcttaaatttgttattattcgattagtaccaagttttttaatctatttgaaagaacaagtagtcatgacacacaccggtattgaatattccagtatcagtatcagttaatatattactataaatcattttattattttgtgttttttttttttttaattttttaaaacttctaaatagtttttttttttttttttgtatttttacgcaattctatataaatctctgtttttaacaacctaaattgtaaccaaaagttatataacaaactacatagaaatcaccggaaaaattactttataaactcaaaccttaaatttaaaaaataattaaaaaaaatagtatgtaagataattttttttttttttaaaaaaaaaggaagaag

SEQ ID NO: 119093 - DNA, 1243 bp, Cannabis sativa
ttatttctgatctttaataataagtaaatctgattatagtaaaatgtgtttcatttagggcacaaaacccaataagctcacctaaaaccatacatgagctacttgcaaggctttagatctcttaaggagtgacctactctttttatggtttgttttaattagaatatttggtgatgctctatcattaaccatcaactttgccaccattatgtttgaaattctatttacactgtctgagcttgtctgctctgcccctcgcattaatctcttagttattagggtgaaaaactttgaagtttgtatgttgaagctatcaactataagcaagatagaccacttgaggtgtagtgggttattgcttgtgtgattagtgctcgaacataatttcaatttatcatcctaagtgagatgaatcactgtcaaagagtagtgtggaaaaacctgccagatgttttgtataagagcaaaatcacaggttgttgaagaacctttgtttgatgagttcaactcatagaacctttttaaagaaaaaatttgaagggaggaaaaggaaaaagaaagattgcactagacccttgctaagtacaacgtcccatacttagaaggagtttagcaactaaatgaataacacaactggggtagcgtcccagtcccggagggttttcttcaatcaattagaaagtctcttctggatgcagcatcctgcttctagagagttttctataattaatgatgcttttcttttcttttttatttttgtgatctgaagaagaacactttcactagaactttagatttacaaactcgttcattatatttttgtgcgacctattaagcatttatataatagcagtgctgaactctagcgtgaaaatagtctgtatgtgtggtagatcaacttaatgaacttaccagcactcacactagctctttaggattaagaaactcagttactaggaataacgtcaacatttcatcaaaccatagaaatactaactttggtgtgcaaatttttttgaatgcctttgcaactcctggcttccttatactaggataacacctagatcctatataccaaggtatatgtgacatacatggctctcgtgtaccatatttttttctgaatactcatataatgtacatagctcttgtatactatgttgggttttatgccccaaataaaactcatttcaatataaccagttttacttattaatataggtcagaaataacatttaatgtt

SEQ ID NO: 119094 - DNA, 2704 bp, Cannabis sativa
  modified_base (2647)..(2667): a, c, t, g, unknown or other
acttgattactgttacattggataaaaaaacagataaggaaaatacaagtaaatgactcagccattttcaattccaatattgcggcaaaaatacatatttcatataactttcgattatatttaaatatctaatgaacattcctagatacttgactattaccaagtgacctatccacgtgttgctcttttattggttccactcatttagttttatttaattattttaaaaaaataaaaaatatattttaaaaatcaaacacacactccctctcacccgctcagccttcgtcttcctcttgagcgacacctctgcccaacgtcgatgagtcgtcaaggaaataattgacggaggagctatcaaggcaccaaaattgcaagcttccgagaatcttaaaggttaaagctggttctccctctcaattctcctctccctccctttctttcccaatattatctctttgtcgcctctactcatatcaactccagtcattatcccctaaacagaaattaattgcatgttcaatataaattcatacacaagattaaaaaaatttgtatacatataacaagtaatgaagatatggataaaaatataaaacaacatatctcaaatatttttaaggttttcaaccaaatgataccagtgtcccggtaggtgagagtcaaagatattaccagttgtcaattcttttaaaatagacaccattttagtaaccttttattaaattaaaataagaatctaacaatgtaccgataggcgagagtcaaagttattcttattttatgagctccatatcattgtttaggaatttataaatctagccctagtagtcattgtagagtgaatttattagaatttgatttataaatatttatcttttgagatctaacagtacagtgttaagttattcctttgaaagaccatccgtaggggacgaagtcaaagcgtctcgatgttccattagagaaccatgtttggtcaacaatgaagatcgaacgtccttaattaaagctcattgtttaagttaaagtgtatttttattactttattttaatctatttatttaaattactaatttagataaactaaatataaatataaattttgatttaacatttataaaattactaatttaggttgttttgaaaattaataaattatttttcatcattagtatacattttaaataaatattatgaaaattatttaatttagattggtccaaaattaattaaaaaaattaatttttaatttaatttaattttctataattatatttaatatatttcgaaaatccaatatataaaattatatatatctcgaaacatatagataaaataaaataaaataaagtcttgaaaatttactaatttaagtttttttttttttttgataaatcagagaagttttgtattgcatcaaatatctttacaacctatccatctttagttttaaaaaatcaatctacctacaacaattcaatccacctcttatcctccttactaacttttttttttttgtcaaaaaataatctacttctatatttgacatcattttcattctttttacaattgtatcaactgtataacactttgaattccactagctttcatttcggttttgacatagttggtaaatcaatgctgtgatggtagcagccatcaccctccttcgactttttgaaagctttgatcgggccagccacctgaagagatgtgaaatgctacctgctcttgtactctatgctagtcaatttttgatttctattagacatttcaagctaaaagtacactcaaaaaataagtgttcaattgattcctcatgcttctcacatattacatattttgtatccatcaccacattaaactttttcagtctagtcctcgtttggagacgatttagcaccgataaccatagaataaaactatgcttcggtacattgagtctattccaaacaacatccgcccaatggacctttggttggtttccaaccatcatttgataaactttattaatgttgtatgtacttgttataagtggctggaggttgatgtctttgagttgatccttgacagccacaatacgcttcaaataccaactccccgagggtgggactttgtaatcccaccaatctcttccttttaagagcacgctatgtatccatctcacccatagattatcttgtttggatgagattgcccaaacatatttctcaattgcaactgtgttccaagttataatattcctaaagccgagtctcccttctttttttggcttacacaacttgggcctgctattctgaattgcctttccaaaggaatgccctacacacgctattaacttttttcaagagctttttagatagaatcatgatctgtgcctagtatgtgtgaatagagatcaatgcagagttaatcaaggtaactctacccgcaaatgagatgtttcttgagctccaaatgttgattcttttcgtcatcttttctaccaaaattttagattcagcacttgaaagtctcttagcagcaatgagaatgccaagacatctaaatggcagtttgcttcttgtaaaacccgaagcatttagcattctttggatttcaaaatcatccatcccgctgaagtaaaaagtgttggaaattattnnnnnnnnnnnnnnnnnnnnntcacaagtatgtttattaacaccttaaatatgaactt

SEQ ID NO: 119095 - DNA, 683 bp, Cannabis sativa
aaaaataaaaacagttttttagttatgatgccaaacatgcacgtagatttttcttttttttcaatgatgaaaaaagggactttcgatctctttctatcattttcaagataaattaacacttactaaaaaaacaccacaaggtaattttgactaacaatttattactcaaaggaaacttatagcactacacttcaatacaaagagtgaagtccatataataatttaatatattgtgaattatatacttgtatatatatctatcatatatatattatatatgatgttcaacatcataatagcataatagcattcttctcaccatttcatttaatctattgattatttatttttcaaatttttatattacactacacattaatttttatatataatttaaatattatatcttattcatttaacttttaacttgtaaaatataaaatatttttatttcaatgaatagtaatttttacatttaacttgtaaaataattacaatttaatatatatatacatcgaagtttaattttataattttttctttataatttaaaaattaaaatattttaccttatctggtaaaaattgcaatacaagtgagacagatagcgcataaatcccatttatatcatgtacaaaaaaactacgtttagtaataacgttttagtcacaacataaattttt

SEQ ID NO: 119096 - DNA, 1928 bp, Cannabis sativa
cctggagtgagaagaccatgaggcaggccttgtggctcacaaaccaggaggcaggaaattgttcaagaaaaccctcaaaatgctcaggttggacgacctggggaaactgaggaaccccctgaaaacaagcaacccgaggaaactgaggttccccctgaaaacccaaatgatcagctagaaccatctcatagaaatgagaatatgaggcgaccaaaaactagggaacagaaaattcctcgtggagacgtggaaaatcctaggacacaacctaggggatgaaggtcgccagtgaggaaccaccagcgttcttcccaaatccatagggaaggggctcgtacaaatcccagtaggggaaacacgacgaaccatgcccaagggggaagaacagggcgtgaagaagcgagtgtaatctcaggccgcacaagaaccgatagtcggtcaacgcaaggaggagaaagtactcgtcgcaacaatgatcaagaaagcacaggtacaagtaagactgcaagtcactcaaggacgaggtccatgagtaggatgaggaccatgaccaggacgaggtccgtaggtaggacaaactccatgagtaactacattaatatattttaaaaaaaaaatactattactaaaaaaaataatatatagaataactcctttaagaaataataatgtatttttctttcatagaaaaaaatatttatagaaaaatacattaagaaattatattattagagttatcatttttttaaataactattcactttatttattaatgaggtgttagttgagtgacatatgcttaatatgtgcttcccagtgagtctaatatctcttccattttttttttaaaaaaagataaatttaataaaatacttttccaatttatataatgtacatgatattccataataaatagtttaaatcttcaaaagtcaacttaatcaatggctaataaaatatcactatcctacggggacaaatgaagtattcctattgtagaattttcctaagttttattatactatttctattgtaagataagagttacaacacaaaccgactaaacccaacccaacccatgaaacaaaaagcagagttgagttatacaataaatccgatataaatgggttgaaatttaacaggccaaacttattaggctggcccactaatatagcttcaacctgaccaacccaacccataaggccaactccagttcggcgtgacccatgagaagctgtcaaacgataagctacgggtggagtggtattatgcattggagaactttaaatggacaactacaaatccttggcaggagcaattgtagtatctgtccttttttatttttatttttttagaaaaataataacagtaaaaaactaacaaaaatattatattttagagtatttttagagttgcttgcattagagtattttttttagtaaaaagtagtcaaaatgatgtgtatgataaaaaaaataaaatattatattttaagagcatctccaacgctcatagatgaggagtagcccaaggtacttttgtcagtagcatagttactatactcagtaatattgcattggatgaattcaaattgaccactccagctgttgtgcaggagcaacggtcattatctaattttttttttaattaaaggaaataataaatgaaggtcaaatcaattataaatgtacggtaacaattttaacacactcaaataatttaattaataataaaaaaaatcaactattttatcctctataaatactcattatttttcactcttcttctacaccatttttacaatttcttttaaaatttattatcacaaattttctttattttttttttatttcatatcattttccaaaccacttttctacattatcttatattcataaatggattctcaaaattctccacataccaac

SEQ ID NO: 119097 - DNA, 3424 bp, Cannabis sativa
aggtcctaagtttgggtttgggtcggggtttggggttgtgtccgggtagtcatgtcctaggttcagggtctaaggtcaggtcccgtgtctcgagtttcgggccgagttttgggtctcggtctcggttccagggcccagtttctggtccatgtcccccatacaagtcttgatccttggtataggtgtgggtctaggttcaggtttggggttaggtcccccatctaggtcacggtttgcttctcaagtccttggtgcgagtctcggatcccaggtcccagtaccaatcttgggtcccgatcccaattttggttctattcctagtccaagttcagggctaggtcctagtctggatctgggtcctagtcctgatctcggtctgggttcgagtctcaggttcgagtacgagttctgatacgagtccagctctaggtccgggtttgggtctaggtttgggtctgggtttgggtgtgggtctgggtgtgggtccgagttttggtacgggtctgggttctggtctaggtctcgggtcacgggttccaggttttgggtcgcaggtcctggtgcaagtctgggtcttagttcgggtctgggtctgggtatggatctcagtctgggtttctgtccgtgttcggttcttcgtctagatccggttttgggtgcaggtctaatttttgttttagggtcttgatttcggttctaattttgggattatgtccccaatctgagtctgggatctgggtctaggtttaagtctttaatctcggtacgggtcttacatctagttctgggtccaagtccgtgtctgggtttgggttcgtgttccgagtcccgatccgagttttgatttgggttcgcatctcggtctgagtttgggtctcggtcctagttagattccagtctggggaccgaggccgggtcctagtcccgtggtcttgttctcaggttcttgtctgcttctagtctgcttccactttcaggtcacggggtattggtctgggtctaggtttgggtttgggtctgagttcaagtttgggtttgagtcagggtatgggtcccaaatctaaacatcgactatgggtcacgttcaagcctcgggtccacatatggatcccgatctcaggtctgagtctagttccacttcgggtccaaagtcctaatccaggtcctagttcagggtccggtttcgggtcaggttgtgggtctcggtgccaattttgaagcgcgggtctcggttccagaacgggtcctaggtcccagtccgagtctaggacatgatcgggtttcaagtcctagtccgagttggggttcaggtttccgatcccagaccaagtccaaatctaggttcgagtctcgagttcgagtccatattcaagtccaggtctgagtctcgggttccgatctgggtttgggttccaaggtctgggtccatgtccctcatctagatccaggtcctaggtcctagtccgggtccatgtttgtgtttgggtcctagctcgagtttcaatttcaattccgtgtttgggtttaggttcgtgttcgggtttgggttggggtttgagtcctggtccaagtccatggttgggtttgggtccaggtttagatcccggtctgggtcagggtttgggtacaggtctgagtccaagtcttgggtacgggtccaggtttgggtctaggtcttagtccagatcaagggcccgggttttgatccctgtcttggtctgggttcgagtccaggtttgtattaagatccatgtctaggtccgagtttgggtttgggatcgagtcccaggtttaggtctaacgtgatcaccgacttggaaccgaaattggaccaggactgggactagaacccagacatggacccataccaggacatggacctagaccgggacctatgacctgggacataaacaaagactaggatctagacccagactgggacccgaacccagacccagacccaaaagtcggaactgaacctaagagccaagaactagactcagacctaggacccgaactttgacctgaacccaaattgggacctggactcggacagaacccgaacccaaactggaacgcgaactttgacccagactgggacctaggacccgaacatagatgggggaccaagacctgggaattgggcccccgaactaggacaaaaacttgggcctcaaaactttgatcgggattgaagacccaaccccagacccaaacatggacctaggacccacctcgggacctccaggactcgatgcttgtacccgacccgtagtcaatgtctggatctaggacttagaccagaatccgaacctaaactaggacacggacacataccaaaacccagacccacactcgggaaccaaaacccaaaattgaacttgaaacagactgagattatcgaacgagactaggatctagacccggacccgaactcggaattggacctagcctttaaccctaactgagaccaaaaaccaaacatgaacctcgccccagacccaaattaggacctgaacccagactcgaacccaaactcgacctgaacccgtaccccgtgacttgaaactggaaccgaaactagaagcggatcgggacccaagaacacgacacggaccaggacctggacccaaaaatataagcggactaggacccagactcgcacacagacccaccctgggattaggtccaaaacctgaatccaaacaaaaactaggactcgggacccgaacccagactttaacttagacctgaacattgaacatgactcgagacctagaactggattcgagacccataattggactccagtctccatcctagaattatgactgtaactaggacccaaacatgagaccagaactgaacccaaccataaccaaaactcagtccaaaaccttgactgagaccatgactaggactgggacctaagacctaggacccgaaagtggactaggacccgaaccgggacctaatgatacaaaccacaccaacagttgtgatgaaacctgataccaattatgacagcctctaaaaattttagaaattgggatgtggaatcgcgacccaatgtgtattaccctaggattaagtcaatggattagcaaaaccctaactagataatcatgtattattgtgaaattatgttattatataatttaatatatgagaatttatatgatttaagacatattatgatcccgttggtgagcttggggcattttagtaattttgacccgagagggtaaaacagtgaaattaatttattaacttgcttatggactatattattatagtatatctatgtgtccatctcaggtgtgttctgacaggttggcgcggtatagtcacaactgggtattttgggccgaactgagttcggggccgaaatataattctaggattaattattggcattatattt

SEQ ID NO: 119098 - DNA, 840 bp, Cannabis sativa
  modified_base (616)..(618): a, c, t, g, unknown or other
acctccaacacacacgcacccttctatggctacttgagctagcctcaagtaaactttggaaaaagtcaattgtttatttttatttacaagtgataagcatcgccgagtatagcaatggcatcatagttaggttgacaaaaaaaaaagaatctaatcaaattaagtttagtgtctactctaaaagaatgaccatttgttgattttcttttgatggatgaacaaattttatagaaattaaaaacaaaaagtatgtgatgaagaggtggactaaagcagataacaatataataagataaatgttgatgagactatttttgaagttgagaattctcacttggcgaatttggtggtttggcaatctaatcacatcataatcaaagcttttgctgtttattacttgggttgtgttcagctgttgttattgttgaaataatagcttgttgttattgttcagcttgttgttattgttgaaattgttgtaaagtcatctccaaatgccttctacatttaagtatgttttgtaacatttttttaatcagtttatattttttaaattagaaaagtgaaaatattcttccaaaatcatgttttataaaactatttttattttttaatnnnttaattgagaattaaaattttgaagaaagacaattttttttcttaatcaatattttggactctaatccttcttagacctctgaactcggaccccaacccagaccccgacccaagacctaaaccctgacccgaaattggaaccaaaccccgggtcggacctagacatcggaccccgaccccgacctagacccccaaactcgaacctgacccctaccctagacc

SEQ ID NO: 119099 - DNA, 1151 bp, Cannabis sativa
ttttttaattatttttttttaattgatggaccaatcccaacccatataatgtaaaaataagaaattttctaattaaatagaaaaattaatcataaaaactcaaaattttctactattactcattcaagggtaatacccattaagagtgcacccatatatatatataaaatgtagttatgtaataaaattttcagtttaacggtatttttaagtttcctcagttaacttttacagaatattcttaattaattttataatattatttatatattcaaaaataataattatgtagataatttcatatgaaaatattttaatctaaatttaaatacataaaacacgatatatatatatatataatttttaactacacaataagacatattttatcgtatatctatctttcttatattcactcaatcgtatatgtacctcttctataagtgtatattgttgagtctcacttacatctttattatctaattagaggatttattcgtgaaatattccataatactttaaatttattgtagttagttttcatagaatgaaataaatagagatgcagtattagtttctacatagaatgaatcaataactaagtccatatttttaagtgagattttttgtattaatttgttagtgtaggaatctaagttcacattaaacaaaaggtaaagctacttacgtctttagaacaatgtttgaatgtaatagacaaagactgattatagagttactgatttatggaattcatctattttagtcaacaacaaagaagtgaaataaaaaagatttattgctattgtatattttttattaaaaattttatattaaatatttaattttctaatataatattattatttgtttaaataaattacataacattatttaatataccaattaaaaattaaaatgtattacctaattaataaagaaaaactagacatgtgtgcattacgcataacatcaacacaatatatatatatatatatatatatagtaaaacacctatctaaaaatacactgttaaaaaatgacctctaattttgtattaaaaaaattaagtcccaatttgaatcaattataaataagaataacctctaattagttatacattttttaagtcccatattaacaaaatatac

SEQ ID NO: 119100 - DNA, 763 bp, Cannabis sativa
  modified_base (721)..(728): a, c, t, g, unknown or other
aataaaataaagaattaaatttaattagttattttaaacaaaatattaaatacctttattcaaaatacacactgtaaaatttatttttagtcacaacaaaattatgactaaaagtaaaaaatttatgactaattataaatcatcattcttatattgtgactagaaagtttgtggctaaaagtattagtcacaaatattataatttgttgtgactaaatatatttttagtcacaacacttgttttgactaaaactaaattagtaacaacttgtagctcaatactatgttttaatcacaagtaattttttgttgtgactaaaaatcctatttaatcacaaaaaatttatgttgtaacaaaaaagttgtcactaaaagttgctgcttttgttgtgataatagtaaaaaaattaaacataattgaaatccatcatatattttaaaaagtataaaatttaattcaaatttaaatttaaatttatataaacaatatctacctaatcttattaatagtttgaaataattatatataaatattatttttgaaatatagaataaagaattaaattttgttattttaagcaaaataatgaatatgtttactaagaaaataaataattaatgatttaaaaatagtacatttaatcatttacattaacaaaaaaaaaatttaaaactttgttataaataattatactttatatataaatatatatctattctnnnnnnnntgtgcctatataactgaattcttgcgtttatgaga

SEQ ID NO: 119101 - DNA, 2004 bp, Cannabis sativa
atcgaaacaattatggttgcaagaagggactataatagcaagttttttcatgatgaaacatagtcagcataactgcctatagataaaattaaacatgcagttatgaagagttatttgtaattatctcatttgagtaaatatgaaacgtggggattgtccacgtttcatgaacggttacaagtgataagatcacaagggaataactgtcatcctagatttctataaatagggacaaaactcaaggaacaagggatggtcaattagagaaagtaaacagaattatacttaccatacattctgtaaacaaataattgtattatgtatgtaattcattaattcctgaataaaatagactcgtagaatatgaagaattaacttcaaaaccacctaaattcttttgttatttattattactattatcatcaattattgttggggttcgtttattacaaaaaaaaaaacttatttattagttaaataaaatctgtgttaacaatataaatttaagaagacacgtaataattaataaacatattttttagttaagttataatattgtcattatttgttataatattttcataacttttttaagttataatattctcgttagttattttttttttttgaaatatttgttttatttattattattgtgatagccatttttttttttatcaatttacacctaaaaatgctactatacactatatattaaagtaatttctatattttttttgactaaatataatatttgctccttatcaaatatatataatataatatttattcatttttaggtaatttatttttattttattttttttgaaaaaaaattctcaacacctcatagaacaaaaaataaaaagtttaaatatatattatatttattttagataattaactgaagatatttgaaaatattatattcttatcttaaacaaataaagaaaaaaattgaaccctaataacctctataaatagtgagaatcgaagccatgatctcgtcattattatacattttaagttctaattaactactagtgcttcaaattttttatgctatatattaaactaaactatatatatattatattttattttcatatatatatatacaaattatataaatttcatttttttgggcctctaaaattgtagagcctgaggcttagtctgcagttgtctcgccctatgaccaaccttgtttagtggtaacgcttgctttccagtgataaaaggtcatgggttcgaatatgggtgactccctctagtaaaaagtatttaataaatctaaggagctttaaatgtgaacttttggtgccaatcaaactctatattttaagaaagacattcactattagttgtttggtgccattttggtgacacagcccattgtagatgaaggaccatatactggttaatatattgtttataaaaagaacacattaagtaatttatgtattagctaatcaaagtatttgaataaagttagagttatacagattggggttaatttcccttgtgctagtaaaaccttgttgttaaagctgcctaatcctaatcctaacgttttgcctaatcctatgtaatattgttgttggtttgaataaagaacttccatttcaaaaaaagaaaaatacaaagaaaaatagaaaaccatgtctcttctaaattagtgtttggttataatgtttgtgagacataagagttaagtatatgtatcaactagcccagtgggctgtgggcacaagtttttgtggatattagactctatacttttatattgtcttattttatttttatcattttttctcaaaatctattatttttatctttttttttaaatactgtactaattttacttatgtcacttgaagatactctctatgtgacttccttatgtcatagtattttgggcacagtacatatataaagaggtatgtttcaattaaataaaaattaaaagtaaatttaggtgctgtttggtaacacttttttaat

SEQ ID NO: 119102 - DNA, 2900 bp, Cannabis sativa
attgtaactcgtaaagttacagtgggttggaatgcatagaataagatctagagaatgaaaatggtaaaggaccttaatattagatcccacctaattattttttttcaatgaaatatcaacttcattaaattaacattctgagtataaaacatttagaatagcaactggagcattaaacacagaaatactacgaccagataaggaccgtgacatcctagcaacaacatgtgctagacgatttgctgatcgtttcacaaatcgaatttttattaaaggcatagaaagtaaaagagaatgacagtcttgaaccagattcctaaagatggagcagagggatgagtgattgcgaattgttggatggagactaagctgtcagattccagttcaacatgttaccaaccttgtcgtttaatccaacttaaggcctctttgatacccataatctcgacaacctctggtccaaaagcaccatgaaagcagtgagcttcagcttcaatgagagaacctgagtcgtttctggcaaccatcccatagccatattggttatcactagcaaatagcgcagcatcaacattaatcttaattgtatttgtttccggtttagtccaaagctcagctccatcaccacaactactagagtagatataggatagagaagtgttatcctgagctttacgccaatgatcaagagcaatgcgagtcgaagataggacatttgcaacagtgagtaccttatctttccaaacaattgagtttcttgctttccataaggaccacccaaccataacaagtgagcagactcggtcagcatcaagagagtggaaaagaccatccaaccagctagcaaaagagaggtctagagagatcccgactggtagacccatatgattccaacaagaagtagcaaagggacaagagagaaggacatgtgaggttgtttcaggtgcagctcggaagacagggcaaagggagggaacatcaacatgctttgttctgagatttacacaagtcggcaaagtcccagaagcagcacgtcgtaggaagtttctaacctttggtgggatctttaattgccataatttttgccaaaaacctgaattattgctacccgttcttggatctttagaagcctgaaggatgcggtaagcacttttaacagagaattggccggtgctttcatcagaccatgaccagaagtcagaagaagccgaaaaacttaaagggatacttaaaattaagttggcatccctattgttgaacatgtctcgaaccaactcaatatcccaacttctttcatcaaccgaaaagagggaactgacctcatgcccaataagacccacatgggaagaggttatttaaggattactagaatcagggagccagggatggtgcataatactcgttgaggaaccagtacctatagttcgtctaacaccctgtcggaccaggtctttggaactccaaatgctacgccaaacaaagctaggattacgacccaaatccgccgaaagaaaatcatcatggggaaaatagcgagctttaaagatcttggaggcaagagagtcaggatgacacaggaacctccagccttgtttagctaacatagccaggttaaaatcatggagaagacgaaaacctaacccaccatcatcttttggtcgagaaagacgatcccaattcatccagataattccattgccttttctactcgaagtttttcaccaaaaccgagccattaatttctcaatttcatcacaagtgccgagagggataaggaagacactcatagcataagtgggaagatattgaaccactgtttttaagagaatctccttacccgcactagataacaacttaccagtccagctattgatcctattcaaaaccttgttcttaagaaaaccaagaataacatttttattcctcccaattatattaggaagccccaggtaaaaactattttcagaagcttcaggcatatgaagtatagagcaaatactattgtgaagttgatcatgaacatttggactgaagaaaacagatgatttccccaaattaacttgttggccagacgcactttcaaatttccgaagtagggataagacattaccagtgacaccattattagcttgacaaaagacataactatcattggcaaacaacatatgagagatcattggcgcaccttaagcaacacgacaaccttgtaataaccgctccctttcaaaccgagagataagagccgagaaaccttcagcatagattataaacaagtaagtggaaagcggatcaccttgtcggatacctcgggatggtgtgatcggccccatgacatggccattatgaaaagtagagtaccacacactagtaacacaagtcataatcaggttaacccacctttgatcaaagcccatttgaagcataactactcttaagtatccccattcaacacgatcataggctttactcatatcaagctttagagccatatatcctttcttaccatgaaccttccgtttgagatagtgcattacttcaaaagcaatcatgatattgtctgaaattgtattttatgtactaattattaactattttggtacataaaaaattagaaattcataagtaatgatactgtatatccaaatgcacattgtattttaaaacatagtggaattactatattgtagaattactacctattaattacactacctattaattacacaattacttccaaaagtatcctaaaagtagttaaaaataacaacaaatataaaatttgggtagattatttgggataatttcgaaaaaaaaaaaacacaaaaattacaaaatacggtactattgaccgagattttcggcaagtaataaaatacgattatactattgagctgtaagaa

SEQ ID NO: 119103 - DNA, 3773 bp, Cannabis sativa
ttaatagaaagatgcaatttccttagctcaaatcattcaaaagtacatcacataaactatttggaatcgtagaatccgaataggtacaaccaacatttaatcacgaaactctagccaattagtaagcaacacgattaacggatcgcttgataaaattaagaagatattattcaaactaaaaagaatccgtctgtacttagaaatgcagaacccgaaaatagaagcatatctaacaaacttcaggttgcttggatcgtgaccaaactgtccgactccaccaccacatcatgtcaccctgtttctttcaaccaactcaacacctccttaagcccgatagcttcagcaagaacaagatcaaccacccccattcgacttattgtccaagccataataaggtgaccagaagagtattgtgccactcaaccatacccatacttattcagattgctaaagatagctgcatcaacattgatttttatcgtattaccaactagtgcaatccagtactcgtgccctttgccgtcttgtaaagaaaacaaagggaaaccaaatattttatccttagaacaactccattgatcaaaattacccttagccaacaaaaccacctctttaacatttttattcttaccattccacaccttgttattgcgcacagaccacaacaaccaacaaagcataacaaatctatgtttcatcccataatcctaaaactggaatctatcatgaagccatcccccaaaagaattgtcaccaatctctaccacaaaaatactcgccatcatccaacaagcaaaagtaaacgaacatcccacaagacaatgagaaatactctcagatttgtaagcaccttggacacaacaacaaggggagaggaacatgtttcacgcctaattagacacgggtaggaagactattggaagcagccctgcaaaccaaatccttgactttatttgggaggcactctcaaatcccacaattttttccaaaagaccgagttaccaactccaactagctcacctttaagctcttgaagaagtcaatacacactctcgaccgaatatacaccagaactttcaccattgcactgccaaatatcattagacattgaggggaacaaaggaatgatcaaaataggcttaatgtccctctctacaaaaatattttaagaacctcttcatcccaagatgactctccaaccttcataagactaaagaccttttgatttgccaaactagggtgatctgaaaccacaaatgggttctcggaagccaagggtccctaattaaggatattaatactcattctagatccaacaaccataaaccctcattttcaaataagagattgtgcttcatggatacttttcaatataaaactcgaatttctttccaactccaccccaagtaggacccacaaggataataacaagctttgaacacatgactaactaaagaatcttgaccaaaatgaagatgttagccctgttttccaagcaacacaatcatgaagcattcaaaacctaagtcccccatgaactttgggacacacattcggtcccaactcatccaaggaattgcactaccatttttagccgaattcttccaccaaaaagatcacattaatttttccatctcatcacacacctttttaggcaaaagaaaaactctcatagcataggtggggagagattgcaccaccatcttcaacaaaacctctttaccagttctagataaaaacataccatcccaccctttgatctgattcctcatcttttccttaagaaagcccaacatgactgacttgttgcggttcatagtatttgggagtccaagatacaaacagttttcgccaacttccactatacctaagatggagcacacataataacatcagtattcttggtaaagaaaacagaagatttcgctagatttaccttctaacccgaagctatttcaaaactacaaagcaacgacattaccctattagcctcatcctccaatgcttgacaatacaaataactgtcatccgcaaagaacatatgggagataataggtcaaccctaaacaactttacaacctttaagccagcccctctgtacatagtcgttaataagagcagacaatccttctgcacataagataaacaagtaaggagacaaaggatccccttagcgaatacctcgagttacagtaatcagccctaaagagaaaccacaagattgacccaatatttaacaaatgagatcgatgtcataatcaactccacccgtggactatcaaaacccatcctcaagagcataaccaccaaaaaaggccattaaaccctatcataagctatagattaaagacacttattttttgaaattaacaccagattactatcattcacccccacagaactgaattcgtatgaaagaaagcatgaaccaacgaaataagatctttacctaccacctaccatcacttctattaacatccaagagtcatctcatctgggcctagagacttatctggatgtatgtgaaacaaagctcgccttacctcatcatcagtaacaggacacaataacatcccattcatgtctggatgcaatttagaacattttcccatcgagtgatagaggtcaaaaaaatctccgaaaaatacataaccatgaggtccttcaaccccaactcccaatcaaaccaagcaccactttcgtctttcaacttatggttcttattatgtcttttatgcacactagtagagacattgaaatacttatttttttttgtcaccttctttaagttaaagttgctttgatctttgttttaagaaaactttcagcttagtaagaacttcaaacagctacttctcggtttccccataccacgttaatcttcatccttcctacttttaagctgacgtaattgaactttacattccataattttattcttgaaatcaccagtatagcaattttcccaaacaacaagcacctctccacaattttgaattttctactagataaaaagattaattccatcgtcttaattttttttttataatccgaacaccaagaggctccctcaaccgtgtattttcgaaccaaaattgccaaggtccttaaaaaatctgcttaatcacctattcaagaaaaataagacaagaatcagaagaaaagagatcaaaattaaaaagttacttggttaaaaagtatctatatatataaaggagaagaatgtggcagtgacatggcggtctaaaatcacttcaaataggtttttctattttctccttaattctctctttttttataattttaaattttattttattatttttcttaatattttattaaaaaaaaattgaattaagcctaccaacttctattttctaatattttattaaaaaatcttgaactaattgtataaatttcatttttagtccattttatttaattaggtttataaatatctatattaattaagaaaaaaaatataatttaaataaaaataaataaatatcacttctaaccatgccatatatacgaggatataactatatacatgagttcctattctattttaatttttagcagctattgttgagtgaaggttcttttgaattttgacggtatgagaaggtaaaactttctaattattgagctagaacaatattaacatattcttactatgttttcactttactgatcgataaaccatataattgcaccacaggcacatgtcgctgaaatccaaattccaaaaagtctctctttttttttttttt

SEQ ID NO: 119104 - DNA, 724 bp, Cannabis sativa
ggtgaaatcccttggcgacgagtcttgctttatatctttgatgagagccatctgagttgaatttttcccgatacacccacttgtttccaacaaggttgtaatgttcagatggtggtactagtacccatgttttgttgttcttcaaggcaacaatttcagcattcatagccttgttccaattctcatcttgtaaagcttcttccacacttgctggttcagaaaataaaggttggaattttgattgagcgagaaaggttcttggcttgaaaattcctgccttgcctctagtaatcatggtgtgtgttggtgcaagaggagctgtgacagtagctcgagtttcaacttcagtacctggtatttcaacactttcaacaggaacatcaagcagtgttgcagatcgattatatggactgatattgccagaatttgcaaaattttctcctacagaacctgattgaagtgtgccaacagcttctgaagtgtgagtgtcaggcgtttgttgtgatgtaggactgtcaggttccaaggatgatgttgctccaggagttacttcagttgaggctgtggcatcggcttcagtgtgtgaaacaaagggtgtaggtaaggctgaccatgttgagctatgtacgatcacaggtgtctcagattgataattgtttagaaatccttgtttaaagggaaactcaagttcattgaataccacatttctggaaatgtaaacttt

SEQ ID NO: 119105 - DNA, 1282 bp, Cannabis sativa
  modified_base (312)..(312): a, c, t, g, unknown or other
gaatttgaaaatagtggaattgttttgtataaattagtaaggggtataaaatttgatatggggtatattattaagggcaaaaagtgaaatttccctttgtaaatgtgtgttgttttagtataaatataatgggctttttcatttttacactttaaaacaaatttttttgtatttttacgaaattttacatagaaacccctattgcaaccagcgctgcaatctaatttgtaacaaaaaatcgtataaaaacatttattgcaactagcgctgcaaccactttagaaacccaatccgtaaatttgaaaaaaaaanttaaaaaaatagtatattgagtaatttctctaaatataaatagttgcgttttacttggatttatcccatcgtcaaataaataaataattccattaaagttaatttttgaatttaaaaattctgttaaaatgcacaataatttgttaaaacacaacaaagtacaaagtaagatttattttgtgaaaactttattttttcttctattttaaaactttagaaactttaaaaaacaatatatttttaagttgagtatgacgtcaactaattatattaaaatcatctttctatcaccacactcattatacattcgtcaacataacaaataagcacgaacttggcagatatggtacccacttcccattcttgcctgtttccatgaaacttcactccaattttctctatcaatcttttacatagaaatccagcttatctttccaagtagaacttgtctcaggctgctatgcttaggtgtcacttccatagcaatatattgttgttaccatatttatggtagcattcaccaaccaatcatatattaattttggccccaaaatcaaattatcttaaagttacaattaaatggttcaaattataagagatttttgactttttatttgctatatttatcaatgaaattatccaatagtttacatatagtaagaattacttctcattaattacatatagttgataaataagctacgtctcttgattatatatacttagaagttgaagtttttcttctataaatatagagctctttcaagaatatttgtaattcagtaaatagaaattcggtgagtacaaattggtacaattaggttcagtgggtaatttgagagagagaatatttgtatatccaaactttgagaaacacttgagagatactattagtaggaaatcttgttggatatattttacgaggatctagatttactaacaattatgtttcattaacatcttaatatga

SEQ ID NO: 119106 - DNA, 1890 bp, Cannabis sativa
catttatatttatattgtgagatttttcgttatggcattcaaaattataaaggtgtaatggttatgctccattgactaaaaattgatattacatagaatgaaagatattatgttttagggtgggcgtaatttttattttacatataaaaatacgcaaaatttgagtttaaatacgtgtgtggtatgctagcatgatccatattttttttataaaaaatatagttcatgccgcactgtgtcataaaaaatatggctcgtgctgtatcgtgtaacaattttacagggtaggcctggtatgaccgtcaagcttagtaattttgtaccgtactcgaattcgtgttgttctttattcgggccaacttatttttcttgaataaagcaacctgttttcttatacgagctcaaactcatgctctatatgtttaaattgtaataaaattgatgagctaattactaaaatatatatgtattttatagagttatatgcttacatcttttttcaacaatagttacacaatcatataaaaaataattataattattaaaatttgaataatgctatcattttaattgataaataaatatttttcattgttaatattatcgaattatcatgttttttaatgttatatttttgagctaatctattcatgcttacgtgccatgctttaagactttttgtatcgtgtcgtgcaaatttgtactgtgatgtgtgtcgtgcctaagctcatatttttttgtcatgtcgtacctattattttgtgtccagtcgtgctcgtactagtttcgtgtcatatcaaaaaactcaacccatatttatatcattaatgtcggttcttatgttgcatataagaatcaaattgagaaagagattaatacatggtgtcacatagaagtgagggaaagagggagagagaggtaagaagaaaaaaaagggtaagcattttttatgaaaaaataaatactgagttgaaatatttttattattatatgtattatcttaatagattttatgtgttaacgcagattttcgttaacaaaaaataattagcctttacgtaataaatatataacaaaaataatgagaaatgataaatgtataaatgacaccaaatatttttacgtggttttgcagctaaatgtgcatactccacgagtctattttatttaagatattttctgaatacaagatacaattgatagtatctcttttttctctctaagatcttcgttcctttttctatgggatctgcccctatttataggaatataggttgtcagttatttacatttaatttaaaatataaccgttaatgaaacgtgatcaatccccacatttcatttaaatcatatgttagataatactagataaccgcttaactgcttcttattcttatcctttttcgatggtcaatcctgatttggccaaaggtatctcgctaaacccgagttaatttccttgtttatcttgatgtagaaaaaaatactaagtgttggaagataattcacctcgtcatagctcttcatttgtattaatgttgcgaggtgactgtctagctaaatatataatccgaggctgcattttgcatgcactcattctattctaaaataataaattatcttttttggttgtgtactccgaggtagatgcgtgtctcgtcaatatgggtttaatagtcttttatctttgtctcacttaaggctatatagttagcgagttatgaatattttctattaacccttttattaacaagttattcttatcttgcatttaatgacataattatatcaggtggttcatattccactgcaagtcacgtgtcacctcctgaagtgtagctgaattttgggtataacaattgtcccttaaaaagttcttttttttttttt

SEQ ID NO: 119107 - DNA, 910 bp, Cannabis sativa
tctttttatttctattaggtttgatgttgctggagcaggagcatgtttgaagcgttatactgatccatcatgcttcaaagtggatgcagcagcatctgagatgacaacaggagaggcttatcgagaaaagaaaagccgtaaagtgaaggtactataatataatgaaagatactgaaactgataagtacaaagtcctgtgttcattgtttattgcaatgtataagtacaaagtcctatgttaatggttgcaaaaacaaagagttgttttttataaacataatacatgtcacgttccatataaccatattcctgaatatcaattgctgtagcctgtaggtaatatgaattttttagtttctctagcatgtggaaatgaactaacgtggcttggtatcaacttgagaacagaatattatgcttttatatggaaaacttgcaaccatataatggcacatataatatatgttgtctttgagtgtttgacagtggaaccttctatgaggaattgtattcaatattaaatcgtccatcaaattgaatgagcttcatggatcaattcttgaattaagttatttatattttaatttaaattaacattttatttgcatctctatcctgaaacctgattcggtttttgttatttttaattcctgacttctactacaatcctacaagccttgccttttactttgtcaaagactcaaaggttctgtgagaagcctcagaagcttgaaagcttaagtcggaatgtaaataaggaaattatgatagaagtaaatatacacatgcttacttacacagcataaatgctagagatcatgtctatttaaataagtatgcagtgttcaatttatcgcacattcatatggacaagcatagattcttagttatacacaatgtactcttacat

SEQ ID NO: 119108 - DNA, 716 bp, Cannabis sativa
tccgtttttctagtagtgaaggcatataaattttcacagtaagagtatcattgcatgttgtcaaaaaagaagataccaaaactgagaaagagcttgcgtcgtaactgtcagagtgaagtggagcatcgcagcgttgtggtgcctaaccaccgtgactgacccaaaatcctcaaaaaccgtatatcaaacaccaaaaaatattaaaatcaatataaacaatacaatttaactacaaatatataaatatataataaacttatacttcaatggaagttggtaaaaacaacaaaatcgctcggtatcatttttttcaatctcaccatcggccaccataaaccacaccacaaagatgcaatttttaacctcaaaaccctaaaataaatcattttttgtaatgtagatgtgattggagattataatataatgatgatttgaaaaaatatgtaaaaaacagctaagaatcacaagttttaggtcgggtccgaagaatgttttgaaacttttgttgagatagaagacaagatgatgaggaatgaaatgaattgttgggctcaacgaagagggttttacataccttatatcttgggttattagggaataaccgaagatgtaggtcttagattattggctcttttacaacttcgcgatttttggtattttatcatgcgcatgggctattctttattttatcttcgccttctttttttttttttttt

SEQ ID NO: 119109 - DNA, 664 bp, Cannabis sativa
attttcaatggtcttaaaagttcaaagagcatgatttggtacatgtcaaagttcaggggacaaaaatcctaattagcctatatatttttatgaagcattactatttgacactttgcctaatattagttatgttcttcatactatttgttacattaaaatatttagaacttaatattaaaatacatcagtaacaatataatatttttatagtatttgatattttttttttgaataatagtatttgatattttaaagtgtcctttagtatttctctatttttattattattattattattattattgctaaataaatacaaaatcacatagtgcagagtaattttccacctcttcgatagcttagacagtcatggggacaatattctagttataagagtcttatacctcattctgtcttaattggatcatcaatactactatctatgagagttcccaccatcagtggcggacataggattcaaagtgagggggacgcaatttttttttgtaagtgaagggggcaaaaaagtaaacttaaatagaaaaaaatgcatttaatgggattagaacatttatcctctaacttatatgctaagtaagtagcttaaccattacaccaaagttaatattatgcttataaatatcatcttttattacaaatacat

SEQ ID NO: 119110 - DNA, 1365 bp, Cannabis sativa
atatttggaaataactataaatattcttaaatggaaaaataaaaaacatatatagtgggaaaataaaaaataatatgtatatatttgttaattatagaaatgtctaagttcatagaatctcttggcatttgttgcaatgctttagaatagagacaacttttcttttttgtcaatttgctatttttatttattttttaattatattataaaaaatgttgagacattaataatagattctgtggttttttttttttggtgtgtggtaagaattggtactcggaattaataagttcaatatgcaacatgcataactttctttttaggtcctcctaaaattgaaaactttcatttcttatgcaaaatatacttatacctttgcatttaaatcttaatatatatttattattattattaagggatcacttagtgcatattcttttctcactttttcagtagttttgacaagtttaaggattacgtgttaattataagggtcttataatttattctatcttaattaggtcaacgatacacttcgtgagagttttcatcccattaaggataataccagcacaataagatagctttctaaaggtttaagtataatctctcacaacgagtgattgtagtgattgtagtgaaattagaatctaaactttgagatgtatcaaattatactttttaaatttttctggtcgttaaaaatttgctttgaactattgaaattgttagattttaaggatttttgtctaattttattcaattttactaattcgatgattgtccagttactaaatcatgctccacaaacttcaatatctataaatcatgcctatcgaactttgacgtgtaccaaatcatattttctgaactttcatccatgttagactttccttattaaaattggacaaaattccttaaatttaagaatctcaacaattcaattaacgaccttaaaagttcaaaggtaaaatttgatgcatgtcaaagttcggctaataaaaaatctaattagtctaatatttttttcaccaaaattgttataattagaagttaattaattctccaattaatattgacaattaattgaggagtgctaccgttaaccttttattacaatctaaggtcaattcttgtgcccgaaaacatatgtcagaatatttttttatgccgatgtttgttgtgcttacaatattgttcctgtaaattcttaatttttttaatagtttacagtgccgaaaatacatttaaagttttttgaacattcatgacaaactgaaatattaggaactctattttagatattgtaaactatttagaattttataaaaatttatagaggtaatactgtaactataacgaata

SEQ ID NO: 119111 - DNA, 1423 bp, Cannabis sativa
taattataattattaaataaatagttttgacatttatagaattaaaactaaaaaatatggcataagtgagaaaaaaacaggttactcttagcctgattggtatagatttgaaaacagttttatcagttaaaacttaaaatttctggtttttgctattatattgtatctttttatactattgaatatgatttgagccttaaaaagtatatattttaaacactttattcgaagctactttcactttaaaactatataataaatgaggtaaccttaagtccagtagatttaatgtactcaaaggtttccaatattccaaatttgacatatcaattcaattctaagaataaatatttaatttaatagaaaatatttgagcaagattattgtagtagaatgtcaaagtttatataaatagttatacaatctactaaattatcaactaattggcagacacataaaaaatataaaatgaataatttatcatattaagaatacataaatagatcgaccatttggcatggaatctaacaaccttaaaataaaactacacattccaaagaaaaaataaaaaattgtccaatcaaacaagttgttcatccacaagaaaagcgttctcagctacttcatgatacttaaaaatgtgcaatgttactcttaacctgattgatataaatttgaaaacacttttattgattaaacctcaagatttttgctttttggtattacattatatcttttgaatatggtttgagctttgagaagtacagaaattaatcactttagtcgaagctattttcacttcaagatcatataattaaggaggtaactttaggtctggtagatctaattttcttaaaggtttctaatttttaaaatttgacatattaatttaatattacgaataaatgtttgatttaataaaaaatacaacatgattattataatagaatgtcaaatgttataaataattatgcaccctactaattaatcatcaactaactaataatcactaacaaggttgttgggcacttaaaatgtgtaaaatgaataatttattatattaagattacgtaagagcatttctaatgaagagctataaatgtagtgtattactattttttagaacattttgctaaaagttaactttaatagtaatgtaaaatgtatgccaaatttgacccaagttaaatattgtgccaaatttggtacaaaaaatagcgtgtgccaaattttagtctacaataaatgccactttttttaattacctatttgccactcattaataaaaaaatattattttatatttataagttagtaaaataatataaataaagttaattgtttgtatattttcaatgagtattaatgatattattgattttttttattgcttctcttgattctatcactattcgtaaaactg

SEQ ID NO: 119112 - DNA, 2530 bp, Cannabis sativa
acgaggagttagatagactttaagatgtctttccgtgtccaggaaggagggttgaagacgtatcatacctccagtgatctttcttgaacgaaaaacaacgtgcatgcaagagtcatgttgaattttatgtaacaagctttggcttctaggaaggaatgctgcagttgtataaaaattcaagcctagaattcgcttgaaaagatctaagggaaagcatcacgaggagtaagatagactttaagttgtcctttcgtgtccgggaaagagggttgaagacatatcgtaccctgagtgatctttcctgcacgagaaacaatgtgaatgcgggagtcatgttgaatttttatgtaacaaacttcagcttctgggaaggaaggctaaagttgtacaaaaattcaagcttagacttcgcttgaaaaggtggaagggaaagcatcacgaggaataagatagacttcaagcagtccttctttgttctataaggagggttgaagacgtatcgtacccctagtgatctttcttgcacgagaaacaaagtgcatacaagagttatgttgaattttgcttcggcttcaaggaaggaaggttgaagttgtataaaaattcaagcttagacttcacttgaaaagatcaatgggtggaagagttgttgggagtaaagtagacttaacccttccattggaaagacggttgaagacatgctacactcccaatgatcttccacgcttggagaacaggttggggcgcgtctcctgagctctgggggaggtctaggaggtgtatggttacacccaaaaggtgcatgcttacaccttctgatctcccgggttgtctgtcttccttggcgaagcgcagggcatttgagggtctctgaagcagagactcagaattccaacgggataagtatgtcgcaaggtctccctaattggtttataatgtctcgagttgcttccctctgatgtaactccgaggttgtagttaaaccaggcagtgagaacaacatggggtgaactttgccaaaagttgcatgcttttaccaatagtaccataaccaggtctcacttgtgacccaacagccaccgatggtactaatggtctcctctctgcagctgccatcgcagtatctatgtctgagaaactttacagcatgcaggaaaggcagggaaagtagttttcggaagacagatccagccctcctatcggcactataaccggagtctccagctagatagagtcgttgcatctgacgaccttgtctaaggtagtcgtcgtaactgtgttgggtcatcgctccttcgtctggcccctgtacctttcgccctgctctgtttgtgcatggcaagacggtgggggagctgagcctggggatatcgacgattaatcttgcccttagagggtgggctcgccaaatctgagcttttaaggatgaacattggtgcaacatgcatcttagggcttcacagacccatttttaccacccatcttgagtaaactgaggcatcaagtctctttctgggcaacaccatggatctgcacatttgtggcctttggccagacctcgacaaacaatcaggaggcctttcttcttttcttccacgaaccttctttcagatggccttgcattggtaaccgtcgtgcatatctatttcttcagctctcaatgaaagtaccaaaatgtttactaagttttttggcaaccacataatattagagctaagaaagtaatgaaggcatcaataataaaataataaacaagagattttttcatggttcattcgttaattatccttagtccacgtgtccattttattaggctctttggccggtgattatgcatacaaatacaaagtgatggacttgactccactctactgtgttcctcttgaagaagaagaagcttagtaggaatattgtagagttgataatggagttacagtaatgtgtttacagagaataccccttcagtttttaagagaaaagccaaaaaagaagaagtcaaggattagaatccgaatccactgccttgtgtgccttcaggtgtatttataggttgatcccctcgcatgggccatcttgggtaaattttcacaaagatgaactcccaccgttggattggtaggtggcatattttccatgtggcctttaccgatgtgagattgtactggttgtactggcggtgctttggacgcgtgtcactctagggatattctcattcggattaccttagtccctagccgttagatcgtattgcacagtacacaaggacacacatgctctgcgtggtggcttggcgtgggggacaacttctgacatcgtaccaaaaagagctcttccattgggtctgtagcctatcatgcctgcgcaaagcttctgcgggtttaaggtgtatcccgggctagcagttcttggttgaagatccattttccttgcaggaacgtagggtctcagcttatatagtcgagtgagtctctggctcacgggcgtcttccatggggctcgcatctgggaaagcttctcgtgcgggaatttg

SEQ ID NO: 119113 - DNA, 1363 bp, Cannabis sativa
  modified_base (1320)..(1331): a, c, t, g, unknown or other
gggtggcaaaacggatttcgacacgacacacgaacacgaacacgatttttgacattttcgtacaataaaatttcatgtcaaagttaaaagataagagttttatttgcaccccacaaacttataaatgcatcatattttaataatttttattttacataaaatatatatctttaattatatatatattttttaatttttttctctcaatttatattttcttaaaaatatacctattaaataaaaataaattatattttaaatattataataataaaattttaattgaaaaaattagaaaactataaatgattttaaaaaaattataaaataaagttaaaataagtattgaaattaacacgtgagaaaataattcaaaataaatattaaagataagttttaaaagttattttaagtttaactttttttttgaatggaaaataaattttattaaccaacataatcagttaccaaacaatgtaacaattcggtaggaacagattccataccaaaatgacaactaggaaataacatagtttctcttgtaaagttgtgagctaccacattagttgatcgtttaataaaaaaaaaacagaaacattttttaactctaaaaagagttgtttacattcaacaatgatttgtcaaaacaaagagatcatttgaattgagcttcggagggcttgaactaccgtcaggcaatcgtttcgatgatcacacgctgccagtgatgttttttagtccaactcaaggcttcacggaccccaatcaccttagcaatttctggtgtagcagcgcgacaacgcccatgaagaattcagttcggccttccaataaaaaaaccgtgatggtctcgtgctaccagtccaatgccgtagctgtttctcccttcgaaaaaagcagcaccaatattgatcttgatactgttttcaattggagcagaccattactcaattccatcacccgtttgaagactagactatgagagttttttaaacactaggaagtacatcattttgggagtgcaattccatattcctccactattagtatgagagcattattctttttaaaggaaaaaaatggccatgcatgcatgacgtggcatcattaggattaactggaatgttcgtttttatttatttatttttaaagaaaaagacacaaaagtttgattaatttatgcttatatactttcaatttcttattttattgtttggtatgtggatttcactgatgtttacaataaatttaaaatttaaatattttaaggttgtttacattttaaatattgacacgtgaaagtgtttttttttttttttnnnnnnnnnnnnaaaaaaaaaaaaaaacaacatttttttttttt

SEQ ID NO: 119114 - DNA, 1492 bp, Cannabis sativa
  modified_base (1428)..(1433): a, c, t, g, unknown or other
cctagcggcatacaaagacttagcgaatatttataaattatctgatccacgtgtccctatccggttggtccacgtatattgggcgaaatcaggggcaacaacccttaacctcctctacatcctccatttgtttgatcattctctctaccccgactcagggatctaattcatcttcaaaatcctcctagatggctttaactttcacttgaacttcagttccaagagcaattgttgcttcctctcggaccatgaacacagtttggactgaaacattgtaacaactccttgcacttctttgatcacctctgactactccaacacttcatgcacaaatgtcttcttagagtcactgctccaaagtcaaccaggattggtcgtcctagtatggcgttgtatgtcttggaataatccaccaccatgaaggtacagtgattgaaggcacaagcattgttttctattttaagtgtgattggtagttggatctttcccatagacatagagcatcaccattatggccatgcaactgaatagggcaaggtgataagtctactttcatgaggccaatcacttggaacgtaaatttaaacaggatgtttactgagctttcattatccaccaagactctagatactctcttgcttgcgatttgggattcaatgactaaagggtccttgcgggggaagtgcacatgtttggcatcatcctccgtgaatgtaatgggtaggttcatggtttggggatgttaggctggtgactgcacaagtgcacacatctccccctctcagtctaactctttcaaatatcttatttaggaattcctggtacttctctcaatgtgtattcctccagagaatgtggctacatgtccatccactagtggcggagctaaattgggggggatgggtttctcggtcccaaaagctaataatgctactatagccaaagcttgtggagcaggagtgttagaagttatgatttgggagcttgagggtgacctaccccatgtagaggatatatggtaccctgctgtcctggaatgattaactgtttgtgagtgaccccctgtccaagatagataataggaatccagactcattgccccaaatgttcggctcttaccagcgtcttaatttcatctttcaagtagccacattcattggtggagtgtcatacctctccgtgatactcgcacctcttacttggatctcttttgaacttccccccttcaggcattctcgggggctttcgatagtggaccatattgcatgttgctctgtacacaactctcaagtatctaacaggctagagtactcaatgtacttgggtttatgctctttctttgacctcttcgaagcttcatgttacgaattttatgaacactacgcaatatacgcagtcaagtgagctcacgcaagtgaggtcgaaccnnnnnnaattggattaattaccactaaattatacttatgattctatttggcaaatcaatactttt

SEQ ID NO: 119115 - DNA, 649 bp, Cannabis sativa
atctcattgtccattgatgataaaatggacaggaaacaactagataaaaaacatattaaaaaatacatatagaaggtgtaaaattaattgttattttggtcagaaattaagtaattacctttttgaataaagaaattatgtaatttcatgttatcatcaacgttgagattagaacctcactcgtctttttcaaacccacagaattaaaataatatttactaataaataataaattggaaaattaatttgtcacctcacgcacactatatatatacatacacacaaatcgtcttcaatcactgtttttttctctatatatatttttttctcagttgactgtaaagaatcgaccagaatcggttagagagctttggttttggcgttaatggccgaatccaatcgactcggccgattggccttgatcagagccaaaagatttccaagtctatacttcttgaccagcgcaatcatcctctgctcgatctgctacttcgtcggattctaccaacactacaaaggcgtcgcaacctccgccgcctctgatgtcgtctccggttcctcatgcatgctaatggagtgtgtgagtggtatttgtgtaaataaaacactataaaaagtaaaaaagtagtaggggccgtgtgaaggtatt

SEQ ID NO: 119116 - DNA, 1074 bp, Cannabis sativa
tcctagtaaaatatttccaacaggctatgcccaaaaaataaaatcaattagtaaagtatcaacgattacaaaagcaattgacttaaacaaatttaaattcactccaataatttgctacaactctttctaatccaccttgctaatttagtctctaaactactaggatttatgccctaaaaataagtaattaatggattatatattagatattatatacagttataagataaatgatcacattaattataatagtataattattaaatatttaaaaatttattattcatatagagaaggtgtggtcttgtaaggatgtacaagaaaattaagattatacaatatgaatataataaatcgccagtgtattaaaatatcaagaatcttttatatggaattgctaagtacagtttattacacattatacttctagtatgtgtgattttaatttggctcacatatgtagatagaaatatagtaaaaatattgtgtataatttgattattcatggctgggctaatatgtaacaatatatttcattaatatgtcgtttgtcatgaaagagttatattatatcataatgatgatcattagtagattagcatgaatcttaagtatatgtaaactcatcgttaaagtttttctaattcttataatttctattttaagagcttaataataaacatgttatacaatattatataaatttgtaataaatagattatattggtgggtagaaattaagagggacgtgtaaagtgtgatcactatattgaggaagttgcatcaactatgaatttagtggcatgcatgaattaaaatatatttattgtttgtcttcattcacaagacttggcaagtctactgttttgtcctttctttatttgtcacatgttttatgtcttaactttacattacattattggggcaattgtagaaggtaaatttgatctttcatacttcaaaataacatatggtgttattttgacccaaaaaattacacattgtgtaaatatgcctattttgtcatgggaaccccaaaatgccctccctatctaacagcctccccttctctct

SEQ ID NO: 119117 - DNA, 539 bp, Cannabis sativa
tagtgagacaaatctttggagacgatttgggagttaagattcttaacataaacagaattccttatccccatcaggatagagttttttggaaaggaagaaatcacggtcgtttcagtgttaaggatgcttatctagaggatcaaagatttcgatttagacccagaaaagatttatggaaatggatttgggatcctggacttcaccccagattatcgataatactttggaaggctattaatgatgctctgccaactggtcacagacttgcctcgtttacaagcttcggatgtagtctttgtgggaatgacgtggaagatacgtttcatctgtttaaagattgtgcctttgctaaggcaatttggtttgcaggcccttttcctatctcggtggatcgtattgattgcaacaatttggcccaattcttagagattttagtctcgatgcttgctagtgttcctagattggaggtcataacatatgttggttgtgtgtttcaacagatttggaagtgcagaaacaaggttaaattcaaaggagga

SEQ ID NO: 119118 - DNA, 700 bp, Cannabis sativa
ggtcctgtggtctcttaaaggtcgttcgttatacccacacttttcaggcccaaacgtaaggagagtgtattaagatagttagtctcacattgctaattgtaggaatttttattcctaactaatccctacacacagcaaagtaagtagtcaaaagcaaggtcaatttagacctttactcagtcaaaccacctttttgactccctgccattaaatcaaacgacaacccctatttccaatttatacaagtcgtatgtatatcaatctgaaaccctaaagacacacatatatatattctcttttggcatttaaacacatacggcacaagcaaaataaaccctagcagatctccttctttgttcttctctctgaagaacacagagacatcaaccagaaaaataaacccagaaaatcaaccccctacccagatcaatcacccccaaaaacttaatcccttaaacccgagcaccttcttcgttgttcttcactgaagaacacgaagaacaccacagataatacccagaaaaatagcttccccaaaccgattttaacccagaatttataaacacaaacaacaaagatgaagcagaaaagtaaagagaagaaagatagcaccggatttatagaggttccccaatgaaatctgggtacgtcctcttgagctcgcctcttccactatagatcttcaatgatcaagagatta

SEQ ID NO: 119119 - DNA, 974 bp, Cannabis sativa
tatttttgaaaaaaaattcgtgtgacagtatttttgtaaaagttaactcaaattctagtatttttgtaagttttcctattttattagtatataatgaatcaattaaaaaaagactaacagatttagaaaaaaacgtgaacttgaagattttaccggtaatttttgaagttaaaacttatgagcatcaaatataaatttttgagagcttgtgttataattttctcttctattaataatataaaaaagacttaatttagaatgaaaaaaatgagaactttatgtttgtttttatctcactattagtaaatcaccctagccatcaatatcatcaatttaattattttgttttcttgtatagattattattgacttttgaattttagttggtcacgaaatttaaatgaaaagaaagatatatgaatcttattgactaagttttcttaaatgaaatataaaatatgctgttatttcctcaaccacatatgaaaaaaatgaaacattaagagatagatatttgtatattttaatattaagttacaacttatatattttaattttaataaataatataaaaaattgttgaaaaattataaaatggtatatgaaagtaatgttaggcataagatattttatgctctaaaaaacatatgtttatcttgttttatatctaatttttatttacattttgttttgttatttttttattttattaaagaaaattgcaattttgtttaccaactaggaatgtaaaaaaaaaaaagtgtcatcaactttctaaccaaggaataacaatagtgcatattagggatggtttttaaattactatttctatcttctttaaatatagttaaactaagcttgtgcctaaaacttgtctagggagtccaaaatttttctttttttagaaaaacataatgcatgtttgacatcataactaaaaaactgttttttgtttttaaaaatagaaaattatt

SEQ ID NO: 119120 - DNA, 1597 bp, Cannabis sativa
aaaattccatatttgaatatttatcatctcatcaattattatttttcttttttttgaatattatatgatatatatatattataattatttaagttttaaaacattattaaatattttgataaattcaaaataatttaaaatacataaagttggtctaatttatttcacatagtgcacatataaaataaaataaacaagcgtaataaatgtttaaatcataattttagtattaaattattctaaatttctttaatttttttttttgagatgaaatttctttaattatttgtaattatataattatttaaaattgaactatatatatactaataatattatatacaataagcaaaaatatagagaaggaaatgaactatataattggtcctattaattgtccttgtccttgttgttttcatagatatatattatatattttatcactaaaccactatactatatagtccgaagaaaatcatgacaaaaagtttgtatacgtagctgtcatttttttggtcaaacgaacgtgataacattgaattattttctttcgaaagaaaaaaaaaaatctagtagctatagccttacgagtagaaagtatacctttttgatatatatattttttgtagttatacaaaaaatacatatataacgagaaatatatatatatagggattgaaaaagatataatacatatagagtcaattgggtttggtagataacaatggtagtgatgtattattttaggtatggcgctcttgtgtaacattcattggttaaatatatatatatcaccctccaaaacttttggatatgccaaaggtgacacaagtttttgatgatgattaatatgtaattatgtatagctagatttttggcttatatattaatgatataagttaggttaattaagaggttggttgtctgccctaattagatcgagatgagaacagataagctttgagttcaaatacaagagacaataaaaaacatgacgaaggagagaaacatgaagtaatattattaggtctattatgtatatttatatatatgtgtgtatgtgttaacatagataaggtttatgactatactctcctttgcctttctatatatattgatgaatgatgatgatattatttgatgatgtgaggatctttatatatagacataaaatatatatatatatatatatatacgtatatattagatcgtcctagtatattcattttcatcattacttgcgtcacaaccatatgtataaatataaatattaggctattactcaattgtataataagatatccaaattttcatagaaaaatatgtggaattaacatttgtttgtataaagatgtatctaattaataatgtataaattgtgagagtttatttatttattatttttttttttttgaataaaacataaactttcattagatatagaaagatcttccatttattgtgagagtttaattaaggggacgtttagtatgaggtgtttaaaataatttgattatagggaatattatgaaggagaatatgattatagggaaatatgtaaactgtgtttggctgtatagggtaatatgtaattata

SEQ ID NO: 119121 - DNA, 4554 bp, Cannabis sativa
  modified_base (3976)..(3976): a, c, t, g, unknown or other
  modified_base (4096)..(4098): a, c, t, g, unknown or other
  modified_base (4187)..(4189): a, c, t, g, unknown or other
  modified_base (4403)..(4407): a, c, t, g, unknown or other
ttaaatgttatttctgagctatattaataagtaaatctgattatattgaaatgaggtttatttagggcataaatcccaacaggtattatgttgactactttaattgattttggtgctacgcattcttgtgtgtcgagtagagtgaattaaatctgaataagcctaatgatgttttaccaagtggttttggcaccttacgacctactagagaattggttatcttcaacaggtgggttaggtcttttccagtgcatgtggagggtagagaattgttagtagatttaattgaactaaatctagaagattttgatgttatattgggaatggactgcctaacaaggtataacgcaaccattgattgcaagagaaagatggtaacttttgaacctaagggtgaggacccatttgtgtttgtgggaaggattcaaggatcgtgaattccaataatctcagcgcttaaggcaagagatttgttgtgggatggatgtatcggttatctagccagtgtggtggataccacaagggaagtaccaatatgacctgaacacgttctggtggtacgagagtatctggatgtctttctagaggagctaccttacaaccaagatgggagattgacattgaaattgaattgatactggggggcaaaacctatatctaaagcttcgtatcagatgccacctacaaaattaaaagaattgaaggttcaattacaaggtatgttggatttgaaatttactagaccgagtacctcaccttggggtgcacttgttttgttcgtaaagaagaaggacaaaatattgaggatgtgcattgactaccgagagttgaataagttgacagtaaagaacaagtatcctttgtcaaggatagatgatccgtttgatcagttacaggggaagactgtcttctctaagatcgatcttcaatctagttatcaccagatgaggattcgagaggagaatattcccaagacagctttttgtactcggtatgggcactatgaattcctagtgatgtccttcggattaactaatgctctgacaacatttatggacctgatgaaccgagtattcaaagactttttagatgattttgtaattgtcttcattgatgacattctaatcttctctgatttagaagaggcacatgagaaacatcttcggatggtgttacaacatctttgagagcatgaactctatgctaaatttaagaaatgtgagttctagttgccccaagtaagcttcttagggcatgttgtaaacaaggatggaatcttaatggacccggtgaagactgaagcggttcgggattggccttgacccaaatcttctaccgaagttagaagtttcttgggattagcaggatactacaaaaggtttattgaagtgtttgccaatatttttacaccattaatggaattaacttgaaagaattgtaaatttgtttggactaacaagtgcaaagtagcttccaggagttgaagcagaagttaattaccgcaccagtagtaaccttgccgatcagtgaggagaaatttgtaatttactatgacgcttcaaagcaagggttaggttgcgttgtaatgcagcctttaaagttatttcctatgtgtctaggcaattgaaagagtatgaacagcgatattccacacacgatattgaattggcagcagtagttttttgctttgaaagtttggcatcattatctgtatggaaaaaagtaagaaatttacatggatcacaaaagcctcaaatactttttcactcagaaggatttgaatatgaggcagcaacgatggttggaattggttgaagactatgactacgagatcctctaccatcctggaaaagtaaatgtggtagcggatgctctaagttgaaaaggttcggaggaagtatatgacctgaagaagatctcactagaattggctgaggatatgaccagagcaagagttgagtttgtatttgggaaactagccaacattagattacagtctaatttgctaggaagaatcaagacagcccaacaaagtgatccagtgttacaagagtataaagaaaaatttatggttggatcaacaaaggatttctcaatttcatcaaatggcttattgcagtataaagacagggtttgtgttccagccgacgataatatcaaacaggaaattctggatgagtctcataccatgccatattcattacacccgggaacaaccaagatgtatcaagatgtgaaagcagcgtactggtggccaggtttaaagggtgatatcgtggaatacgtgtcaaaatgtctaacttgtcaataatttaaagtagaacatcagagactagtgggattactttaacctcttaagattcgtgagtggaaatgggaggatataaccatagactttgtggttggattaccaagaacaacgaggttctatgattctatctatgtaatagtggatcgatatacaaaatcaacacactttttaccagttcggactacgtatacagtagatcaatacgttgatctatatgttaggagataatttggcttcatggtgctccaaagtcgatcatctaagattgagatccaaagtttacatccaagttctaggagagtttacaacaagcaatgggtactaaattaaagttcagtacaattttccatccttagagtgatggtcaatctgagaggactattcaagatacttgaagatatggtgcgcacatatgtattagactttgaaggttcctggaacaagtaccttcctctgactgagttttcatataacaataattatcaaagtactattggtatggcaccgtatgaaatgctatatggaaggaagtgtcgttcgcccattcattgggatgaagtcagtgaacggagataccttggacccgacgcattccaaagaactagtgagaccattgagaagattcgagctcgtatgcttacctcataaagtagatagaaaagctatgttgattcgaagcgtagagatattgagttccaggttggggacttcatcttcctttgagtaccaccaatgaaggggatttagagatttggaaagaaaggaaaagtatgtcccagatttattggtcatttcgatatactggaaagggtaggtcaagtagcctatcagctagccttaccccctgctttatctggagttaacaacatgttccatattttaatgcttaggaaatatgtgtttgatatgacccatattctgagttatgaggacattaaactttagacagacttatcatacgaggaacaaccagttcagatcatggatagtaaggagaaactattgtgaaacaaaaccatttcgctagttaagtgttgtggagaaataacaaggttgaagaagcgacttgggagttagagtcgcagatgcgggagcagtatcctgagttattcatgtaaatttttaggacaaattttttgtaaggaggggatagttgtagtagcctgaaaattatgattatgttaaattggacatattttattaaatatgtaattatatgaatattagagtagggttataatcttacttaagccaattatgagttaattagtattttttgagtaaatgaataatttaccgtaatttattaattactgagattttatcagaatatgttggtattttatataccatttttgaaataaaacattttcaggttcgacgacaatagaaactcgatgaatttgtcaaagatgccacgacaacaatagaatgaaatatattggaattatactggactagtttagaatgttgagttgtcggtttaatcgggttagctagtaatgaccaaaatacccttaggttataaattaccttaagtgtttattggaggggtaaaatagtcatttaattaggttttagattatttgtcctatatggttgtgctaggctgaataaaggatttatgttggaatatattttaccaggacctagatttactaacangtatgtttttaacatcctaaataatatgaatttctaaaacaatataacttaaacacatataaagtatgagaaaccttacattgattgcaccgaaattaaatgactccttctgctcagatnnntaacccttgttcctttctatcgcagagtataattaagatctgagcccgacactccttatcagttgtttgaattcttcacagtcttacannntatgattgaggactaactttctatgggtggacatgcactcaatcactaatgctcgaatttttatgtgaagaactctataggattttgaaaattagaagagagaaaaagaagaagaagaggaagtctcaaactctctagttgtctgataagatataaactagtttagagtcattagttggattatggaactattcttttctttttatactaattnnnnnagggttaggattgaattatatggaataaaaaatgctaaaagaatagtaaaaatagggacttagtggccggccatgatgtgggccctacactaattatatttttgctatttttctcaacccttaatctattatttcataaatgccata

SEQ ID NO: 119122 - DNA, 1822 bp, Cannabis sativa
  modified_base (109)..(114): a, c, t, g, unknown or other
attctactgcaatcaatgtaaggttttcttaacccttatgtgtttattttattattttagagaattcatatttaggatgttaattaaatatacttgttagtaaatctannnnnnggtaaaatattcccaacacaaagtccatgacacatgttcgcaataagtcctctaataatcgtatcttaccatgctatgtggtacggatgcactttttttttaccttgagtttagatttaggtgtgttggcgacctaaatggagaatgatcaacgatcctgggcccttaagcttccttcaaatcctggtttcacctagttgtccttctatggtgttgaggagttgaatcttggactaaagaaatcaaaaaatttggtgttgtggtggtggttcttgcttgctcgagagaaagaagagaaggagagtgtgatgccctaatctatagggacaccacatatgtggttttagaaattagtttaataatactagattagttatttattaaaatttgtgataatattgaaaattttactcaaataatatcctagtaatgaacaaaataacgacgctaaattttgttctggagatcttctattacaaaagttttacaaaaagactatatacaatgataagtcaaaatacacaatagatatagtctaaaacaaattctggcaacttgaccatacaagccaaaaaagacaatatctacattcaccgtagaagatcgtcgtctcatggctgctctaaatttttcttgctcttacctcatgttttagtttaggtgtgttggttgacctgtatagagaacgaccaataatcttgggtcctcaagcatttgccctttcaaggattaccacctagctactaccagggctttaaacacatgtttttgggctgagaattaaagaaaaattaatggtggtggggtggtttaatcgcacgaaagagagagagagagggagaggattgggttttttaatattttttaacatgtatatatcagattaataataataattataataaaacttaattaataaaagttattttgtcatttcttaaccactaagaaatctctaataccgagggcattaagtcaaccccaactacctctaaatacatcggtaattctaatatcaacttaccataacactcccatcaaaaccactaactaaacctgttgtgacaattttgccccccaatcaagtcttcaaggtcactaaacctaaaaatatttttattctccaaatagctcacattatattcacacattttatataaatcttcgtagttaataaattacgcttttttatctacttatgaaaaaatttatcatttatgctaaaatagattagtaggatcataatctcactcattacgacctgattaactaacccataatatatagtaaatcctaattattcacaattaggttttccgagatattacaaccatcccctcatacaaattttgtcctcaaaatttacatgaataacttggaatactactcctgcatttgtgactctaactcccaagtcgcttcctcaaccttggtgttcctcaacatcactttaaccatcaaaattgtcttattccaaagtactttatccttcggtctaaaacctaaacatgttgcccttcataggataagtctgtctagagctcaatgtcatcatatcttaaaatatgtgtgtgatcagacacgtactttctcaatatagatatatgaaatatgtccccggcaacggcgccaaaaacttgttgcgataatttgcacacgcaagtatacgtatcgtttaaagtagtagactcactaggagtgaggtcga

SEQ ID NO: 119123 - DNA, 1023 bp, Cannabis sativa
cctttcatgccaaatactccagcaaagaactaggaactgctcaaattctggtgtggatagtgttgctgagagctgaagcaatatatctgcacaagagctttgtcctgtatttgtcagattaatgtgtagattggacaaactctagacagatttggctcttggacagtagaacaaagcatggtttattgtttcttcacaagaattacagattgagtagtagggtgaagtggcaatatgtcttcgataaagttcggctgcagcaggaagagacgtgtgaaagattttccaaacaaatattctcacttttggagggagattcatcttccaaaatgttgaccaccaatgttcaatcgaactgctgcaatttgattcttcctgttcagcaagtgtgacagcaagttgatatccatatttgacgttgtagattcccgtgaaagagttattccataccagaacatcatcatggggaaataagcttaagggaatggtaagtatacgatcgatgtcgacttgactgaaattagactgcagtgataacagatcccattgtctttgcccatcaattaagtctgcaaccatcaaattggggtctgaccctttgaataaataaggcttaaaagtagtgtgtcctggcaaccatgagtctaatttacaattgatgtttagacttgatccaaccctccatcgtagacctttcaagagtagatcctttccccaaataatgcttctccaagttagagaaggattagatcccagagcggatttaagaaaatcaccattggagaagtatctatgccttagtaggttgtttaaaagggagttaggaaactcaatgatatgccaaacttgtttatccaagagcttggttaaagtgtatgaaattgcaaaatcctagccctccttgaactttagccttgcaaagaaaattccagttcttccagtgaatggtcttgcccgaggcagaagatgttgggtttttacaatctgattagttatcaatataagaaatttgaagtgatttat

SEQ ID NO: 119124 - DNA, 2195 bp, Cannabis sativa
tagcatatatttaatcaatctcttattttagtccttgtattattttacaatagagttgtaataaatcttgattttcttccattgttataaaatctctaacaaggacaaggtcttaatgcaatttcgtatgtttaaatttattttggatgtgttctcgccgattgttttctgatttaatatggagaatggtatatatattgatgtgttcccattcttattactcgagagttgagtgtgtggtggtgatcattaatttttatttcccttgctttgattatattttacgcgtttgtgttagcgtgaatagttattagttgttgctacacgtgtgatgtgatcatcatgtgaggactaatcattatttactaatgctaaatgctaaaacacatcaataatgcttattacactactataatgttgggcattcctatccgtcaaaatacacatagatctcatactaggggtcttattgaggttgacttttagttggttattatgttgttcatatatattctgcttttattggttttactgctatttttttgggtcagtacaacacttaattttatattattttatattcttttaattaattaaacacttactttttgaatatatgtctcaatatcaattgaaggtaattataatttcaattctaagatattttattatggtaataaaaacatgattatcacctctagtgtgcacatacattgttattttttctgcactgacctcttacacatttttttaccagcggccaccatatctaaatcttcaacgtcaattggtattgttctacttgattcaaagccaggtattacttttctactaatattgatctaaatatttacactaatgtaaatattgtgttacatatatgaaagataatatgaaatatcattcaaaaaatccccaatacattttccctttattttatacttaactaactttttgtaaactacatcaaacaacaccagtaagcatgtaggtttaatcattcaacaatagatctttgatcacattatcaaaagttggcatttaaatagacactttaaactaattaaaagaaataaaaataggaatagccataaacctcaataagatcataattttctttttcactattcattatcaattacaaatcataatgaaaacactcaaataaaataatatgaaaaaatggcatggagatgacaaatttctcagaatttgaaggagttttttgaaagaccaactagacaaacacctaactgaattgaagagagtatagctgatggccaacaggttgtttaactaaaatatggccaacagctttaatggtgtatggtttgtaattcttcaattgatgtggaaaggcatgctagagactttatggaggctgctaaaaagcttcaactccatttaattggcctgcaacgtgaagatgaaccactgaaacactgaggaaggtaattgcatgattttttggttggccatttttctggggtttgtgagttaattcagcattttgacttttgtgtacctatcatcctttacaggagatagctgtgatggaagaagaattgaaagttaaaactgagcttatcaacaaacatgagaagttgattcaagggtggagaaaagaattgaaagaccaactagacaaacacctaactgaattaggagagagtatagctgatggcgaacaggctttgttagaagtgaaagtgttggtctaggatcgacgaaaggaagacttgtatgattatgttttaataagcaaatcagtttttctttatcgacaatcttgttttatgtattgtgataacagttgaattaaaattagacatagaaacattagcttttgctctctattggactttgttgcttagggaaacttaaggaattaataattcatgaaagaaactctgaagttcgattatgtgtgagtgacagtacaagtcacgagaacatactttttctttatttccaagggaaagaaaggatcgaaagagagccttcttgtgttgtgtcaaaaaacttggccaaaccatgcatctatctttaaattatagtgctaatttttattgtttctttaaattatagtgctaattttattgtgtctttaaattattttgttatgacttaaatatacctaattatattttactaacaaaatatgatagtacacatattactttaataaaataaat

SEQ ID NO: 119125 - DNA, 1902 bp, Cannabis sativa
  modified_base (1849)..(1859): a, c, t, g, unknown or other
gtaatgggttttatttagggcacaaaatccaacatcaacttggaactgggtcccaattatggtccttcagaagttccatttggtccctataaatagttgaatcttaatcttttctagaaatagagaagattctcagaaaacaccatcagaatcgccttaggttgacaaaatctcaacctgggtgctgggccttgcttctggcacccaacaagtgctttttcttccccaaaagtacctattctcccaatttttgatggaggcaaagatgatgaaaatttttcatcgtcgatctcatacttggaaggcacccagattgacgaattgtcaacctaggcattgaggtgcccgagcaccgagtgctaaaaaatgaacttgctctgaatctgatttttgattttgatgtctgaaatatgaaatatgttgtctatggtctatggtatgtctagttgatgtcctaatacaatttttgacccattttcactaagacggtcccaaaaactaaaatcctagttgggaatgtcaacttgggagttgggtgaaaccctaggtacataggttggcttctgggtagtaggttcgtgtaatttcagatactggggatagaattaggttgctccatgtctttatggtatagaatattgaaagatagtgagtttgattcaagtcattgaagttcgaacttccatcctagctctcctgaagtcaacttgggcgcaaggctagggccccctcccaagtcaactgctatgacttgggtctactcaactccataatgtcatccttctttccacgtgtcaaaaattgatgttcacgtcactaggaaaagtttctgggttaataggtgccttttgaatcggtcgactctactccgcgaatcgactggtcagtcttgccctagggctcgagcgatcttatcttttcatagtttttatcataatctttgtcctaagcctcattttcattctcatcaagtccttcactgtcatcctctttgaggggagtttcatcaacaagcttctctagctacaggcccttacgaaacagacgactggccatctctaatgcttcaatgttcctcatgacgtccctagagcgttcgtttgtagggtccagttcatatcatcaataatttcatcttctcggtcttgacgagcatggggtctgaccatagttttgagttacaaccattgttgtagatgacaacaatggaggatactttcttcagctctcaatgaaagcaccaatatatttattaaaattttcaaaaaattgaattgataataagttgagctaaaaaaaattaagaaacaaataaaaagaggatttttacgtggttgaggtgttaatgagccttagtccacgagtcaatattattgaagctctttggctataaagtattttacacaagtgttcttgtaaaatttatacaaagtttctagccaatgttcgtaacccaatgcattaagagataaagccttatttatatgccataactaggtttttgggtaaaacccacacacaataaggtttggtacatagaaataagcccactgattggataaaatacaatataatattgaccttgagcctagtagatgaggcctaattgagatataaccatcatccgtacaatacagtattatttgatgttgatagatggccatgcgccaacgattgtgtggaatactggtcagaggagttgacgttggataaaaggtaggttactttttgtgttgtgcatatttcccatgaatgatgtggtggacaagcccctaattttgtgggatcttgtgtcagagacatgccacatcagatagatcctagaaggtgttggaaatattttactagnnnnnnnnnnnactaacaagtatgtttcattaaaatcctaatatgaattctaaa

SEQ ID NO: 119126 - DNA, 2055 bp, Cannabis sativa
atcggttacatgaggatcacatttattgttaatccattatttacacattgaattgcaatgactaaactcaaacaacgttaacattaataaaggaagttaaggagagtgttctcagggaaggggatttcctttcccagcagcaagcagatttccttttgagagaatacaaccaagaggaagttaaggaggtaatatttgctattcctggtaacaaggctccaggacctgatggttttgggagttcattttttcaaaaaaattggagcattataggtactgaagtagctgaagcaattattagcttacttaaaacagggaaactgctcaaggaaataaacaacattgttctaacccttgttcctaaattaaaatgtcctaacacagtgagagattacaggcctatcgcttgttgcaatgtgatatataaggcagccaccaaattaatttgctcgcgactcaacaatatacttccacacttgatagcaggtaatcagggaggctttgtacaagggagattcatagcacacaatgtaatgatatgccaagatctagttcgtcattatggaaggaagttgacaaagcctagttgtgttattaagcttgacttgcaaaaagcctatgacacgattgaatggaattttattgaagaaatgttgtttggattgcacttccctgctcaattcattcaacttgtaatgctatgcatccgatctcccaggttctcattgatgattaatggatccctacatggatactttgaggcaaaaaggggactaagacaaggcgatcctatgtctcctttgctttttgtgctgggtatggaatatttaacaaggatcatgaggaaacttgggcagaaaactgacttcacttttcaccatagatgcaaagatctggctttgaatcaccttatgtttgcggatgatgtcttgttattttgcaatggtgatttcaagagtatcatttacttgttgcagggtcttaagctgttctctcggacttcgggtttgcaacctaatccctccaaatcagctatatattgtcatggtatgactcactcagagattcaacgagtgcttgatgcttctggctttcaaagaggtgaagttcctttcacctatctagggatcccgattagtccaaaaagattgtcaccgaaagattgttctagtttggttgaaaagatgactcagagaatcagagcttggagtactcgacacatttcttttgcgggcagagccgtccttgtaaactcagctttgctagcaattcatacatattggagtcaagtcatgcttcttccaaagaatgtaatcaaagggatcgaaagcatttgcaaagcttttctatggaaagggcaacatatgatgacaggggctgggcaaatcgcttgggaaaatgtttgccaatccaagcaagctggaggtataggtttcaaaaaagttgctgattggaataaagcggcaatgtttaagtatatttgggcaattgcaactaaagaagacaacttgtgggtcaagtggatacatagtgtatacatcaaaggcaaggattggtggagctatgagattccccaaacaggcagctggtattggaggaagattgtagctctaaaaggtacgttgctgaacttggttgatcctatcacattcactcaaacgacatataaagtagcagatggctataagtggctgtgtcctacagtaaatagggtcaactggagcaaggaagtctggaatcggctgaatactcctaaacacagctttgtgttttggcttgctgtccaaaatagattgaaaactagagaccgtttgctcagatttcaaattgcaactgatccctcatgtttgctctgcttagggagtgcagaaacttgtgagcatctgtttttcttatgccctttctctatggaatgtttaattcaggttaagaactggttgggatggaagaccccagcagctaacttaactgatctggtgcgagtccttgagaagagatccatctctgccttccgaagacaggtatatactgctgcttgtgcagctctactttacc

SEQ ID NO: 119127 - DNA, 1760 bp, Cannabis sativa
gagtttgcaagttcaatatgcatccttaagaactcatcaagatttcgatctaaagttttagattggttcattttgaaaccaaaaatcctttccttaagatagattttatttgttaaagacttctattgaaattgttcctccaatttcttccatatctttgatggtgtctcttctttatctactattctgattattgcatctaatagattgaatattaacattccagtagtagtttctagatattcttcctactgaatctttgtagttccttctggccattcaataggctcttctaggtacccttagcaacttttgttggagtgatctgattttcctcctccagatcatgtaatcaccagtgccatcaaatttatcaatatcaacttttatgttacttatattaataaaattgagatcaagtagagttttagaattctcagtttgtgatgtctccacagcctcttctagatcaaatttgatctagaattattctcctccttctcaagatcaaggtcaaattttgagctttgattttcttctaattttgagtgtgttcttgattcttgataattcgtctttcaagatttcttgcccaatttaatcctccctgataatttcttcttggtttctattgatcttcttagacaaatcaggttctgataccactgtacgaattttacttgtttaaccctacaccaacaaaaacctaattatcagtatgtaaggtcagttttgacctttctctttgtctaaatgaactttagattaaccggcaacaacaagaacaatacgaccacaaaacttgtgtcgtttaatccttagactcaaagacctttcaagaagagtctcgaagccctaaaacacaaaaatacaacacacacaaaccctaagctcagatcttcaaaaccctaccaaagcaagttcttgagaagaacttgctcgatcctatgttagaaaccctaggatctttaaccacacacacacatacacaaagatgaagaaaataaaaataaagtgagaaaaggagagaaaataccagaaaattattttagagttcaccccaaaaattagggctacatctctgtcaagctcatctcagagatttggcttgagatccactatcaacaatggtgatgaccgcttgtggagcttcctgtcacaagattcaatcatgtaagactcaatctcttctcttttacagttttcttttcctctatacttctagatgcaactctatatttcttctttgtgcatgtactcttctcttcaaatcctcaccacgagagctttactctttacttggaccttctctctcaggatcttggagctgaagtttggaaccagggttattcctctctttttctttatagttgtacttttcttttgattttgtaacttattgatagagtagtacatgtagttgatggagttggaaattagttaccattcagttgtaactaacttttggttatggtcttgtagaggcaaagtcacttaagttaaatcttgttttttgttgttttaatgttgtacgctaatgtggatatcaaactgagcattggttataagtgaaatttacttaatagttattaatccaatttaatacaatctcatcattctttgcatctataatataatctaattaaataaatgtaataaatataatatagtttaggagttattttatttttacatttcaaaatagtttttttttttgtatttttacgaaattctacatagaaaaccctattgcaactagc

SEQ ID NO: 119128 - DNA, 1017 bp, Cannabis sativa
ttttttttttttgaaaagaaacgtctggtattaataaaaataaaactaaagttagtgttgattatggttacaaattttatcatttgggaagctgtattattccaaaaagaagttacaaaaagcttggtaatcatttggaagctttgttagtaaagtggtggccaatctggatggaccttccgtgaagcttgtgtttcgtagttgtaatatctttcggatagcttgttgtcaaccgagagatgtattcccaaatagcctattgtcaatcacagatgtttatctagaaggaacgcctatacgtattcggatagcttgtccgtcttaaagctttcagattgtttttattgaaagtgcataatcaaaactgacgtgaattattgttgttggtaatgagctggatcatttaaggcagtgtaaatgagccaagatgatttcataaatatttttttggcaacaatgtaaatttataaataactatcaatcttcgtaatttgtatgagtttaagaccattattgcttgagtgaaaatcataatagtgtaaggttgtaatctctcagagttcggaaagattcttgtaaccttgtagacactgatatcaataaagatatggttgttgctgttttgaccgagatgtaaagcatttcacatggctcgaactcgttaaacctcgtgttattctattctattttattgctaaattcattaattaaattctgtgatctcttgatttattgtttctcgattgtgttgcgtgtttgttcctctggtacactaaatcgtaagtcactgattgtttccgtttagtagggttgagcatcggtcggtttggtcagttttttcctatataaaaatccaaaattcggttttcgatttggattggtgcaatccgaaaaccgaccgaccaatccaaaacatatctttaaattgactgttttgaacctcgatttggtcggtttaaatcgcccaaaccgaactttttttttttaaaaaaaataatccaatttattctataaata

SEQ ID NO: 119129 - DNA, 815 bp, Cannabis sativa
attaataattaatacaattacgtatagacctgatgtttccaacttgctgatatccgaattgtgtaatgatatctgctgtgagattatccaaattggcccttgtagcaccaatgggaggtgggccacctttggccagttgtggatcaactctgtccaaaccataacccaatgatccgtacaagaagaattcagctgccaaaaactcaagattcaaagaaaattccaagcgattcacatcattatagctaattgggagaatatcaatggtaccaaacactggtacagattttgaaaagaggaggactactaatgtaagagcaacaattggagtgtccattattgattctctatacttacttttatatattattaattagattatttcttatacaatttgtttggtgataacactttctgctctcatatatatataatttttatatgcactacgtaccttgcatgagggcatgctaactgtacgtatataattgattgatatacttgatgagtatatagctatagctaggttagagggcatctatctatagctagctagctaggggtggcatgggtaagcattttattattattagagtctccttcactttctcctttaattaacttgcatttcttatatatacatactatttttgtaatcctccaacgtacgtaatatatataaactctagctctatatgatatacctagctacctacctagcaatatgcacattggaaaattattaaaacttccattataagtttggttgaatagttactataaatttcaaatgtaatcattccatctatcatcaa

SEQ ID NO: 119130 - DNA, 2159 bp, Cannabis sativa
aggataaaggagaacaagtttacttctattgtcattcatttattttatttaagattataaattttttttctatcttattattaatatatatatatgtatacatctctattgttctatcattccaaatatttatgaaggagaatgagaatatataaatatatgagtactccatgacatgtaaaccataaaggtagacttatggtaaaaaaattttgacacttattgattattaaagttgtctttttcaattgttatgaatttcttttactatatttaaatttatttttgaaataaaaataaaaaaatatagttactcatataattaaaaaaatattaaaaaagaattaaaaattattatcttactaaacaaaatacaactgtacacgaaacacggtttgtttcttaattttatataaaaatatcacatgtttgcagctgtcaatatgtatagccatataggagtagattatatagtgaaaatctgcataaattattatttattttataaaatttttacatttttacatttattttttatatatatatttttacagtgttcatgaaagtaacataaaaaaaataataaaaaaatacataaaaataataagaaaacgatatttaaataatataaaaaaataatatataaataataaaaatttaacaaacataaaatacatcagaagaccattttttatataaataaactcataaaatatttaaaatttatataatcatatttataaattttttttttatttttgaaataatcttaaattatacatataaaaaaaataaggataggaggagaaaaaaatattgattataaaaacaaatatgatgtatttgtaatatcaaagttgccaacaaagatttcctcaaaaaaaaaaaaaaaagttgccaacaaagatataaaagattactaattaaagactaaaatttttgaattagataatcacaatttcattgtacgcagttcatattttcgttcacttaaataaaaaggatgaagaagatcgaattgaactttgattttcattagatttcatgtacgtgaattttataaaaaggtaagagagaaacaattgaatctaatattattttatggtatatatatattaatgcaattaaaacaaaaaatatatatattcaatcagagtcggttggtagcagaaaggctccattccaaacccgacacgaccacatgaatgcttgattattttataaaacttttacttaccaatctacactaccaatctgcatggttccaaaacaccagccaatcaaaacactggcactgcacacatttatttatttatttattacatatatcatgaaaagatctacctatatattttattataaaattgaacaaaaaaacagtgtagcttgacttattatattatatataaataatagtgtacgacatgtatcatgtatggtacagtcaaaaatatctggggtacttaaactaccaattttaataatttcatacaatattattagttgaaataatggatagcttatttattgatattatatcctatattataatgtaacatgataaggcggtgatttaatggtttttatatctgcaaaaatgatactatataatatattggctctcactagttcttctcagtgtacatacaatgatcgtatagattttactttcaaaagaatgtattcatcacacatgctttggctgaaatattgtccccaatttcttttaatgcaaaatatatactataccacttgtattattaatgaaaaaaataatataaactggagaagcaggtgactgcaaaaggacgttgaacaatatgagaaaacgagtttttacaaatatcaataattattatagatatataacaaaatataagattataatagtctccggtagcagaatataattctgttactgtagaaattttttttgcagaatcaaactagaattagcagaatattaaaaataattgtagaaaattaaattacttgacacaaaacatttgtacgtagtatcagtacttctttcaaacactcctagtccacggggccccacttagagaatgaaatcaattaataaagtatcaacaattacaaagacaattgacttaaataaatttagactccctctaaatttttgccgcaatcctttgtaa

SEQ ID NO: 119131 - DNA, 542 bp, Cannabis sativa
ggctctacctctattatccactgtagtacaacttctccaaactcagtattaccacacagaacatagcctccaagcatagcaacccacaaaaccaaatcaggtttcattggcatcactgagtaaatgccaccagaactgataggaaagtcagggtgtttggcttaaactcatttttctccttatgtcctccatgcatttcatacataagcattgtaggatttcaaaattaggattcaagattctgttacgagccaaaaatgcatacatgtccacaacttctgcttgctcctcctatgtaaatatctgagtagtatctaaaagaatgtatgtgaacttgctgttaaaataataccaattgaagaaattttgggaccttttttttgttctttctgtttgattgcaatgagagtaggcaaatagtattaaagtgttccatgtagtggtattcctttaccttcaccaaaagctctttgtgtatatgcaaacccaacttaacttgcggctagctcaagtggccataggagggggcgtgtgtgttggag

SEQ ID NO: 119132 - DNA, 1750 bp, Cannabis sativa
  modified_base (26)..(46): a, c, t, g, unknown or other
aagttcttatttaggatgttaataannnnnnnnnnnnnnnnnnnnnagatcctggtaaaatattttccaacattatcaacacctacagttttggtcagaccaataactggagaaactttattcttttacttagctatctcatagagtgcaatcagtaaagctttggtgcgagaagagagaaacaccagcaacctgtttactatgttagtaaaaggttactgggggccgaatcgagatatccccctcttgaaattttttccatatgcctgattcatgcatctcacaaactacgaccttatttccaagcacatcccataaaagtcttaaccgatcaacaactaagataaattttatcaaaacctaatgcttcaggaagattcataaaatagtcaatcgagctggggaaattcgatattacataccacctgacaacatcaatcaaaggtcaagctttggtcgatatcctaattgaagggataatctcaaaagaagatccacttgtcaagcacgatacagaaacttggaaattatatattgatagagcatcaaataagaatggcttggggacacgagtgataatgatgtcaccagattacttgaaatttcactacgcattaagattccaatttgacacttcaaacaaaaaggccgagtacgaagctttgttggctggtttaagaatagttgaagcagtaaaagtcaaaaatcttgtatactatagtgactcgcaattgattgtgaatcaagttctaggggaataccaggcgaaaggtttaaagatggcaaaatatttggagaaagtttggaagagcttagaaaagtttgattattttaagattgaataaattctaagagaacataactcaaatgctgatgcactggcaaagttggcctcgcaaaatgagcttgatagtttaagtttggtagctgttaaagttttgagcgacccaagtatatgtgtaaagaaagaagttgagatgatagatgcctcgcctacatagatgacacccatactcaagtatctactcagcagagaacttcctacagacaaaaatgaggcacacaaagtcttgtattcggtacctcggtatacaatagtcgaggacaaattatataggaaggattattcaatgcctctcttacggtgtgtattgccaatagaagctaacgaaataatcaaggaaattcacgaaggcttttgtggagatcacgcaggttggcaaagtttatcaaaaaagattatccatcaaggatactattggccaacaattaacaaagacacacataaatttgtcaagagatgcgatagacgccaaaggttttcacatatacctcgcgtaccaccaatagaattaagaatgatgacctcgccatacccatttgcaatatggggaattgacctgattggggcattacccacagggcaaggaggagcaaagtacgcagtagtagcagttgacttctgcacaaagtggacagaggctaaacctttagttgccataacttgcaaaaaaaatcttgattttgttgtcaagaacataatatggagatttggaatacccattaaaatagcactaacaatggaactcagttcgatggtgagttgttcactgagttctgtgaaaggaataaaattattaataacttctcgtcagtttcaagaccccaagctaatggacaagtagaagctgttaataaaaccttaatgttgggttttgtgccctaaataaaactctttttaatataatca

SEQ ID NO: 119133 - DNA, 1349 bp, Cannabis sativa
ctaagttcctggtaaaataattcccaacatgctatccatccccactctaatgtcacagttcagcttcaaccaatcctggggggatcgtcagacatccatcgagcacgatatggggcaagagagcaaataagcatggtgatatgtaaaagaaaaacaaatagagtcaatgcatttaaaaatatatactggacaattgttgtgtaccttgtcattacgagttcgccagattgtgtcaataattaatgaggcatagaggaaagcctcatccgcattaatgcctttgttttttaggtcccgcaagaatttaacccaatcccacattcgaataccagtatcacaaatggggaagataccccagggagatgaccgccataagtgaaaagcaaagtcacaagaaaggaacaaatgttccatagtttcggcctaggttccacacaggggacaactatcatcctctattggaaaccttctcccaattaccgaacgaacatgaagtgctttggataggatacaccaccaaagaatcttgagcctctccgggattttggtattccaaagtttattccaaatggatggcgcaacctcgcaatgagtcgctctttcctcagcctgggccctataagctgatttacaggagaaacaaccattactttccaaggtccagaaccagctatcctttccaaggccagttggattgcccctttcaagatagccgagatagtttcatgatcaaacaaactgttaagtttttgaatattccatcctccattgtccaaaaggagctcaactacttttatctccccattcatcgagggtcctcttgggtaaggagcgaaacccttcttatgcacaatccatggatcataccatatatttgtatcatgaccatccgccacccattgcaagcacccttacgaataatagctctcgatttagccacattcttccaaaaccatgagtctgaggcttttgaattacagtcaagaaaggactttcctttaagatatttggcttccagtattcgatagcataaggattggttgcctgtcagaaggttccacccccatttagccaggaaagcctaattcatctctctagtttttggaagcccaggccctctaaagacttggggaggcaaagtttatcccaggctttcaggtgaagctcgtgattacccttctcggatccccaccagaagtcgcgaaccaacccgtcaatcttaccagcaaggcagctggagagcttagttgcttgcatagcatacataggtgaagataaacccactaacttaattagagttgcacgtgttggaattattttactaggatcttagatctacttacaagtat

SEQ ID NO: 119134 - DNA, 692 bp, Cannabis sativa
tatttttgaactgctccaaacatcctctaagcaaatttatattcaattctttaaatctagttccgtatagaattttcaatccctccaacgatgaatcatattcggaatgctctatcgtttgatatacatacattttactgtatttactatatttgttcgaatcacatgcttatgtataatttagattcacatgcacagatatttattactccataaattatctatacactttaatattattcatttttcattacacccatattaaaaattctaaatttatgttgcttaaatattgactctctgtactcaattgtttgtggatttatgttcaattatattattatttgtgtaaaatctttgaaatgtgagtatatttcaaagcattaagaatgtaatatccaaatctacgtggattatttttttttttacataatattccttacgattgtgttcaattatgtgtacaaaatgtgtttataagctcatcattattgcattacagaggactatgtggagattcatgtgtcgtcttttgaatgaaatttatcgactatttactattatttattgattattattttattatgctaacaaaatatcacatgacgtaaaaatcaaattatatttggcacaaaaaataaatttgtggtagatttaaattaaattttagtattatgctctaatgcacaatt

SEQ ID NO: 119135 - DNA, 1852 bp, Cannabis sativa
  modified_base (821)..(827): a, c, t, g, unknown or other
ggtcactatcaacccagagttcacccagattcttgctagagaacagactagatcctagctcacaaaggaaaaactgattgggcttatgaaaacgtggttgtcacctccccaaaccaatacttgaaatcacctacatagaagagacaaggggaggtgagaacctgacaaagctacaaagtacaaataaaatttaggccaatcatatccaagggtactttccaagtaagttacattgtacaaggctgggcatcagcgaagtaccaactcaagtatacctacttagacaaatggtgagtcttaagttctacattcgagtttaacagactcacctaaaagtcttatacagagttcctaagggaaccacgtatgagataacagttgtatatgcctacaaggcctcacaaaacccttgtcatggtcaaaagagaacaaaaacttggccacatgtttacaatcttggccttggccgacctgggttcccaagcttagagaggacaactagggttccatgacccctccaagggtcggccagggaccctaagcccaagcattgggcgaccaacttttggggtatcccctatggccagccatcccccatgaaaaagacccatggccagccaagtcttgaacaagatctctatggctggcaagggtgtgtttcgaatctaagtgtgtttttcaagagcgcaaacacgttctttatgttcttcttgactacaagagtcaagaatcacaacaaatgtcaaaatcagatctttttcatcaagaatcacaaattatacatcctaaaactatcatgcagatcaaaataccaaaaagannnnnnnctaacatgagaatcaaaaaatatttaaagcgaagaaaaacttcatgcaaccatgaaaaaatcaactaaaacaagtgaataattggattagaaagcttacctacaactagaaacctttggtgaataagatgggaagcttgaatcatcaaaatggtgcgataatcttgggagttgaagcactgtgggtgtcagcctctagagagaaggaggagctttcaagatttacttttttagagagagattgaaatgtagaaagtgaaaagttgtttccctcttataagtttatatagcttccgtgggacccccttttttacttgccatgtagtttgcaactaaaaatcatgcagaagagtaatgcagttaacttactacaaagagtgtgatcagacagtcaagagcaaatatttcaaagcctaaaaatgctgcaggatttgcacagttaaagttattttagtctcaaataagcttgaaaatccttattcgcaaagatgtttgaatagggacgtagaggcaaatgttatcctgatttttacccagctgatgtggcatgtttacgtggccaacatcaataccacatggtagtacaacttgctaacaagaaggccaagccgtctgctcggtacttcaaccaatgaggggttcgagtactgaagcgagatgacaaagtgacgaactagccacctcaaggtggctggccggccctatagccaacataggccagccaacttttggacatcatatggccgaccagcatgcactttgtaggtgcatggccaaccaaattttggcttgacaggattctgatgcccagctttcatacgtggagagtaggctagaccacgaattgggccataaaagcccagaaaaatagagaaaaaatatcagcaacttccttattttctagaggcaatttaatcattattattttaataatttaatatgtaaagtatggctttatttacctatttttaaaggattttagggatgtaagctctcctatataaagagccttagtcaaaccctaaa

SEQ ID NO: 119136 - DNA, 978 bp, Cannabis sativa
agatatttttttaattagatagaaaaattaagcataaaaactcaaaattttctaattttacccatttatggctaatacccattaagagtgcacccattcatatatatatatatatatatatatatacatatactgtaattttatgatgctaataaagtaaataattttttctatttaaatatttttacaccataatccttgtaaatttcaattcttaagataatatgatttacatttgttaatttggaaacttttcctggtgatatagaaattaatgtttgacatgtggatagaaagatgacatttcagagctgagtagtcttgattcctaacagtcgacctgggaggggtccctagctttgcgctcaggttgactttaggaactccggattggaagttcgaacttcaataactcgtttctaactcactatctttcaatattatgtaccatgaagatatgaaacaaccaaatccaggccctgagagctaaagttacatgaaccgcaccctagaagtcaatctgggcacctagggtttcacccagcacccaaattgacatccttaactagggttgtaattttcgagaccgtcttagtgcaaatggttcaaactttgcatttggacatgacctagacatatcacgaatatatttgaggcgtcagaatcagatttgaagaaagttcaactttgagcacccggtgcccgagcacctagcgcccaggctgacaatttgtcagtctgggccacttttaaatatcaaatcaaaaatcagacacatgtatcttctttcgtcttcatcaaaaaaaaaaaaaaaaaaatagatacttttggagaagaaacaacacttccagggtgccattgttttagtttcccattaatgtttgattttattttcctttattacattaatttagtttcccattgttttagtcaatacttttgtataaataggggttcatcctattaaaataaacaact

SEQ ID NO: 119137 - DNA, 1278 bp, Cannabis sativa
ttatattctttctaaaaatatttttttggatttcttgtgaaaaaattaagcaattttatggttttaaagttaactcttcatagtccacaagtctatcttattcagggattgataaattgtatccagaatacaataaattatttttacagaatgaattacaggtataattttctttctttctcgaaatttgtcgtcccttgttccttaggttttgtccctatttataggagtctaggataacagttattccgttgggatcttattacttgtaaccgctcgtgaaacgtggacaatcctcacgtttcatatttacacacatgggataattacaagtaacttcccataaccgctcttttaactttatctatagacagttatgctgactatgctttattcttcttgcaatgcaacaatcttcttctagacactttatcataaatcaatgtctaagtatatgacgcagtattcctcacgttcttccattaatgttgagtaaggcataagcgagacgtttatcaccatctgacaattatgaggtgaaccatgctgaaggtgttgtctttagtctttcaacatactcacgagtatgtgaatcaataagctgcaagctctttggataattcattatctatccttttcaaacaattctgttgtgtattatgtgtatcccgatatggaccttctttgttcgacttgttggtctcattagtcattagttattattcgttgctcgccattgtctttaagagggtgagttcgaatatttctaccaactgtacttcttaaggagagtcgtctgaatatatttattattgtataatttggactggttcatattctagctatattacacgtgtcagcaccatattgttgctcgaaatatgggtataacactcaagaacatgtgtatctggccacatgacaaaatgttcactaccggaggccacctcccttattctgagatagttctcgaagagaccccaataagagatgcgagtaccataatgatattggacacacaactaacgtatgcaaaaatttgaagaatgaaattaagagcctgatacggttaggacacttgtacgaatggataagaaactgcctgcctcatatgagagagggggaagttggagctcaagcacctcctggaggagtgattcaagcttcagatgtacaagaacctctgagagtacctccagccaaccattaaggggtaccacccgaacaaccacctaggtcgaacggaagagtagccatgatctccggaggaccccacat

SEQ ID NO: 119138 - DNA, 895 bp, Cannabis sativa
  modified_base (44)..(61): a, c, t, g, unknown or other
tagttttagtcacaacaagtattgtgactaaaaacacatttagnnnnnnnnnnnnnnnnnntttgtgactaatacttttagtcatggactatttagtcagaacgtaagaatgaaaatttataattagtcacaaatttacaaattttattgtgattaaaaagaatattttttatggttgtagttattaatatattattgcacatcatgacaatatgtttcatctctagaaagatttcaatttttttaagccacgacaacgacttcactcattgatataatatataaaaaatttggaattattaatgataatgtttttcaatcataacgagtaagaactaaactattcggtttggagccaagtctaggaaaatacaaagcaaagttatgtgtaaaaaagaataaaagttgtctacatgttcaatgatatatttgcatttatatagttatgctagatttacacacaatggtcaatgagcttaatttgtctaaaaatgttccttgatttgatttatgtttgaaactaattcatgtgtaatatataggatataagtttatagtaaatatagtagtgttttagtatacccttatttattttggtattcaagataatattttatgaaattcagtattttaatattttcagttttattatttaattaaatgcggaataatgaaactggtactaaaaacagtttttccgtagttacagaaaataactctgtaactccagaagaaaccagaaaaacaaacagtgcagaaaagtacaaacccgtaaagtttttgtacgtagtttcaacaatcctttcaaattgttactagttcacgggtcactcccagagataagattcattagataagtcttaaaaaatacaaagtaattgacttatgcataaat

SEQ ID NO: 119139 - DNA, 1726 bp, Cannabis sativa
tctatctccataaatctcaaagctttatctaagttaaataaattgcatgcttcatggatttactgctttaggtaaaagagttaattattgcgtgttttgccttgattacatacaatagggagattaggataattgacttcttcagcattatctacgggattaatagtttgattggaaactaaaaattacattctttaataggaattaggaatgattagtgagggtggcgaataacctttaactagtctctcataccgtagtctcactttaaatttgttcttttctttaatttttattattgcaatttttattctagtctttaaaaaaacccctttttctaattcttgttactaatttgtgaataattaaataagcatagtcctcgtgggatcgacccttacttacgattatactaaaataattgaaaatattggaataaaaaaaatagtatatttgttgtggcttacgacacgcatcaggtatgtacttaaaccctacgatttcagggtataattattgtaagatatcagtcaactatgtaattaactgcgtcactatgtaattataaatagaggcaagttacactgaaaaagggacgaaaaattatcagagaaaaaacaacctgagagttgtatcagaaatctaataagattgacttgtagactatgcagaattttaactgcaaaaccacgtaaaaacctttgtgttcatatctttctttttctgcttttattttctgtgcaaatccatcactgtttaggctcaaatatagttaacgaaaatcggcgttaatatatattgtggattctaaagtcttaataatcttctctctactatttattcaacaaatccctttcactttatttattttaaaaccttaattattttttttcttttatgaaataaatcttatcaaatatttggagctagattagagtttaataaattttgagcttaaaaagtatctcttagacataaatcaactcctttgagttcgacctcgtacttacatgaacactatatttcatatacaattcttacacttgtaagtataaatatttaaaatacataacaccaatgggtgtacaactatatgataatgcttccaagtcaatcagaggacttagaagccgtcaaggaagcgatcaaggattttcagtctccccaaaccctagcctatcgctatcttcatatagacctagggtttattagtgatccccccatatgttggcctgtcacactctcaaatcctgtatccttttctaaaataacgaataaaaaatatgaataaatagagatctaaaatatctcattattataggaaattatcccacaattgttgggattattgttgaagttgttatttcccttaattttttagaattgcttatgttgcattgtcctataggaatggacaaattagagagagaagaccaagggatggaacatctcggctaaggcatgtagagagtcacaaatgctgtggcacaggtctcttaaaatccccttgtggcccacacttaataaaactaattaattcccgagtaaagtatgtcagcctatcttgtaacccaattttgagcccaataactttcgaattgagctatggccatgcgatagacttagatctggggtcaaaagatttttcaaatgcaagttagctcaggttctttgtgttgggttttatgccctaaataaaactcctttcaatataatcagatttact

SEQ ID NO: 119140 - DNA, 4146 bp, Cannabis sativa
ccagccaaatttcgggtataacactggtcattggtagtacttgcagaggtgctccccattccaatatcttggtaggagaaccagctccatgttcttattgtatctccctagcttgtaggctcccttgcttgttatctctataacttggtaggggccttcccagttgggtccaaacactcatgttgttggatctttggtgttcaggaacactctttaaagcacaagatctcctatgaagaatttcctatccttgacttatttgttgaagtgccttgcaaccttttactggcaagcctacaactttaggtcggcttgatctcttctttcttctagtttgtcaagggattctgctagtaggatgttgttttgtatcctggtaaaaggttgtccttctgtgagacggtggcaccaactctacaggcaacatcgcctcatagccataagttagagcgaatggagtttgcctggtggctatcttctcagtagttctatgcgaccaaaggacctctgggagtaattctcgccaattgcctttttcctcttcaaggcactttttcaaagtttccttgaggatcttgttgacagcttctacctacccatttgcttgaggatgggccacgatagaaaagcttttgatgatatccagtctgttgcagaaatcagtaaacatgtcactgtcaaactgctttccattgtctgacacaatcttttgtggaagtccaaagcaacatatgatgttccaacaaagtcaaggacttttttagaagtgattattgccaggggttcagcttctacccacttggtaaagtagtctacagcgacaacggcatactgcacccctccttttccctttgggagttgaccaatcagttctattccccatactacaaaagggtcaaggagactggatcatcgtgagctcgttgggtggagctctagggatcttcgagaatctctagcacttgtcacattttttgacatattccatcaaatccttaatcattgtttgccaaaagtacccttgtcggagtattttttttggataggctttgccccccaacatgattgtcgcaaaagccttcatgcacttctatcatcaactgctcggcttcaaccttggtgacacgccttaagagcgacattgagaagctccttctgtacattactccatctaggatttagatacctagcagcctttcttctcatcttttttgcatcattcttgttttcaagtaaggctcacgtttggaggtaggctacgataggtgtcatccatgttggactttcatccaacatgttgacttcttcagggatggtaatgcttcgttccttcaagaattgtactcgcaccaagtttgccttgtcggaaatggtgctactttccaaataagtaagtgcatctgctatgtcattctactctttggggatctgcattgttgtatagcctttgagttgacctagcatgtcttggatcttgctcaagtaagccatcattctttttacctcgagttgtgtattcacctaggacctaattcacgactagttgagattcgatgtatatgtccaggtgtcagcccgtacttcatgcgccaactcgaggccagcaatcagggcttcatattcagcctcattgttaaaggctttgaagccaaatttgattacttcgtgcaactgctgccctccaggtgttatgagggcaatgcttgcactggacaactggtcagtgcagcttctatcaacatgtagtttcatgttgattctttaggtttttgttgctactcttgctctcacttcttctctggctcctgcttttctcctgaatcttaagagattttaatagatgtgtttgtacatacagccacgaagtctacaagggcttgaccctttatggccgttctcagttgatatgtgatatcgaattagccaagtttaatggcccaattaagtagtcgaccagatgcttcatgtttttgtaaaatctactacaatgattggccggtgtacacctctatccggtgtgcttggaagtatggcctcagctttttggatgtcaatagcaacctgtaggtcagcttctccatgagtgggtatcgacttttagcatcgattagtttcttgctgatgtagtatacagggtgttgtatatcgtcctcttctcttgttaagactgcactcacagcatgttttgtgactgctaggtacatgcctagctcttcattgtccagaggtttgataagataggtggttgagccaattgttttttcagctctaggaatgttttttcacactcctctatccactcaaattttttgttttctctgagaatgttgaagaatggtacacacttgtccgtagatttggacacaaatctgcttagtgcaataatgcgtcctatcaagctttgtacttccttgatggttataggcgacttcatgtccaaaaaggcttggatcttgtctgggattgcttctattcccttggcattgactatgaagccaaggaatttacttgggcctactccaaaagaacatttgagggggttgagctttatgttgtacttacgaaggatcttaaagcattcttctggatcttccacatgcccacagccttttcagacttgaccatcatgtcgtccacatacacctccatattgcgaccaatgagatctttgaacattttgttcacaagcctctggtaggtggcccctgcattttttagcccgaagggcatgactttgtagcagtatagacctaactctatcatgatgcttgtgtgctcttgatctggcggatgcatcttggtctggttgtaacctgagtacgcgtccatgaaacttaagattgcatggctagttgtggcgtccaccagctggtcgattcttagaagtggaaagcagtcctttgggcatgctttgtttaggttagtgaagtctatgaatactctccactttttgttcagttttggcatcagcacagggtttgatacccaaagtggatagaatgcttcggtgatgaaatcatgggcccgtagtctttcgaactcattttttagcgcttgggtgtgttctttgtccaacaacctccttttctattgtacacgtcgaaagttttgatcgatgttgagggcatgactcatcataaaggggtctattctaaccatgtctctatatgaccatgcgaagaggtccaggtttgcccttacaaatttatcaacactgattttgtttccggggctaaacctttcccgatcttcagtattctagctggagaagtgggattgacctcaacttcctccagctcttctacaggtccaaagctatctacaggatccccaaagcgaggatctatgtctgcgtctcagctttggcctagacttcattgccttttgctgggctcttattcagagctcttggcaagcatcttgtctttcttggctttagataaggccaagttataacaatgacgggcagagtgttggtctcccctcaaacatcctactccatgcctttttagaaatttcaagcaaaggtggtaggtggatcttaccgcctttaggtcatatagggatggtcaacctatcatggcgttgaaagtcgagggtacgtcgattatgacaaactgcgccatcagagttctggttgttggattctctccaacagtcaggggaaatagaatgtaccccatgggtgcaatgccttagccaaagaagccatacattacttgtgtgtagggtgctaaatcagttagctggagtcccatcttttcgtatgttgatttaaaaagaatgttggagaaggctccattttccaccatgcatcttgcgacagtcatggaaattgactcgagcagcatctccttccgtgaaagagatgtgggttctccaagctttggttgtttagagccccttttcttcaacagctaggatgtcacttttaggctcatgacaaagtgtccaagcatagcgctccctagccttgctggtcttgcttgtgatgtggggtccgccgataatttcccctaagtgacctgccactaggggtgttcattggatcacatccaatatttttatgcccatccagatccgatccaattatatattggatgttagattttaccatccgatccgatccaatttatttcagtcatc

SEQ ID NO: 119141 - DNA, 1791 bp, Cannabis sativa
acagataacaaatttataaacactactctaaaacatgaaaattaagaagttcaaaggcttaaaactcaacaagggaagaaagtaaaaaacttgaaaaggagaagagaagttcttgaactcacccactatgaagacctcacaagagtagtaatggcgaccctttagcaagcagagcttctcgaaggattcttagaccttaggggcgttgggtttgagaagcgtgaagttacgtgaattttgagtttcaaaaagagcttaagagagttttctaagttcaaagaaattgaatagagaaaaatcagaagagagaaggtacgatacttatatatgttctaaaaaaattatttttccctcaaaaaatcttaatggggagttaatgacacaaaataggcatgcataggaaagagaaggcaaaggttttaaacataagtgtgcagccatcacacgattctccacattgatcgacataaatttgatagctatcataaaatcatgttagtctaagagaccaatatttagccatgcatatatgcacaataaaagggcgtcacaataccagacggagagtaaagaccctatccggacagacgtttggacatggacttagggggtaaatattattaattttttccacctgacgtggcacctccatgtagcaaaaagcaaaagacacatgagggacaagtcaacactaaccgggcaggctagtgttgtgcaaccccttatccgtcaagatctcagggttgcaagatggacttaaacaagaagagcatggagacttacaagatccaaatcttcaaggttctaaagcaagttcatcctaatatcagaatatctagcaatgatagagatacacaagcattgtcaagaccatagttggatatctagctggctagccgagggtgacaggtcatgtacctgggagcgtctaaatatggttgtcaggccaaaaacacatactatgctctaacatttgtgttttttttctatcagccttccaaaagatttcaaattgtacctagtggtcctacaacttcgaaacgaattgaattgtgtacaaaagtatgaaagcttcatcaaagtgtaagtaccctattttctagggatatttcccatttgttatgtaaaaacttgtaaaacccctaacactatataaagggccttaatactacgtgaaagggactttaaatcattctttctacacatgcacttaagagcttagaagcactaaggcattaaagtccctcttcacctcatcacttcacaagtcttctcaaaattattcttctcattgtaatagtgaagagagccatagctagaaattataagattttagcctgcaattttcatggtattatctcaagattgaatacaacaaaaggggagtatgtcattacctgattaaaggggtcgaacctctatgaatccttatgccatttatatttattatcattctccatgtgatattcataaacaaaattagatcctagttagactctgtatcagttggctaaattcactgtcaataggccaagaaatctaaaactttcgaaaagttcaaagacttgaaagccatggctaaaaagtaatcaggtacatcattaaaagacactttgatcagatcgtggtggagagtattttgattcaaattcaaagactacttgctagaagaagggatcttgtcccaactcacaacacttggaactcctcaacagaacggtgttgcagatggaccttgttagacatgctcagatcaatgatcaggaccgtcttaaatatttttaaggccct

SEQ ID NO: 119142 - DNA, 2864 bp, Cannabis sativa
  modified_base (27)..(41): a, c, t, g, unknown or other
  modified_base (2793)..(2823): a, c, t, g, unknown or other
aggatgttaatgaaacatacatggtannnnnnnnnnnnnnnggtaaaatatttccaacactaagttttgaaaaacgacatcagggtgagtgtaaaggaaaaatgtgtttccgatgtggtataatgggaaattacaagagggattgtccatgattgtaggttgaaggaacatgcttcctatgtgtcttggtgggacattttaagaaagattgcccgtaattgaaaaaggaagaatcaagagaagaggcaaaacccgttccagcttaggtgtttgccattactcaagtggatgctacaaccagtccttctatggtattaggtttgcttcctatcaatgacttctatgatactttattgtttgactttggggttacatatttatatgaggcatcgagagtaattaataaattttgtgggccttatgaatttatagagttaggttttggaaccctactacctagcagaaagttgattatctccaaaagttggattaggtctatgccagttaggattgaaaatggggaattaagtgttgacttagtggagttagattatgacaatcagtagtccctgaaccgtaagtggagagactgggagctttgcaatcccacatcgcttggagatggtcaagtgtgatgatgctaagtctgtgtagttatgggaatgcagagtagaaaagggcttaaatggattgattggtactacctatatcaataaggcacatcttgtttgccagtagcccatcacgaaagaactccatggttaagtgtgctttgcctggggtaattttactatgggtgacatcctggatatttttcccaggaaatgtgcaagtgaggacaaagcacattagaaatactcatgttggtttttagggtcaatcgtcattccaggaagcagtcagagtgacatactcgtgtataagagccatcatttcatgggtgtaagggcctaatggggcttgaagcaaggacattacaaatattaactgggtttgatattatacttaggatggacctccagtcaaagtattcaattaacattagttataaagagatgattagaactttcagccatagggtggagatccatttatttatgacaatccattcatggttctcaaattctgatcatcttagttttaaagactaaggattcactatagaatatatgtgtagaatttgttagttaattaactttagtagacctgaaacatttgggcctaaggatgtgagggcagtaagagaatttcttgatgttctttccttaggagttaccgcgattactgccacaacgagaaatagatttcatcattgaatttgtacctagggcagagcctgtttcaaaggcactatatagaatggtgactggctcgagctgaattaaagagctaaagatacaacttcagaggatgctggacctagggtttacccaaccgagcatattgccttggggagctccaatgttgttcgtaaaaaaatggatctcttttaatttgctttgattactgggaattgaataagctaataggaaaacaacaagtatcgattgtctataattaatgacttgttcgatcaacttaagggtaagataatgttctttaagattgacttgcgatcgggttatcatcaacttagaattcaggcggaagacattttgaagactgcagttcgaactagatatggtcattatgaatttttagtgatgtcatttggattaacaaatgctccaatgacctttatggatctcatgaatagagtgttcaagaattttctcgataactgcattatactgtttattgatgacatccttgtatactctcagacggaagtggagcatgagcaacatctttggatgattttacaacaacttagagatcataaattgtatgtcaagtttaaaaagtgtgaaatgagcttttagaagttgaagcaacatttggtcacaacaccagtgttagctttaccatcagactaagaaaagtttgttgtttattgtgatccatctagactaggtctgggttgtgttctgatgcaagctaacagattcatagcatatgcttcttgatagttgaaggaatataagcagcgttatctgacacatgatctgaaattagttgtggctatgtttgccttgaaaatatggcgacattatttgtactgggagaagtgtgagatttatacaagtcacaagagtctcaaatatttttttacttaaaaagatttgaatatgaaacagagacggttgttagaattagtcaaggattatgattgtgagattttatattatcctgcgaaagtcaatgtagtggcagatgctttgaccagaaaaggtctcgggcatgttttagtaccataatgatatcaactcagttggcttcagacatggttaaagttggaattgagtttgtagttaggaaactacataacctgacacttcaatcagacttgttggaaagaatcagaagagtgcaactggaagactccaagttatttaaaatttgacaagaagttttaacgggtttgcttaaggacttttaaatcttgaataatggaatacaatgctcgggcttgtgttccaagcagtaatgagctcagaaaagaaatatttgatgaggctcataatacgccttatttgttgcatccggaccaaaatgtaccaagatttgaaacccaattattggtggtgcgaaatgaatagggacatagttgaatacgtgtcaaagtgcctaacttatcagcggatgaaaacaaacataaaaaatcgacagagttattgttggaaattattttannnnnnnnnnnnnnnnnnnnnnnnnnnnnnngattaacaacctaatatgaattcttaaacaatgaaaataaa

SEQ ID NO: 119143 - DNA, 786 bp, Cannabis sativa
gtggaagagatccttcttgaggatcctgtttaccaaggttactcatctctttcatgtactgttggtaaggtgtttattatttatgttttactataagtatgtattttattttcggtttctttctttccctcttttcaaatactccaatgtgaggtatgaccattctaaactcttgtacttttctacctatctctctatttttgtaatgacatacattgaggacaatgcatgaattaagtttgagtgtggttagattttttagttatttttctttattttatcatttatttaagggggtagaatagcctaacatttttttttttgttttttgaagtatttttttttttaaaaaaaaaattcttttgctcgaggactagaaaaatgtgaagtttggtggtgtgataactctacaagatagagttattttaccatattttataagcaaaaattttattagttcttgactttttaattaatttattaagtatttttgaatttttttaatcttaatattgtctttatagtttttttgtgtgtttgagagtaattttattatttattattttatttaatttaattttaatttatactaattttctaattaattttattttatatttttaggtgcatttatttgccaatgcttgtaaaaaatataaggaattggagtcaaaaagttttattaaatggaataattacataaggtaccttttttaataaaatatttacatttttacgttcaaagattgtttttttacatttttacggtttccaaaaaataacacg

SEQ ID NO: 119144 - DNA, 965 bp, Cannabis sativa
  modified_base (907)..(934): a, c, t, g, unknown or other
aaaaattgggataatagtaagaaatttaattatgatgagtccacagaattttgtaacaaacacggagtcttcaagagtttccctgctattgcacgaccacaggaaaatggataggtggatgtcatcaacaagatactgaaggtcacccttaagaaaaagcttttggcttacaaaaacaattggctgaaagagttatcatgggtattataggcgtacaagaccattgtaaggactaccatcagacattccccatttttactggtgtatggatgtgagcccatggtcctagtggaaactataatcccctcccatagaagcactacttattatctagcaacaaatgaagccttgttacaagaagcactggacttaggagatgaactctgggaagagtctcaaatacgcatggcagcatgccaaaagaaagtggcaaattactttaagtccaaagtcaagaacaggaaatttttcgttggtgatttggtcctaatatgggtcttcccaacctcccaagaactaggagtgggggtactcgaaccaaattgggaaggcccatatgaaattgaagatgaaataggctctagaacttataaattgaagtgaatggacagatccataatacccagagcttggaatgttgatcattaggagttcagtatttaatttcatctttacatttcttaaagttaactagtggcgaacaataatatatgcattatcctaaataaatttaagctaagtgacctaaaaattctttttttaagtcacttagggggtaccaaggcctaatataggcaaaggcgggcaaaaagtaaaaacaaaaagaggcaataaatacaagtgctttcttaaaataaaagtcgtccaaaaaaaataggtctggggaagtgttggaattattttaccnnnnnnnnnnnnnnnnnnnnnnnnnnnnttattaacatcctaaataagaactttctaaa

SEQ ID NO: 119145 - DNA, 845 bp, Cannabis sativa
aaattaaaataaaataatgtgaggaaaaaaaaaattaaaaatattaagagtaacttttaaattttttttaagtttatatttttttaataatagggtgtatttgtaaattcatggggtgcaaataaaattcccctaatataaattttgggtattaaaaatttttgccccataaaaataaacttttttatctatgaccttatatactttttatatttgttccttaaaatttatatcttttatttttatcttacgtatttttatttgtatctctataaaatttatttttttttattcccacatactttttatttttattctcataaaatttatatttttttcatttagaattttattttgtagtaatcttccaaaaaaaaaaaaaaaaatttggctactaaaatattgggttggccctccactaaaaacattccattataataatttttattatacaaatatatatatatctttaacttatagtagctttttttaagaaaaaaaaattctttcttctcatttccttaaaaaaaatatatattttaaatattaagaaataaaaattatatgaaattttattaagaaaataaaattgtacgtgacttgaaaaaaatatataaaaaaaattaaaataattattaaaattaatacaaaataatgtaaaaaggaacttttttttttaaagaaaaaatgttgcaagtaattgtttaaaattaatttaagttttgttttctaaaattaggttgtacttataattttgtgggttgtaaataaaaaggttaatttcacaaatgcataaaacaacaaaaaaataacaaaaatacggttttacggaattttaaacattt

SEQ ID NO: 119146 - DNA, 1004 bp, Cannabis sativa
  modified_base (939)..(957): a, c, t, g, unknown or other
aaaccaatctaagtttgacacgtcaattaaataaaaaattaaacctttaactgaatcaataaaaatagttagtatatttaatataaattaaaggggaattaactcatatactgtttttttaattttatttttttaaatttacagtttgagtttctaaagtggttgcagcgctaattgcaataagagtttctatacgatatttttttgcgatttagattgcagcactagttgcaataggggtttccacataaaatttcgtaaaaatacaaaaaaaaatatttagaagtataaaaataaaaaaaccctaaattaaattaattaacatgttaaatttaaattggtttaatatataacaatgctctcttttttttttttttccatcttatcatttgcaaaatacgccaattttttcaactctatcttttgtttctcgtcaaacattcttcatcagttccataacatcaagtcatttttttttttttaaaaaaaaaaccttgaaaatgaaacctctattaataataatattatattgatataaatatatctatattagagtacatgaataaatatgcgattaataattaattaatgaaaaaaaattaaaacatatgtacggtgacctccacatgggtatgaaaattcaattggtagacttgaaaggataatgtaatgtcggttgaaactcttaatataatatcctagattctcttcaaattaccaaactcaaaataaaattaaacaaacaataaaataaaataaatgattctcataaattaatttagcttatattattatatgattgagacggttagcagtgtctttatcagtttatataaaatatgctttaatttttttttaacattcctatttggaatgctttttaaggtgttatataaatttgatatcgtttggtaacatttttgttttctaattttttannnnnnnnnnnnnnnnnnnatttttgtttttaaaaattttgctcttaaaaaacaaaaatgcgttct

SEQ ID NO: 119147 - DNA, 3819 bp, Cannabis sativa
  modified_base (3767)..(3777): a, c, t, g, unknown or other
aattcttctctccatcacagccgctttcaattatgaaatctggcaaatggatgtatatgtgatatatatgcatgcttgttatggttagtacactaccaacacttgtacaggagtggtacagagggcattggtatagtgtacaatgtttaaagagtacgttacggtgttattagcataagtacagaaaagtacatggtgtgtgtggtacaacacttattggtactcagagtacgaaagaaaacctaccaacactcatacagtgtcggtacatagtgtatgtggtacactggctgtaccctagtaaagaacattcttactcttttgttaagctttgtaaataggtctatgggcgcctagatacaagtcgatattatatgattttttatatgctttcttactgagtctgtcgactcgcagttgctactttcatgagaaggctgaaaaggagtgagcttagagctaggatggtgttggtacatgtcatggcgatgcggcctggaatgttcggtctcgggacatctggggtttaattttgtagtcgttgtgcgaccagactaatatattttgaaatgttgtaaaagtttaaatacggaatcccaacttttgtaaataaatgtataaaagtttattaagtttagcaattaaatataaagttttaatttgacatgattttcaagaaaaatcttttaattagcaaaggtgacactgtaattgaaaaatcattatagcacgccaaagtaccatgacgttacagggatatttcttcagtttgatgctttaaagttccttacgttgacataatgtcaacttgggcactgggtgctcaaaataaaagtgcttcgagtttgattttgttgaccttaaaaagggatcaaccgacaccgcggtatagatctgatgcttaacatgtgtttacacgaataagaatgaaaaggtaataaacaacaagattttttatagaggttcgagctccttgtgatagcgggtaatgacctactctcctttcactcatatttttaccgagggaaatactatccagatcgctatagatgggatctactatagtacccttaggatttaaaggtatggatcaataatggcaaaactcatgtgttgagatgttgctgaggtaggcgtgagagagagagagagagagtgaggaggagagagagtttatcagacacttagagtttggaggcaggtttcagactaaaatgcaacttaggtttctacgctaaagttaatgcctttatataggaggcctaaaactttaggttaatagttcaaatcctttaatacttgcatagattgttagatatttacaaaagaccaaagtgcccttgattctagatattattcagctattttgttggggttatagtgcccaattcgcagcccatgtgttgctttcaacatgtataagtgtttaagaaagcctacattgcatttcttagcaagctaggcccctgtggaggcaaggctagctgaccatagtgcagtcccaaggctggtcggccatattgttggccaggggtggccagccaactcttaagaaggagatagtctgtcacttgatgcctatttgagtgttgtggtctctgtttggtcaggtactaacttggccttcctattgtgagttgtacaaccacgtggaactgattttctccacgtaagcatgccatgtcaggaggacaaaaattgggataacatttgcccccaagtccctatgcagacaactataaagataaggactctactagccatttatagcattttcttgaataaaagatgatgtgcttttaaaacatcttgtcatgactgtctgatctcattacagtagagaaataactcctttagttgcctttatgatgtgtaggtgaggtaagtgaggaaaaggggcccacatgtactacataagtgacttttaggggaaaaaccttttttcacttttcactttctctcactagaaacttgctctagaaaaatctcctccttctctctaggtggccgaacccacaagcaccattgttctcaggattgttgcactattttaacgatccaagcttcccaccttcttcaccatcaaaatcttgtagtgactaagctttctattctcaccatttcactttgtttgattgatttttccatggatccatgaacattatttattgttttaaacatgctttgattcttacaatagattgtagtccattcagtattttgattcgcatgatagccttaggatagataatgtgtgatttgtagataagaaagaactaaatctgacctttgttgtgattctttgctctttgaatcatgaagaacacaaagaacatgtttgaattcttgaaaaaacacatgttctgatccattgaaattttggccgtccaaggagatcttatttcaagcctggctgggtataggtggccttcatggggtcttgtcggccatggggactgtgtccctaggctagccggcctatgccttgtactagggttcttggtcgggcactagactgggtcttagggtctggcaagccactaggacctgaaaccttggtcggcaagggccaaggatccaagtgggtagcctgtttttctccctcttttgacctctgctaaggtctcatgacggccttggaggcatatacaactgtggcatcatgcatggtttctcttcgaaactccgtataaggctaggtggtgagtccattatagtcaattacacaacttaggacttactatatgtcttagtaagtgtacttaagacggtacttggtcgttgatcgaccttgcacactttattttacttggaaggtacccttgggtaccgttgacttgaatatgtttgtagctttgtcaagtttctcacctccccttatttcttccatgtaggtagtgtcaagtgttgaataggggaggtgagctacgtaaatctcttatttacctcgtacttatggccagaacgaaatagactataggtagggcgcctatgtatgatcctcacgtggccatggtggccatacagggttgagttagaatggaggaggtgactgctcaaccccctgttgatgctaagcaagagatggaatcaggagttgagagttgttatgcagaatctgagttggaggaggttgtcccattgaggaagaggaggtatcggacgtgtgataccttccctaactgttccttaggccactatgacgcccgaggtaatcaactgaatagactcagtgagcttttaaagctaggactggaccatgtcctagagcagtctcatgagctggagacaatggaagcgaaacgacctaaatggagttggattttgcctacttttgcactcactgatgaggcctttagtaagatccttactagtggtttaataagatacgtccattgcgagattcctcatagaaactgtcgagtgcacaaaccccctctaggcaggttggcatggttcgggtgccacatcgatcatgggctaatactgccacttaactagtatttactagacgttgctgcttacattgggatgtgcccaacacaactcatgtcgaagagcatcaagtatctctcaacgatgtttatcttgtatagggagctaggctagcctttactcactctttacgagatcgggtactattttaatctaaagtctgtgtcgaagtagagtaggattggatagttttatttcagccagatttgtcaccaatggctgggtgactctaactgaacaaacatgtcaaaggtgttgggttttatgccctnnnnnnnnnnnatttcaatataatcagatatacttattaatatagatcagaaa

SEQ ID NO: 119148 - DNA, 720 bp, Cannabis sativa
attcctcaagctaggtatgtttcttataaaagccatttttcagccactttcaaaccttgggtctttcttcattcatcattcagaatattgagatttacaaaagtttaaacaatattttgagctttgaggatattaaagaatacaatacaacatactgctactattttactctatttccttcccctgttttgtattgtattcctcttttactcttcctattaataagggaaaatgttagaagttagttgagatctttcgttaggtagttaagttcgttggtctttctcctcctatgatttgtaccgacttagttgaagtcctttccttatttaaaggctttccttttctttttcctgcaatatgtttcattcttctttctcaaaataataaaaagactactcttcaattttcttattatggtatcagagcgggaaagataggctttcctgtccgatccttttcttcagccttctgtgtcatcttctccggtgaggctgtgttcctctgcattttttctccggttgattttcgtcttctctgcttcgttgtcgtctgtgttcttgcgatggcaacagtcaaaattcaacctgaaatcccaactaccaccactgatcttgggaatgttcctggacaactcaatcaagctgttcagcttcccacaatcaagaatcccctcgaagatcctggaagtccttacttcctccaccatggagataatcc

SEQ ID NO: 119149 - DNA, 2609 bp, Cannabis sativa
  modified_base (52)..(56): a, c, t, g, unknown or other
accagttgattagcaacgagctgcacagcatatttaaaaatcacgtaatacnnnnntgctagttagggtgttacaatcaaactcatctcaagtcaaccaatctctactagagccaaggtcggccttgagcataggcaggctagacctgtgcttagggcccacctagctcaagggcccaaaaaaaatttatcttcttttaaaattataaatttttttttattaattttgaaaaataccatatttttttctaaataagggcccaatttttttttatctatggcccactaaatttcaaggccggccctgagtctggagcacccatcatgggagttcacaactcaactggaccaccacagtaatctgttcagcccaaaaatattctattattatatagtttgttttcaacaaatctacacatttgcatttatgttttgttgacttctgttcaaaattgaattttgaattttttgcatttttttccttttggttatctagttttttgcaataatttacgatatttagcaatgtttgactaaaataataaatatttgcatattaacaatagcttttgtaatgtatttacgatatgagactaaaagctacaaaacacattgctaaacgttattaaatcactctatgtctctttttgtactaagtcttctccctcttttattagttgtaattttattaatgctagtaggtcctgtaattttattgcccacaacgtgactaagtgggcttttatccaccatttgaatgactttattctggtctcttccttaccggagaacttattttgtaatgaccgggaggtctaactatttcgttttatgatattacacttttattcaaaaaaaaaaaaagctattaaatcacactcaagtttttacgataattcgcaatgtgttttgtatgttttagtctcacatcgcaaatacatcgccaaatacgcaaacatttactattttagttaaacatagcaaaatatcgccaacctcaaattttgtctatcattacaaatatattactaaatatcgtaaaatatctcaaattattgcaaaaagctggaacaccaaaaaaatacaaaaaaaaaaaaaaaatcaaaatattatttttgggaaaaaaatatcagcgaatcacaaacacaaatgtgtagaattgttaaaaacaaactatatgtagtttgagacccaaacagagagcaatagaatgagaagtatgcggtggtaagcaacgcgctgtggtgagtttaggtagtcttttatgggaggaagaatagaaaaaatgagatgaagatgagagggaatgggggaagttgaaatgagaaatgtatttttgggtttaagtagaattataatgtaacgccctaacccagaagggcgccacgtgtgtgtgtatttttataaattagtttataataataaactaacaatttatggagaaattgtggattaattaaaactttaataattatttcgtaaaatataatttaaatcgtttttcaaaatattgttaagttggggatccccttgttataaagttttactaaaataccatagtattattttattacaaaatattagtacatattcaaaatactacaaaagtcggatcgtgtcaacttagcacaaaagacggtgaggttgatatgtacattcatcagaagacatctgactcatggttgatctatctttcctttttccttacctgcaccacagagtacatgtgagtcacaaagactcgacaagaaaagtggaaaataaattacaaatttcatgattaaataaaccagtaaatagttcagttacatacttaaaatatatatttacacaaaatatcacggtttatcgtggtactaattatctaattatttgtctaataagacaagttattcctgatactttataaagtatccatcgacctttgtttccaactggtcaactaatgtcactatcgttatttatgaggtaatcgataagtaagaaacctaacagtagtttcagaatagagtaataactctttcatattaagggtcattgtcgtatctcaattagccatgcaatgtggtataattgacttttcttacctcaaatttaaattcaagtgtccaggccaacttgagtgtaacaatgctcgacgatctcagatcctatgtcacgacaatgataaactggtaaagagcttaatcagttccgttctaaggcttaaacttaaaaccgaaaattttccttttcgataaataacatggcataccctaaatatcgataaaacacaaaaatctaagtgttggaaacaccccaaaacgatccactgttttcccaaaatagtccacaattttcccaaaacggtaaaccattttccctacaaaaatagcctaactcgagttttatacctcaaacccaaccaaaactcttccaaaccctgccaaaccttccagaacagtttcataacaagcagggccggccctgagttgaaatggaccataggcaaaaaaaaaatttgggcacttactataaagataaagggttagttgcggcaaaaccccctaaagtaggaaggtttttgcaactaacccccaattctaaaatttttgcggtaaaactccctaa

SEQ ID NO: 119150 - DNA, 2306 bp, Cannabis sativa
taaaactttatgataaatatgcatcacttttgtttagctgcaacaattttatgttccatatatgtgaaacattttatttaactatatatgttattgttatatgctatatgctaactaatttttaaaatacaactcaaaataattagttgcacacatgtaaaaaaaaataaaaaattactacatgtgcaactgattgtttaaatcttatttttaacactgtgaaatttttttgaaaactggtgaaatgcatgctataattataataatatatagtcaaaaaatgaattatgatatctcctaagtttattaagagttgaatatcatacttgcatcacattacaataggttgggctcctaactatttcatttggcacaattcattgatgttagttgtaggaagccatactgagtcctttttaatcccatataaatcttggctgacatcaaagtggattgttgtcgattgcggccatatatatatattgaccaacttaaaaaaaatattgattatcgaagtccttcgtggtgcaacgtaacatagttccaccttgtttactcggcctctctgatttttttgaggatgtgtttgaggaaagagtaaatcttcagggacttgtctattttcactcacaattgcttcttctgcatttggttattgggggtgttgcatctatatgaaagaaaacaattagtttagaatttatttatcaataaacataataagttaagggaactaattaaaacatgcaaactctatttcgactggagtaatgtagttcttcgaccatgccacataaagtcctatagcatgacctacagtgctgtattcttggtgaacgacaagacacaaattatattttccacatagatttcttcgatgaaaactcgacgataatccttgtagaggtaatcaaaattctagactgagaattcgccattcttcaaacattacaccttcaccaagaacccccaagcaactttcaatgataacccattgggctccaaccaaacatgcatccaacatggatatctctgtagttctaaataataaataaaaaaggattaatacaacttgtaatttgaccatatttataatttagtattagacaaattcataaactaataacaagattacctttctgaactaccatcaatatgtggcggtagagctagtggagcgaatatcttatcagcatgtagtgtactcgattgtagtggagcagagacatggacatcatcactttgtgattgttcttcgggagcagagataatgttagcaggggctggttcgtttgattctccaacacccgaaccagatgcatgtgatgtacctgcaacaccactatgttgggaacgaactatacacaagagtttagccatatgctttttaagctgcctattactttcctctatctcacggagtcacttattcatatttgacaataccctcgttgccctcatcattctttctccttgtagggcgtggcatgtggaaaaaatgagtttgtgatttgtgtgacaccatagcccaagcctcggacccgactatcatgctcatatgtcctaaggccgggccatggtcaagacgttattcatcccttccacacttagtgttccttattcgacttgctttcacaattcatcctacaaacataataaataaatagagttagaaataaattatgaaacaaaaaaatataaatgccattatactttaaacttacaattcattgggcaacattcgctttaatattttcaaaagctggaaaatcattaatggcccacaataatatagccttaagattgaattcttcatttttaaaggtatcgtatgcaggaacaccctcatgccacaattgactcaaatcatcaactagaggggataagtacacatcaatgtgattaccaggttgtgaagggtcagatatcaacagtgtgagcatagtgaacttcttcttcattatcaaccaaggcggcaaattatacatcataagcaaaactgaccagcaattatacttactgctaagggtagtatgtggattgattttgtccgcagatagaccaagacagatatttctaggttcattgacaaatttaggccgcctagcattgattgttatctaagtgggggagtcagctggatgtctcatcttaccatctagttttctatcgctagcatgtcaggtaaaatttttagcatgaggtaatggtggtaagtaccataatacctttgcagggacaccaacctctatctcgtcataattatttttcttttgccacctagactcaccgcatgtgggacacat

SEQ ID NO: 119151 - DNA, 689 bp, Cannabis sativa
tagtagttataattttaaaacttaaatgtatacatatatcatatcggggcgggtatctattcccccacccgccccgtttctgactggggtatgcatatttaaacccatacccgcctcgcttcagaaagtcaaaccccgtccccgccccattaggggcgggtacccgcgagtacccgaacgtgcgagtataattgccatccctaggcatctgtaactttctttttgtggagtatttcattcctgcaatgccatattttccagagtaggcaaacaaaaaactgaaagtctttagtaaccataatgcaaggacatagatgtaataaatcaacacaaagataagaagttaattttaataataatttcatgaaaggttgttaatttctaaactttctggacagaggagcatccaaacaaagcatgtgctagcgttcttcttggctgtgacaacgacaacaaaattgtgagctcactattcggtggtggtgaaggttctcactagtgggaagagcatcgtggtatacatgccaaaagaaaatgtttgattttcagaggcaatatcatgttccgtatcaacttccactatttttcttggctatttgtaaatgaaggtggaggctcaaattggtttaaaatttcatatgcatgatgatagccagagttgactatataagtgttggaaatttatttta

SEQ ID NO: 119152 - DNA, 703 bp, Cannabis sativa
tgaccaaaaagtttgtgtttcatagtagattaagtttaattaatgataatgttaacttcttccaacatttaatctaactatcctctaactctactccctttagagtttctaataaaactcaaggggcggtataggggctgggctcaccctatattaatttaggccgtagacaaacataaaaattggagctagtgaaaaagtgaaactattcgaatttgaactctcaacctgttagttgttaagttaatcaaattattactaagttacaactcatatttaacattaaaaatattattatttattttattactaactatattttaatttttttttcgaaatgagtcttgagcggtggggggcctgaggcggctgactttttcgtcttagctcaggactgaccttgtataggggttagatttggtgagaataagaatatcaaactcaacttatatttggtgactttaattttaatgactaagattttgtgttttatagtggataaagtttaattgatagtaattctaatctcttggaatacttgagttttacattcctttaatctaactaacctctaactctactcccttttaagtccaactcatataacaaacacctcgcaacataataatataaacaacactcaacctacactctcatgcacccacatcctaaccaaaacatgcaactcaatcaaaaacaagta

SEQ ID NO: 119153 - DNA, 834 bp, Cannabis sativa
attcattatttcaagatagaaaccacaggacatagagggagaggtcataagcgaatcggtctgattctatctcgatcgctacattttaagaaagtaaggctcccacatatcatttaaatcactctttttaaattttattgaagaaacacttttctcattatgaatcttctaacagaaattcaatccttaatctacttacactaacagtcaaattgataatttttcttacacatcatgtccatggagttttcaaaaatcaaattgtttagaattcaaaagtgaaaaaattcaataaagcaataagtagtgccgttttctgactataaccttgtatggttgtagaatcgacaataaattaaactgtgcgattgcaaatgatcattatggtcataaaatgactataaaccatcataattgcttattttacaaattttagtatttcactttaacaaatttcacaatttacactcaacactataaattcaagcgatttttgcacttttacactttggagttctttttttcatttttacataaatctacatagtaacacataacaaactaacaaaacaatttaaatcgcaactaaaaaattaacataacaacccgaaactaaattcaatatagttattttgcattttttacactttaagcagtttttttcttgtatttttacagaattttaaatagcataacaactaactaagcaactcatatagactcgtatagaaactaaattcaatatagttaaatttacatagcaactcatatagaaactaaattcaatatagttaaatttctcaaatttttgaatttcccttacctggagagaaa

SEQ ID NO: 119154 - DNA, 1010 bp, Cannabis sativa
  modified_base (985)..(985): a, c, t, g, unknown or other
ccatagaacttcgaattgcactcccagttatatagaacgatctatatgttccaagatattgtcatatgatgataatttttcttcttgtaattgtttactcaaaaggatattgtgttttacctttgcaattttcgtaatgaagcttttattatttgttgtttttatatttaatttttgaataattattatttttgcctcttaattttgaccaatacaattttttttcctatttataaaaatttaatttttttattaattttaaaacattaatgtggaaaattgtaaattattcttaatttttgaatggactatcttgctgttgacctaccactaatgtgtatgaataagttgatgttgtgtttctacaactgatattaatttttctacccttgctaccatctcaacatctatttaaggcagtgtgaaatgtttgtcatgtcatatactgcaagacacatgaaatagaaatttcgtgtcaatatattgttttagagtatgtatgaaaggtaaaagatataattaattattatttctaagttgaatatcaacttttactgatgagctacaatattaaagatggatacatataaatataatttttttgctagaagagacgggtacatataactgaaagataagatgatatatgaagtttaaatttacgacgcaacctcataaaaattatttgaaataactatatataatggtcaagattctggtctaggaatcatatttgaaacatttagcattctccgacttctcgtaacaattttcatttttccagtcgcataggcaaggaccattatctgctagtatccaacaattttcaccatatattcccctttcgttattgaatatcacaaacttatgctctacattattgattttgaaagtgcatctgaaaacagtttctccaaaaacatttgtcttaaatttgaattccatattgttgctgtaagggtggtgtgacagtcagtagtcccgngatccgtaaggggaaacaccgggta

SEQ ID NO: 119155 - DNA, 1211 bp, Cannabis sativa
gtgtgtgtgattttgattcaaatcacatatgtggatagacatttagtaattgtactttgtataatttaattattcatgtcaacaccaatatgaaataacatgttttatcaatgtgtcgcatatcataaaagagttattcatatcacaatgatgatcattaatagatcaatctaaatcatgaatattcgtgaactcttgtttgcattcatttgatttttttttgatttacttgttaaagtttctcaaaaaagatgattcttagaacttcagttttgggaatctaatagcatgtgtggtttgaaacatgttatataataataaaattcaaccttttagaaaagatcaaatattagttctcttatattgttaattctgggagaactactagttggatcaaaatctataattaaaattatagattaactgttcacattgaattaatggtacatatgaaattcaagagataatcagaagggtaaaataataatttgtaccagctctaattattaactaataattagaggatgaacttctcattgattatatcagtggactataattttatattgtcaaagagtacaactccataataatataactaatgaacttgattattttattgatgagttcaataataatcatgagtttattagagcttcgaaatataggtctttggtgcccagatcacttctatataacactgtacaatgaaaagattaatttgatgaatggattgagaaagaattgatctcgaagataaataattattgagagcaaaatagtaatttcgtatgaattattattgtatataattatttaattattaattaattaattaaaatagatttaaataattagttttatttatttaaaactatatatattagttaatattattattaaataatataatgagagaaatattttattttattggaaaataatatttaattaattctgattaaataagagattaatgagaattaatcaactattatctattataaaatgaataataaatttatttaagacaaaattgatttatgctttaaaatatgatcaacacatgtggggctaggatcaacacgtttaaggtaagggaatatatgggcctaaggcgaattagattttggggccctcaaaaatatatataaaaaaaatatttaaaaaaagtgttatgggatttcaacccgtgacattgtataatatgt

SEQ ID NO: 119156 - DNA, 1253 bp, Cannabis sativa
  modified_base (26)..(33): a, c, t, g, unknown or other
  modified_base (1189)..(1225): a, c, t, g, unknown or other
ataaaatggattacattgaaatggannnnnnnntagggcataaaacccaacaattcgctccttccctactctccaactgagggatagggccaatcacatcttgtgtttgcctgtggagaggtgtgacatactcagcctagctagtgaggcaaatttttggaggtacgacttttaccctcctgtacttggtaataagggtactagaggtccttccagaggtcttggcaacactcccatggcagagggagctagtcaagaagaaaggtttgtgcctaagtaggtagggggtgagtctaatgattaaattcccttggctaggattgtcaagaatgtagctctaaggaaacaggcccttcgacaacacttggcacgaggaggcgccactgagaatgcccccgtgctattcaggtccgtaggatagaactttgctaggtgtgcccaaccaccgcctgttcctagagacaagggcaagactgctacctctgacgataattctaaggattcttcttctaaggatgacaaaattctagattgtcctcttgattttagtaactttttttacttttacttacatttagtattgatgacttgtattctaactttgttactttcatttttgtagacatgacttttaggatgacaaaccttgttgggtgaccttcagtggtacctcttctggcttcccctagactaagggtgttcagatgccaaatctttagatgtaagtcagtccatcttgcctccccgtcccctaggccctattccggccaaccaaccggtagttatggatcctcccttgaggagcacccctcccccttgaaggccatcagggaaggggacccaaaggcctagttaagtggcttgtttgtccaagggtgagaaggtgattaaggttggccaaaactaccttggcaagagcctacaaagtgtttatgaggagcttcatgatctagatgttgagactctagattacttgacttccagcagtcttagagacttttcatctataatttgtttatttatttaactttgtgtgtgcaagacttttgtagagcttttatcactttttttccctttggtttcaaggtatgctaaaacttagccatgctcacgctcgagcaaagggctctgccgcagctatcaagaaaacacgtgagggcaaagaagtgttggatatttattttaccannnnnnnnnnnnnnnnnnnnnnnnnnnnnnnnnnnnncctaaatatgaactttctacaacgataa

SEQ ID NO: 119157 - DNA, 1048 bp, Cannabis sativa
atatatacatgtaattatattttattattattatttgatgtagtatgttgaaaccttcatgccatccaacttctatctacgcaccaacatgaagaaccaaaccccacaagaagtcttcaccaaaaaccataaaatgcttgtgaaatccggaggtcagtggctaacgagcactgcaacggcttgctccgtcattgcagtgctcattgcaacagttgcattcgcaacctcaactgcaatccctggtgggaccaaggaaagcaatggcaaaccaacactcgaaaattactttgcttttgatatgtttgctattttgtcactagttgcattgtgcttttccatcactgccttagtcatgttcctctccatcctcacatctcgatatgaagaaaatgatttcgcaaaagatttaccgacgaagctttttctagggttaacatcgttgtttgtgtcaatagcttccataattggctctttttgcgcagctcacttcttcgtacttgaagacaatcttagtaagcatgcagtctaccctgtgtacgctgtgacatgtttgcccataaccattttcgcctttgtccaatttcccttatatgttgatcttatacatgccacttttaggaatgttttcgagtagttttttatattatttattaaataattgtacgccaatacataataacaggaaagtatgttctatgattcaatattgtatttataaattggtcaattaaagaattgttaaatgaaccttattttctctgcggtactcttctttgtttgatattaatatttaattgtacaccaatacatatagtggtcgttttgttcttgttattgccgtttaaagtctaaaatcatttagatttaagattgaactaagaaagagtgataatattgttttgttggtgtagggtaaagcaataaataacctacaaattaaatcaataagacaattcttgtgtctcataatctttctcagcctttcctttccttttctattttcttttcttttctctgtttgttgcgaaaattattaattactacgcaa

SEQ ID NO: 119158 - DNA, 1841 bp, Cannabis sativa
  modified_base (199)..(201): a, c, t, g, unknown or other
aagatcttattcagattttttattgttttttaggggctcctcctgtatgagttttttttgcccctcttttcatcttatttgccactatttataattacatagtgggcagttaattacaaagttgactgtaatatgcttacaacaattatccctaaaatcatggaatttgattacatatcacgtagtgtaaatgcagttnnnatctgaaaatcatatagctgtgattttcccacttttctgggtcaaaatgatcgtgttttaaacacgtctttaattattgtatctggagatatcttgacagaagcttggttccagtgacctcaatagcaagctggggccatttttccttccgaggtcgacaatgcatgtcttgtgtcgatcgcggatcttatttacaaagagttctttgaagctcatttgaatgttatcttctgacttgtcagggttgtaagcctcactgacgctaattggatgattataggaagtcttcccatagcgagacgggcacctcgcttgcttggtctcgagccaatccgactgttacacttagtttgtacattatacactaaggacttttgcgattgatatatgtcgctttcgtcttcctatgtgtactgttcttgatgcctcgctattcgcattcagtaacatatagtttctcgctaatatactaaacaccagtttgtatattgattcctcgcctaagaccttacagtctgcaggttacaaatatactctgatactcacgtaattaatgagttattccatataaagcaatttcatcaatccatattccctttatcttgacacgtgtcctccactaagatggcagccgaattttgtgtataacagcagtggtctctcgttaaggttttggacattaaaatgagttttttgggtcccgagactcccaaaatataacccaccatcaaaaaacaagtcaaagcacacctcgagcggttcgagaacatgcatggctgaccactgccatttggccatgtcagtgctcatatctggtacaagacatcataaactgccttcaataaaatgggcataactctctcaatttttatccaaataacctggtttgacttgtagtagaaggataatttcaaagtggatcaaagtgtgtctcacttccatggctcaattctgaagtcatagggtccaaaattggcttacaaggtaggcgatacattttactctggaattgagggagggttgttaaaggacactgccacagcccatgtggcgttgtatgcgagcattgacactccaaaatacatgttttcagtaatcatcactaatatcatgcatttctagctgagaggtgtcatcccatctctccatttcaaattggtgaatccttaaccgaaaataacaactttcccaatgtttgtgggatatttttctagaaacaaggagatttttatagatatttattttattgtaatattttatccattatcaagactaggatacaggatttgttagggagataccctgacatgtgggggatcactaacaaatcctctagcctatctatacatcaagtgggaggctgagaaaagaatcttcttctttttggacctttttttctctctttttggatctactacttcgaaatcttctcctagaaaattacttgacaacagccaagaacaccacattgattccttcaccttttccattgagtccaccatactcaatcgacaccagtcctcaaaacactattgatacacaccttcctttacaaattattggtttattgttcccaagaactttacaacctttaatttagatcatatttatgaatatcaagtctcccatgagccttatat

SEQ ID NO: 119159 - DNA, 1075 bp, Cannabis sativa
ttcctttcattatcttcttcagaaggcaagtgctaagcttcaagtttggaataataaatttttctctaaggctggaaaggagactcttattaaagcggttatccaagcaatttcttcatatgctatgtcttgtttccgaatccctatttctatttgtcatgacctcgactaactcattgctcacttctggtgagggtcaactggtaataaggccaagactcattggaaaagttggaattcctgtgtctaagtttcatgggggtttaggttttcgaaactttgtttttcataatcaagcctttcttgctaaacaagcttggcgtatctttacgaatccaaattcccttgtttctagactcttaaaggcaaaatattttaagcacaatgatttctttaagatactaagggtcacactccttcttgctcttggagtagtattttatggggtagggaccttctttctcaggggctcatttagaaaatcgaaaatggtaattctgtttcaacccttcatcattattggattcctggtttcaaaacaattcgatttaaagcaatatccaaccgccagagaccgcggtatcttttttcataaatgaggttggatgttgggatcttcataagcttaattaatagttatttttctgatgacattgtgaataccattcttaccatcccaattgatccatctcaagaagattctcttatttggagcagccattcttcgggtaatttaacagtcaattcggcctatcacctagccactgctcgagcttccctcactgcttcgcaccttccacttctaatctggattttcttttaaagtggtggaaaacagtttggaatcttaaagtccctcccaaaattaagcatatcctctggagagcttttcatcatgtcctcgctacttctttaaatctgtttgataggaaaatcctgccctctccaaactgttcaatttgtttgcatgaagttgactctgtcactcatgctttccgaggtcagaagttttctgggtttggctggttattatcgtcggttcgttgagggtttttcaaagattgctgtaccctta

SEQ ID NO: 119160 - DNA, 848 bp, Cannabis sativa
ttcgtctttggaagagatttgatacacgtcccatactcaagtaggtaaacgtgctatctccatcattttagtttggtctttatgagtgtcttggtggactgcctgacccaggtcatctccctacacccctttgcattgtgctaagtgaacccttggtccctagatcgtgttttcctgacatctgtgttcatgcgagatgactctgggttctcaggttgcacattcccacgatttgtgtttctgtgggaggttttaggaccgttgggtcgagtttctctattgtcagtatttcttggattttaggggtctccttcatccactggaatatcccttgtataccctagttgttcgtcttggggattcgtgggattcccatgactatcacctcttggagtttctccatgtctcatggtcttcaagcctctaggtctccaccaaggttgcctagtggatgtgtttggttggctaggaggtgcattgatctatgcagcccttgcaactgcagcctcgcattctaactctgcatttctccaatttgatttagccaatcgttgttggagttgtctttttcctaattccactaatggcacgtatctagtaggatcataagcgtccttactacgtctttctgagattttctcctcactttgtttaaatcctccatcatttcctccccttgagtgaggagtctcagccgtatttgtcctatgagaattctgatgttctttcccttgacgctgagttgttccacctggttgagtatcttcgttttgtggagtaccgtctaggggtgttcataaaaaccgaaaaaccgaaaccgaccatcaaaccgaccagaccgtaaccga

SEQ ID NO: 119161 - DNA, 1360 bp, Cannabis sativa
caatatattactaaaaaagattaagaaattaaaaatttgtgtcatctttttaatattactagaaaattaatatatatattatacattataattttttgaaaatatatataattaagtgcagattggattggatcggttactttttgaagtcaaacaacatcgaatccgcacaagtgcggattttagatttttcaatccaatctaatccgcgcaagtgtggatatccgcattttgcggattggattggattggatcatgcgaattagacttgatcggatacttagtgaacacccctagctcaagattattattagtccatgtaggtatctaatttaactactccatttattgctcccaaaataccacgtattgatattttattggtcttaatcataattttaataaaaataatttaaaataaatagataaataaattattttaaaactaattaattaacttttttcatccgatctacttttttttttctttctttcttcttctccttctcgttcactactagcccaacctgtctagtcccgatctactctactaaaactctccaatttccattactaagaggggttgctctaaaagaaaaaaaaaaaaatctaaggaaagtttgaattagagaagcaaaggtcaaagaaccggccaccaaaacccaccacccaccactactcgtatatatatttcttcaccgcatactccctccatgtctctcgttttcttagaaacataaagaaaaaaaacaaaaagtttcatctctctccaagatctcgatcttgatcccgatcctgagaacatatatttctttttaggccctctaggtctctctctctttgtgctggacaacgatagaaatctagcgaccagagatgatgaccgacatgataggtttagaaagagggttagagtcagagcaatgtgtagtgatttaggatttttttttctttcttttctttacttaattggttttttggattttctaggatcgtgggatgggacgaggaagaaggtggagataaaaggatggtactagactactagtcagcgacaagcctccacaactactgagaatggtgggtgacgaatcgtaaaaattagggtgtatttttaatatataatgtttttcaatctttaatcaaaaaaacatcaaggttttaataatatttttatttaaataattttttatgatgttgaccaataaacttttgacacgtggaaattttaagaactacaaataaaattgttaaattgagtacctacaaactaacgagaatctcgagcttgacggactattattgtaacgccctaatgctaaggcacgctacaatgctttttcaattattgtgcaatctt

SEQ ID NO: 119162 - DNA, 1123 bp, Cannabis sativa
tctctctctcactctctctcactcagtcactcactcgtgtttccctctcttcattaaagaagacagttgcgtcaatggtgctggtctcaggtatggttttccctctctctctctctctctatatatatatatataacattttctctccatctctttgtctcgtgtctttgcaaactagttgtgaaggcttgcattagagttgctggagttttattcataggggtggtgcagggaatggttggggtgttcttggttaaattttttttcattttgtctagctattattgacagattcaaataatatttgtgaattttgtaaataaagattttgcataaattttttgtgaggagattagtttgttattttatttttgttaggcttatcctataatttatttacttttatttgtcagttgtatatctgaagaaaaaaaaattgacaatgtagaggttaatttggaataaaaaattgtaatttcttattttgtttgggatgttgttgattaacaaaactaagaaaaaaatataagtatttttaaaatatattaactttttaataacttttagcatcaaatatataaaaaaaaaattaaatatattactaaagaattagtatacaaaattactaaaattgttatatttattcagcaaaaagaaattcttatatttaatttattataatagtataatttataaattttatatttaatataattaatataaattatcatttataatatacacaatttgacttcaaacaattaaatattattttttttagaaaaatatctaatatagtgactttttgtgtgggtcactatatctccaaaaatattgatagagaataaaaaaagaaaaaaaaaagatatagtgacactttatgtgtgttgctgttactttttcagtctgacaaaacttgattctaaatgcctacagtgacgcgcagagagtgaatgtaaaaaggttcagtgacacatgtgaagtgtcactaaaaactgtattcaatcactctcattagtgacgcgtgttacgtgcagtctatgatggcacgttacaagctaagtgatgcccacaagttggccaagtggtggcgcatgttgtggtgcatgcaggtggcatgctg

SEQ ID NO: 119163 - DNA, 1286 bp, Cannabis sativa
cttggaccttctgtgtaagattaagttatttcttacattagtagtagcacaagtgagatatcagaaaggtttggtataaatgttggctacttctgtttttatgtggagaagaagttggatttaagttggtgtgtaatcctaaaaaattatatattccaaaataaaatttattttatcttataaattactaatttatttatttatgattacatcttccacattttttttgtaggtaaacataacatgtaataccattttgaatttaacttaaaaaatataatcttcacgattcatatctaatgatgagattttattgttgcatcgctttattgatattgacgaatatgacattttatgattagagaaacttatatttccattctaaagttaaaaaagaagagtcacttcatatatttttttcttacaaagaaataatcttatatttaaggcaaaaattatttataaatttattataatcgaaatttaattacctaccaaaattcaactgtaaaaataagctaaaagtaatgcttttagtaattttacttcaaatgataatacataataaaagactttaagaaaaataaagatatctagatagacttgaatttaatagttttattatggtacaaagagtagattattaattgagaaatattaaattgcacttatactgtctaacattcttgtgagatgtattattagtactaatataatttaatatcgaatttcacatattttaagaaataatgcaatttaattcaatcaagtcattcaaaatcaagaatgaaatagtagtaggaagggtattcctactgtaagcatgatcaacaacaaagctctcgcaagtgtatgcatagttctatttgcagatcgtttaacaaaacgaagtgaaacatgttaagatttaaaaaaaaccacttattgaaatttataaaatacttaagaaatacaaataatcatagatctaatgatatttctaaaaatggtttaatataaaaaactctaaatcatattttatagaacttttactaaatcaatgaagaataagatgataacaagatgagcagaaacactaatatgaagccaattgttgataattaacacagaaggttatgatcttccaataatacactatttctttatgtatttttcgttgatgaagaaggagaaaatacaagaaccgtagtgttttttgaggactattacctatttatatactgattatagaattagttttggatatttataattacccatcaacaaattataaattaacttatggt

SEQ ID NO: 119164 - DNA, 1396 bp, Cannabis sativa
  modified_base (1349)..(1350): a, c, t, g, unknown or other
tccatttgctatggcatatggttatgaagctatgctgcccgtagaattggaacctctgcccatagaacattgacctacgaccaagaagctaaccatacactcctagcagaatcacttgatgaaattgaagaaaaatgagctgaagcaaatctaaagttggtagcccatcaataaaaagtgggtcggtatttcaacaagcaagtaagggcacataatttttttgtgggagatatggtccccagaagagtatttcagaacaccaaagacagcacgactggtgtgctcagaccaaactgggaaggaccatatcaggtggttgaagttatagaatcaggagcatacaaactgggtaagtatgatgaaaacatgaaactcgttcttgtaccaaggtattggaatgggaaacatttaagaaaatactacctttaaaagtatcaggtcagatgaccattttaagtacaaaatgtaagaacatttactcttaagtaaattgccttctgggcgaaccacgcccaaaagttttggatgaaatgaaaaagtactcaagtcagatgaccacctctgaaagtacaatttctatttaatgcaatttgttttgtttaaattaagctaaagatcgagttagatcaatataatagcttttatgtaagttactacggtaacaaaaatgttccaaccaataaatgaataaagatgtctatttaaattcagattgtgtcaattctattagcaagttaaaaaattaccattaaatgcgtacaaaggtcttctcggacccaaagatccgaacagacaaaaatcatacttgtgaattgcaagtgaccaagagtcaaaatctgctcggtcactttgagggaaactatactcatacaaagcatttgtaacactaaataacaagcacgaaaaatacaaaacaaacactattgcacaaacaatgatcataacaaggaactgtattcattaaagataacaaatcacgaaaacccaggattaaagtctgcccggttagccagttctcttaaaattgaaaacatattccaagtttaaaaactgcttggctggtcattttatctcaaaagaaggcctattggctgaacagacatatatgaacaaaagagaaagacattaagacagcaggagtcccaggctcttgctatggatcgatttggtctgaaggggttagaggatcaatagactgaatgacaggaccttcggtgctctggtcggcaagagctatagaggtagtcgcctcggaattttcctaggaagaaatcaagatacataatctgttggaaaatattttactaggatatagatttactaccacgtatgttatttaacatcctaannatgaatttctaaaataatgtaatttaaacacataaagtttgagaaa

SEQ ID NO: 119165 - DNA, 1977 bp, Cannabis sativa
tcctattgttattaaagtttaaattatgcgctaattttatttagggtttcataagtatcttgggtaacgtgcctaattatttagggcgttacaataggtgtcaaaaaaatatgttttggagtgtcagtgcttgcatatacaatgcctcatgggttgtgacgcaatgtcctcaaacaaccgtcacttaaccacattactcaattcttgagtaaaatatactactctgccttgtgaggcgattttggacccaataacttcagaatcgggctatgactatgagacatacttagatccttcttgaaattatctttccaatgcaagttaaacaaggtcatttgaataaaaaattatgagcgtaatgcccattttattgaaaatagtttatgctgccttataccagttgcgagcactgacatggccaaatggcaatgtttgattatgcatgttctcgaacccctcggggtgtattttcacttgttttttgatggtgagttatattttgggagttctgggacccaaaaacttcatttcgatgcccaaaaacctaacaagagggcactgctaccagttggagccaaataatggcagtggttggccatggcttgtgggatgccatgggtggtgtttctcacttgtatttgatatagggatgctgaatatacaatttggccaatgaaactcctttccttgtgtatcggccgaccactgccattcgtttgcggcagtgcccattaaaattgatgggcactgctattttcttatggcaatggtcggatgtgggctttatgaagccttgggtgacttttttcatttgtatttgatacatatatgctgaaatgaaactttgcaaatgaaaccattttcctcatgcaagggccgaccatgaccattcccttatggttgttgtccagttttcagcaccttaatgtgacaataggatcaaatgacatgtgtccatatttttgatacctgggcagagagcaatatccctagcatccttcacatgactaattagcatctgcaatagtcggttatctgagcagggttgtggagaagatatccgaccaggtagaagcatgttggtgttgagcgacgcacatggctttaggtttgatgtcttaagcttaattggattgttgttggtggctagttttggggttgagcaagtttgagttctaagaactcaaacttgactgaaaaatggcatattgagtatttgagtgttttactacttgctgttactgcttgaaatatgttgtttgaggttaatataggtgttctgtaagtttttgtgcaatttgggatcaaattgacgtgttggtggtatttttgatgtttccaacactaaactggtcgatcggttcagtgggacctgtaggaaccggaattctggctggtccctaggaaaccccgtagaactgatcttccagttggggaactgctctagcggttggggtagtttcgagaaccctagttttctcatttttgtgatatttagtgtatcgtcataacaaataccaatagtagaacccttagtagtgagtttgggttctcggattaaggttttggcatattattacccgtttatgtaaatgtgacttagggcatccaccagcacaaggtcatctgttcagattggccaacttacttgaattcagaaacgaggtaagattagcataaaacatattatatatccatactgtgtttgtgattgtatatgttttgggtgatatcatagcgacacaaccattgtgtcagttcggcagtacaagcaccatactggttaagagtgatattcacctcagaaagtactaattggagctatcatagcggcacaaccattgtgtcggttcggcagtacgagcataatactggttaagagtgatttgatggccaattatacttttgggtgctattgatgctatcatagcggtacgaacatagtgcttgtcccgcagtgcgatcatagtgctggta

SEQ ID NO: 119166 - DNA, 641 bp, Cannabis sativa
ttgtggtcagtagcagcggactgacatcccgcccctaataatattattatcggcagattattaggggcgggatcttctggtaattaattcgtcagattacttatctgacacattagtaccggcagattctgcccctattaatctgctagtattaagtttaatataaaaaaaaaattattatcattttgttaatttgtttaaaaatgaattaatttataaaattcttttataattagaaaaacaatatcagaatttctaatataattaactcaacataaaattaatatccattaaaaataatacacatacatcaatacaactgtacaccttaaaaaattatcttaattaaattaaataacataaattaattatcattgcttagaatattcatttataaagttttcatcatttaaaccaagtcttgaagcttcaagattgtcacgagactgtagatccagttgggaagagtaataaggttatcgaaattcttgtgaagataagatctccacaaattgacgagtctatgagcgaactagataagtatgttgcaattgttgattgtgtgaactaaaaacctgaccacatatacacaagttgtgtaggaagttattttaccaagaacttagatctactcacaagta

SEQ ID NO: 119167 - DNA, 916 bp, Cannabis sativa
aaaaagaggtgggggcgaaagtagccccaattttctcactgcccggaaaacgaaagtagccccatttcccatttcgcccaaaaaattaaaatgtaagggcagcaaatacataaaagaaataaaaattcaaaaacagagagagagagagagagagagagattttaccaggaaaaggtcgagaaggatgtgttcagggagaggagatagatcagatatatgggagagattatggagtgcagagtcaactgagagagatagcagagaaggcgggtttctcattcactttaatactctcatactcaaaaatgtataaattaatatatcattctctttctctctccttcttctgaaccagctttttctctctccgcaacaaaaaattagggggaataaaaagacgagcagaaagaaaaagtcaaagaagcttgggtgccgaagttgcagatactcttgacaatgcctttctttacaactgtgatacgtttcgttctctccgtctcggggattgctacaagcaaaagccctcttcttttttccccgtttcgtacgctgtgaaactccacacgtgcgttccacactttcgcacgtgctcgtgaatggcccatgccgacgacgaacaaggcccaaccgtaacaaaacctgatccgttcctacttattttctttcttttgtctacttaacgacctgtcgttttctttgttattttataggaagacttggagagaaaactgatacgctgtgcaagcagtgttgcaaattagtgtctgtcgtacttgtccgcccatatttttccgtgctttgcaaaatatgagttgtgtcgtgttgggtcatattatgatgtgataatattttcaaaaggtaggtctggcacaactaggagtgttcattggatcacatccaatatttttaggtctat

SEQ ID NO: 119168 - DNA, 748 bp, Cannabis sativa
aatcattcttgtttaagatagatcccacttatcaaaagtgatttatgatataagagtgtgtgtaatttacatgtgcacatattattgtaacaaaattacatggtaatagttcaatgggaaattctataaataatagtaatagataactatcataaataatatttgaaaaataatttgataattttctaaatagtaaactcctaaacgggtgttttgtattgtaggtccatgaaggcccaataatatagtgggcccattatagcccagtgctcaacccaatacttttcaataaatgcaacaaaagatttgcaaaaccaacccattcaccaactttatttttttaataataataactattattattttttatttaaaagaaaaaaaaaaaagaaagggtcgccgacatttggatgataaagatacggttgctacagtccagagaaagagcaatagtaccaaatcttaaaaagttccacttgtggccaaatgttgtccaagtcaaacaaaaccactttctacttgcttaccggctaccccggttgcccaatcaatggtcaccaaggctgctatcacaggctatacccaattaccggttttacccgctgcaaggaattactctattattattaggctctttgtcttgtgaatttttacatgtatcaaattatgttaagttcattaaaaatacagcctgaactaaattgttgtatttaaagacttttgtctaattttatttaattttactatt

SEQ ID NO: 119169 - DNA, 1908 bp, Cannabis sativa
  modified_base (1868)..(1878): a, c, t, g, unknown or other
tgtagcattttcgaacaaactgtttgggccgatttacaggctcttttgtattcagaatgctattaattcaatgaagttgatatttcatttcaaaaaaaaaaactatggaattttaaaaaactctacttaaatatggtatgttcaaaactatataaaagcccaaaaataaaaataaaataccataaaaaattggagtatttatataaatatggaaaaagtaaagctagtttagatagatatggtaagaaaatttaataggaaaaaatatagtatttaaaataaaaatttaacattatggattgaattaccataaaaaatattaaaattccctttatatatttttttttaaaaataaaacaaataaaactacagtgattgccggagttgtcaccggtacaagaaaatgtgtcggagtttgttgttggtgtcgaaaaagtcaccggagtagctgtcgatgccagaaaagtcaacggagtagctgtcggcactgggttagtcatcggagttgctgccggcatcagaaaagtcatcagaattgacattgtcgccggaaaaatcactagaaaatcaccaagaaatttgtttcgtttcttgataattttttcgacgactatgccaattctgaatacttttatgaaatttgctgtcggtggtggaaaattcactggagttggaaaagtcgtcggaattggcattgtcgccggaaaatcaccaagaacgtgatttcttcatcaagaaattggtttcttcatcaagaaactggttggtgatttttttcagagacaatactaattttgatgacttttctggcatcggcaacaactttgacgacttttctagcactaacagctatttcagttatatttccggtgccgacagcaaactccggtgacttttttagcatcagtgacaaataaaactacctaaacaagtaaaaatattaaaaatgagatttgaaaacctaatttagatatatatggcatatcaaataccataaaaatacctaaaaataaaaaaaaaataccatataaattagtcaaacttaaaagtgtcatatttacgttaacaacttttaaaatcccataatgagtgtaatttcctctaaaaaatagtcaatttttttctgtttgaatggaaaatcatactttattagataaccatttcagttaccaaaccaggtaacaaatcagttggatcagacttcagactgaaaatacaatcagggaacgatacagaggctctagcgaacttatgagccaccatatttgttgatcgacgaacaaaataaatagaaacattttttaaaacattaagcatagccttacaatcattaaccacttgaccgaacgtggatatcataaaaattgagcttcgcaaggcttgaacaaccgaaagacaatcagtttccaggaccactttttgccagtgacgagccttgatccaacttagtgcttgacgtatgcccatggcctcgataaacttaggagaagagtgaccttggaaaatcttggtacgaccttcaataagcaacccctgtgcatcccgagccaccaaaccaatcctaaattgtcgggtttcaccaaacaccgctgtgtcaacattaaccttaacactatgttcttgtggagccgcccaatgctcagctccgtctccatgaatcaaactagaagacgagagctcaaaaccagcagattgagcattaaggaagccttttactgatgaaatgatgctatcaacactctgaactttatttttccaaacccgatcatttctggcattccaaacagcccaagaaactaccaccagcaactctttcttctcacgatccatgtaatgaccgctttagtaatttggattagtaaaggcannnnnnnnnnntttttattattttattattattagtgaatt

SEQ ID NO: 119170 - DNA, 1683 bp, Cannabis sativa
gatagtggtactactttgtgaaatatggttcagacccatctaaaaatatttttccccgctaagtataataaatttatactactaagatatgaatatgtaaatatgttacgcgttaaatttgtttaaaccatcttaaaatattttttcccgctaagtataataaatttgtactactaagacatgaatatgtagatatgttatgcattaaatttgtttaaaatggccccctaattgaaaattttaaattttttttctttatagagtaaattttaacaatctttatagagtaaattttaacaagtttttagagtaaattttaacaagttttttccttactcttgcactcgttagtgttttcttaaaatctcaccgtacacatctgaaaaatcataaaatttctcaaggaggaggccaggaccgttgtctataacttccctattgtacttgtggagagaaaatgtagtttttgagcactaaaaatcatttttatcaaaataataaaaatctcacttttctaatagtagtacccctttgtgaaatatgacccgcacctatcttagaatatttttccctaccaggcacaatgaattcgcactactaaaggtgaatgtgtagataggtttcgcattaaatttgtttaaaatggtcccttttaaaaaatttaaaatgttcttctttttagtgtaaattttaataagctttttccttactctgacactcgttagtgttctcttaaaatctcactctaaacattttaagaagtcgtgaaatttcatagagaggaagccaagagcgttatccatcacttttctattcaacacgtggagagaaaatgtagttttcaagcactaataatcatttttatgggaatagtaaaaatatcactttttttatagtggtacccctttgtgaaatgtgacacatacctatctcggaatattttttcccgctaagcaaaatgaattcttactactaagatgtgaatatgtagatatattttgcgttaagtttatttaaaatgaccccctaattcaaatatttaaaaatgttcttcttttcagggtaaattttaataaattttttccttactcttacactcgttagtgttctcttataatctcaccttacacatctcaaaaaactatcaaatttcatagagaggaagccaagactattttccatcacttttttattgaacgagtggagaaaaactgtagttttcaagcactaataattatttttttggaaacagtaaaaatctcatttctttaatagtggtattgctttgcgaaatgtggctcaatcccatctccaaatatttttctctgctaggcacaataaattgtactactaagacatgaatatgtagatatgttacatgttaattatgtttaaaatggccccctaattcaaaaattgaaaatatttttctttaaatggtaaattttaataagttttttccttactcgttagtgttctctttaaatctcactcaacacatttcgaaaaatagtcaaatttcagagggaggaaggaaagaccttgtctatcacttttgttttggacttgtggagagggaaggtagctttcgagcactaaaaattatttttatcgaaatagtgaaaatctcacatttctaatagtgcccctttgtgaaatgtggcccggacccatctcagaata

SEQ ID NO: 119171 - DNA, 626 bp, Cannabis sativa
aaaatcaacaaaaatcattagtgacagatataaaatataattaaatatttattaatcatcaaaataaggagacctaagagtttgagtcaatagttttggtttgaggatcgcccaccttcaccttccccttgtcctttgtaggagttgaggtttcagtgttggtagggttgctctgttttctccatcaaaaggttcttccaaagtatcctcctcagagtctccgtccaggtcgctgagtttatccttgagatgagccatcattttctccctcttttgggagaactcttcttgacgtactaacttttgttgagtttcaagtagctcattggacactcgaattaggtttgggtcgtgctcgtagtagtatccatctttgtattagccatctatgatttctccatcatcttcttcttcctcttctgtgagatttttcttaacgaactgctctcgtcattggtttgttgcaggggtccgaccatcaattttagacacttctccgtccctcacatgacttgtttggcaagggcaagtgattaatagtgaaaaatatacatttaagtaagcttaaagtataagataaattaaaaataaattaatattttcatgaaattaataagatatatttt

SEQ ID NO: 119172 - DNA, 1381 bp, Cannabis sativa
aaatatttccaacatggttcgccagcaatagcgagaacatcggcccatcttttcttctgtttgaggtattccaccatactgagagatccctttcaagctgtctgaatttttgtgcgatactcatccattttagccttggaatgagccccatacaacgcctgaagagcactccacagtgcaactgaagattctgaacccataactttagttgggatttcctctgtcatagatccatatagccaacctagaagtaactgatcatgtatgatccattgctcaaaatttgggttggtttgaacaccaaagccaacattttcatcattgtcgagcacacttggtatggtctcaggaggtcttgaacgggcaccagtcaagtatccgtcgagacgatggccacgaacgatggtaaacaccatagttctccaaagagtgtagttattccgatccaacttcaaggcaaatggctgagtgagtgtgctaccaaacggtgcacttggagtagaagcattactagcagaagctacattagtggttgttgcaatattgctggccgtagttcttgcgcctccagcagaggcctgattatgtggggtttggtcaccagtagacataggtaaaccctattttggtggctctgataccaagtggaaattgctagtatttaggagtaaaatgctctgctcaattaatgcagaggctaaactttcattatatagcagcagcaatacaaaaggaataacctagaatattacagccaatcattgacacctttgccctgatatcctaacaacctggaggatattctaacagaattgagagagtaatcattacacaatgatgagctggacagtactggaaaaactacaaaaatagacacaccaaaaagactatagtgaccctgcttgagaatactcatttcttaacaattaggggttctcagattctcgcaatactggtggcattatccaaagctaaaactttatcgttttgtgaagagttgtcggcgacaatttttgattgaaccagatccgattaaaagagttgattatgagtgagtggatctctgattgttctatgtgtgtgtctttttgaagttttttttttttcttttttggtttttgcctcttttttcttttgctgcaactgaacaatgaggaaggtgtcgatgatgaaatattgttactctaataaatgcattaatcagtgtacgaatatgggtttcgtaaatttttttcaaaggtataaataaaagtaaggatacattggaatagttttggtagaatttacttgaatcattttttagctggaagaagaggatgacatttcacaaatttttagcatttagttagagttttagttttttggctttaattaatgattt

SEQ ID NO: 119173 - DNA, 1139 bp, Cannabis sativa
tttttaatattggatattggggtgttatcattttatggggtgcaaataaaactccccaaaagtaaaacaagtgatgaaaaattgtaggggtacaagaaaggctgtcttgccccttttatgaaataaagaaaaaaaaaaagaattcattctgaaaactctgtataaaagatgcagattttggagcatgaccataaaagaataatcatttcttgaagaaaataatattataataaaacctataaatctactgtcataataactagtagccatagccatgctcaaatgcatgaatttgttcccttgtttatatcaattctattcactttgaaattgctgcctgtttctcaatttagagacattgcatgtgcagtgcaggccatttaatacctattttactttcacttctttattatatttattgtatggctattaccttagtggcttcatagaaaggaaaaacctattgtataatgtaactattaagaactccttcggtagttgtataagagtattattattttaattaagtaatatgtttaaataagtattatatgactgctccgaacctgaattcagacctaaactcaaattctgaacttggcccgaatccaatctcagacctaaactcgaactggaaccccaatcccgaacccgaccttggtcctaaacccaaacctagactccatccccagacctagcctcagttctcagaccccaaatcttagacccaaacccgaattcaaaccttggactcggtcccaaaccgcaaacctaagccccgaccccagacttgaactcgaccttagactcagacctcgacccaaactcaacttcggactccaggcacgaccccagaccctaaacctcagacttagacgaggtcgaagttgaggtcaaatttatggcaaagataatatagttttacataagctattaattcaactcaatactaaacataatattgtattaaataatattaatacaatacaatacaatccaacacaatactactataaaatataatttgttataaaatattagataatacagtagaacctctatgtaagaatactctattaaagaataacctctaatttgttataaaaaaaatcaagtcccaatttaggcctattataaat

SEQ ID NO: 119174 - DNA, 1064 bp, Cannabis sativa
acctcctgcgcacgaaccacctccaagacgacgaagcaaccaccatccctaccctcccaaggcccatcgacgccggacgacagacggactgaaaccccaagcgatcttctgcctcaccggacttcataaccttctcctccgacgttattgacccacgggcctttgtaaccttctctaggttcgacaaattttttatatcatcgcaaatctcatttaatttcagttcatgtaattttttttgtctctctattcgcgtgtattgctgttctcaatctaggatgtcaaggcccttgggttagcatactcttttttcataaatccatcttattctcatataaaagaactgtattttgtcaatgttgtttgtgggtgttatgtaaaggttgtaactgctatgttccaacaagcaatgaaactcgtgtaaagcttataaaaacccttaataatattgctactggaaaggtgaatatattttcaaactccaaccaaaaggctcctattagtttacatcatgttttttttaatgatataggaagaacaaggacttttactgaagctgctgatttgatgaaaaaaatagcggttggtcatcaatttgatattccatttctgtaaaattcctttttcaagcacactttttgatggcttagctttacaggttaaaacttttggttctatggctaaaactgagaaaattgctttcattcttatttggctatcttatcctctctctctttctctgatgtaggtagaggacattttggtttgtggatggagcttcggggttcattgtctaggtggactaaaattgttatctgatttgtatttttatgttttatgtttaggtttctaatatttttggacatgtttatgcccaattctgtgttcatacctactggattataaatattgcagttaaaaattttgtattgtattttttgttaaaattttggtttaatgttgtaattcacattttaatttcctttctttaaaaaggaatgtaataataattatgtgtttatttcattattttttatatataattaaaattattattgttatat

SEQ ID NO: 119175 - DNA, 2970 bp, Cannabis sativa
ttctgatagggcacaaaacccaacaatgtctttgtaagaaccagaaccaaaaccatttaatcctgggctcttagatgggtgaatgctaaataaagctttcttgacatcccccttgttaaaaggcctaatcaaattggcttgttgctccaagtttagacatttcccctgttttatgcaattaacatcaatgttgctcgttgcattactcttgctgcccatgaagttctcaaaatgcttcacaaagtgtttgactacttcgtcaaagttatcaacaattgcatcatctttcatgaaagtagtgattctattctccattcttcttttcctcatagccgcatgaaaatagatagagttttcatcactaaatttgatccaattaatctttctttgttgccgaattacctgagtatacctgtcttttgtagtcacaaactcctgctgcagtttagaaatagaagtttgctgcattatatcagtcgggttagtagctgcttccttttgaatgagacagtagttgtccttagctttttttgtactccatagcagcatcccgaacattgtttctgctaaaaatctttaaagcatgcttaactctgaacattttctgcactaaaccttcaagcccaaaactagcaactggtttgttccaattgtccatgacagtttgatgataccccagacctcccatttgaagcaagcatcagtattgggaaactcgtccaaccaaatgttgtttatgaacactctatcaagtttggaaaagatcctatctcctacctcatgcttgtttgtccaagtgtaaaaggaacccgagcttttgaattcctcaacttgacctaaagcaagccaagattgagcatccataatatcttcactttgaataggtctacctccatatttttcttgaaaactgaacattgagttgaagtcaccaaagatgatccaaggctctttaagcttcccaaaaccagcaagttatttttttttttgatgaatcagtgtaattttattgctcacaactatgtttatacaaactataaactagcaagttatttatcccaaagacatttacaagcctccattgagtcacttccatagacagtcgtgacatataaggaattcttttgaccacaaaacttaactttacaatgcagtaactggttttcctcacaaatgatattaacctggacatatttcatttgccaaattaataaaattcttccagataagacactactagaataatgattccaattaggaaaattattctccataatggcataggttttctcatgtttaatcttggtttcaaacaaggctccaaatccaatcaatctaagaacatcaagaatatcatttttcttatcctttttattcatgcctttcaccttccaccctaacatattacaagcattcatcaaaagtttgattagagttagaaacctcatctgttgcaacaacttgcaagactgcatatccattactcttgtttgcaattattggagcttccatgttcttggttgcttcactctgtctcagccctcttcttttgggggtaatccacttgctacctatttcaattccacttgtttcttctcccactatttgcttctgcactacattattcccctgatctgctattgattcaacaacatcagacttgggttcagtcattatcttctcccctagttctttgtcttgactgagaatatcatctttcttatccagcttattctctttttcaacaatctatttcttcttccatatcactttcttctctttattacatttaacaaccgtatgccccaagttcgcacatgtcgagcatttaaaagggagccattcatattcaaccatctgttctaccaactgttttctttcattaatgaaggatatagttttaggaggatcatccgaaatttcaatttcaacaaggagacgagcaaatttcaccattgtacgctcttgagtcaccttatcaatcattaccggtttgccaattgtgctcaccaatgcactgagattatttttaccccaatattgtaaccccagctcattcagccgaatccaaacaggaacagagctcaccattcgagtagagtctatatcagtagaccatggtctaagcaccacaagttttttctcaaagtgaataacaccagcttcaaggattatatcacgagttgcttcatctctaaaattaacaagagtgcaacctgagtgcattttaacaactttctcaactcccaaatgaccccaaattctcttcacaaatccctcaaaaaccttaaatggagggttagcacctaagacaatacaaacaatggcatttttccaaaacaaagcctctgcctctgcctcaatctcctctaggtcaagtttagccacaagctgatcacctactttgataggttcagtatacttgagtctagatgaaagagtaggtacctggttagctttgaacttgctccatagatcctttgcacttgattggaaatcggctttctcagcttcgtcagcccagctaactgctttaggagaaacacgagtactctactcagcatagtaaatctcaattccagtctcaatcgccaggttctcgcaggtatcatggaattcttccatttgctcacgttcagtggcctcatcttggattaaagggagatcctccacagcttcattgcccaccatgatggtattgactggctttcagatgaccctcttcttcttcgccatgggagaagcaggagaaacacgcacaccttttgttaacagtaataaaagttgattttgtattttttgtgtattttttttttgaattaattcaattttgttattaagtgtattatacttttattattttaaatgaaatgtttaacaatttctttttaacaattcactcacattcgaaccaatggatttgagttagcaaagtcctaaagtgattccttgcaaaaaaaaaaaaaaaaa

SEQ ID NO: 119176 - DNA, 1120 bp, Cannabis sativa
tttatacacattaatttttactatagataatttacttaattatgatgttgaaattaattatacattcaacgtaaataggtgtgaaatataaatatgtcacaattattattcataaaatatgctatgttaatttatgaactttaagccatttgtggtatcaaatttaaatttgagattttatatatatcttattacttattatataaatctctatttaactataatttattacgtatttaacagataaaatatacttaattaaaaagttaaaatatacctaattaaaaagttaaatttaacagattttatattgctaaaattattttaaagagttgcatcttctcactatactcactcacacctatcccttttcatgaatctataccaaattatatacatatgcagctatgctatatgtacgatcaatgatacattttattattagagttttcattattttgttttaataaccacatatatattttcaaaagttaaaaaaaaaaaaaacaactctaattaaatattacttctatgatagaaaattaacttaattattgtatgcatatatatatagtcgcaaattatagtatatattaatacatgcatacaaattatggtcgagtgtggtggatgactgtagaattgtagttgtcaatgtaataaaaaaaacttcaattgtataaataaacttaatgtgtttaaagagatgatcaaactagtaaatacaatcttttaagttcaattttattttctatttattccttagtgtgtggtataatgaaggcagtacaggttttcctatttattagagaaaataactatatatatatatgcctactaatatcagtacttgataatcatcctaaaatattatgtggaaattgatcctctaaaccaactttctatccaactcttttaaaccaactaacttaactaactttcggttatgttagttagttagttggtgttatccttgtttaagttaggattatatataagtctagtcttttcattttaaagaagaaggaaaaaaacagaaggtagaagagagagaataagagagaggattgaagagagaattacttagggttctaagctgagagttctgttcttgaagagg

SEQ ID NO: 119177 - DNA, 806 bp, Cannabis sativa
tctctctatatatataaacttattatttaatgttatctacatataaaaatattttaaactatatataatataaagtattgtatttaataattttttaattgcagatacttggtgtctatgaatgggaaggatgcaacccaatgcctccggaattttggttttatccatctgtggttccacttcatccatgtaataattcgactatcataatatatttctttattattattttcaaaataaatatattttttaatatatatttatatcaaaaaaatatcaggtaataatgtgattatttttcattattatagttagagaaggtagtgttaaatatagttagagaagatcgatctctcacaatttttttcagataatttaggatagcaaattataattaatattcaaatgtctaatttacacgtacacttgttttgacatttatacatgggtgcaataagttttatatcataatattgcatcctaagttactttaaatttcttaaaaacttatgaaaatcttgtgtatacacattatttatattatataaaataataaagttgcaacttatttatgtactcaatatatgaatgaaatatttatagctagtgatttaaaacaataactacttactatagcaccatatagatcattctttttttttttttcttaccaaaataatttaccactcttaaacatgttttgtatactcttgacaattttagaaaattactaattaacacacatttaatattgtatgaacagccaaaatgttttgttattgtcggttaaccttcatgcctatgtc

SEQ ID NO: 119178 - DNA, 3395 bp, Cannabis sativa
ttgtaagtgaccaagagactataattttgcttgatcatttggggggcacccacaccgtacaacatcgaacaagcacacctaaacttaagcaaaatttaaagctttgtaaagtaaaaaattgaaagctaagtaagtgcgaatggcatacttcagattaagctgctcgggcaactgcatgtatagtaaaagaaattaaacacaagattaatggatgcaaggtcggttgcttattcaaaagtaaaaggccctaaggccatacacgaacattgttcaaaagtaagggctctgaggccataaaagaacaaaaatatcatctattcaaaagtaaagggcctaaaggccataaatatcaaaagatgaagtatgcaaaatgaaagcataagaataaacaataaagtcctcaaatgttttcagaataataactggagtcgacgggttcaaagttgtgttaaaaggactagttgtctagactaagtaagtcttcatcaatctaattgtcacctccccaaaattcgtgcaggttcatccctacagaaagataaagggatatgaatagctggggaacatgaaaagacttagagaaaagacaggttaactggccaaaacctaaggatattaaccaaacagccttgaaatatatatagccataattggcaaggtataaaatcaagaatcatgaaccggatagcctatgaaaggccattgaccggttaaggaagattcaacttgagacgtaccagatagagctcctaaaagagggctaagtactaaatgggggcatacaatggatctaagtcatggatagagttcctatacaggatctaactcatgaacagagttcctatataggatctaagtcatggacagagttcctatacatgatttcagtattgaatagagttcctaaacaagatctatgagtcagacaaggtctttaacaagatgtcagtcgatgccagtccaagactcgatcttattcattaaaaagtcaaacattatgcatcccaaagctatcaagtagattataatgtgaaaagacaactttaaaacgtgagaattaaaaattttctaaaagctttaaaaagcttgaaactcatcaatggtagattcaaagaaagaaagaaatattgaagaagagaagatgaggtatatataaagagagagaagaacaaaggtttaaaaatcacatcatttgaaaagcccaatacttggccagacaaggttgtttggtgaagcacatcattgtgttcagctcgggtttgtctacttgacctactatgtccacgggattgcgattgtcctgtgcttgagcttacttcatctcgtgttggtcttcttcttcggaagatattggacacacaccctctgcttaaatacgtgtgcacattttctctatccgcgcgagaaggacgttgaggatgtctcagtagaagaccactttaccttggttagtttccagggttttttttcattatcacgaggctaccttacctcttcattcatacaagatgattctggcatgctagttggttcattcccttggttagcaaatccatgggaagtttgtggaacatctcgtcgatgttcttaattccttgtattattaggatttgattgattttctctatccattgggacatcccttgtattcccaagttgctcctcttgagtatttggaggattcccttggtttacttcttgtctgctagtcttggagcctcgaggtctccttacaataggatcaggttggttttgaggatctgttctctatgtagccttggctgctgcagcttttctctccaactcagcatttcatcagtttaattcagccaatcattgttgaagtttcctattctcttattctactaatggtacgtatctggtaggatcataggcatactcactggatttgatcaccatcaacattgaaattaccatcgttcctccctaaacatggtgtttcagatgtgttgggtttttaagatcccatagtttctttgctaggacgacctgttgtttcctcaagacgattatcgttacgttgattgttatcaaccatttaatataggtagaatgtgtttatgaggatggatttttttttaattttatcatcaaggctctcgatgaaagaaccaaactgttatagcagatttttcgttaactaaataaatagccttttttgcaaaaaaatactctatagaaataaatgaaatatatgacaccagatattttatgtggttttgtagttaaaatctacatactccacaagtccttattatttgggatattttttggatacaaaatgcaatccaatatttaaaatgatcagattttctctctgaaatttgtcgtcccttttcccatagattttgcccctatttataggaatgtaggttgacaatttttctttttgggattgatttatttacaactattaataaaacgttgacattccccatgtttcatttattcacacatgggataatatctaataactacccaactgttccttatttttatcctttagacggttctgctgactaggaaggttgtatctcgtcaaacatgagctctccttcttttccatcttaataggaaaaaacactaagtgttggaaatattcatctcgctatatcccttcatttgtattatggatgcgagatgatcatcatgctatgagtaacgtgaggcgattgagcgtcacaagttcttctcttctaaggagagggttcatgactcatgaggtccttgactgtctcgtcttgtacattttatttctctatttgtctcggggtaaacatgtgtctcgttaatcttagtttaatagttattattcttgtctcacataagactaagcagtcaacgagtttgaacactttctatcaaacttgtacttaattgtaacgagttattttaaagagcatttaatgatgctatgtcattattattatttttttttgagttcgttcaaattctttctgttgaatacgtgccaacttctagtacatagccaaatttctggtataacattgtgttatttcaatgatccaagcttcccaccttcatcttcatcgaaatcttattgtgggtaaggtttctattcctgctctttcacttaatttaattaattttgccatgaatccatgaacattatttcttattttgaacatgctttgattcttacgttagattatagaccattcggtattttgatctgcatgatagccttaggatagacaatttgagatttctagacgaaaaagaactgaatttgaccttcattatgattcttagctctttgactcacgaagaacatgaagaatatgtttgagttcttgaaaaatcatgtgttttgatccattcacatgctggccggccaaggaggctttgtttga

SEQ ID NO: 119179 - DNA, 3913 bp, Cannabis sativa
catgtggactgttatataaataattctaatgatataaactggcattttactggttattatggttctccttatattgattcaaaagtttttacttggacccttcttaatcgcttatatgacactactccccttttaccttggttagtaattggtgactttaacgattatttatcccttaatgatcgtaattccacctcctcccctccctcccatgccatgcaccattttcataattttctgcatattcgtaacatgacccctcttcctcattctggaaaaaagttcacttggcgtcatggctcaatccttgagcgccttgactggtccacaatttcctcttcttggaaaaggcttttccctcatgcctctctcactcacttggggttttatggatttgaccatagagccctgaaactccaattagaagacacttcttctacgcatcaaaagcactcccgctttcatcttgagaattttcttatcaatgacccatctttttcaactttggtccgtgactcttggtgccttccttcctcttcctctctttcccctttacaacattttcttaacaaacaatccacttccctttccaacattaagagctggaaagcttcacaaccatcccttaaactccaaattgcaagaactcaggctgagcttgaccacttgttgaattataatcagccaactcctcattctactcaacaaatctctcacctccaatcttagcttaacagacttctcctaaaagaagaaatcttttggaaacaacgatctcgagttaatttgcttcaggctggggataaaaacactaggtatttccatcaaaaagcctctaatcgtaaacgcaataactacattcgtggtttaacccttcctgatggttccatcactcatgatacccaaactatcttcactcagtttcattcctattatactgatattttttgctctcaaggaacttcttcttctgcaattttctccattcttcagggtgtaaccagtaccctctctcctgcccaatctgctttttttgttgaggagtttactgtagatgagattaaaacagccatgtttagtctctctggtgacaaatctcctggtcccgatggtttgaattccttcttttatcagaaaaattgggacactctcggatccgacctctgtcagggtctccttcatatccttaacaatcagggggacttcactccaatcaacaacactattttggtccttatccccaaaaggaggaaccctaaaactgttcgtgattttcgacccattagtctttgtaatactttgtacaaatgtttctcaaaagtcctggctaatcgacttaaatcggtgcttcactgtgttattagccccaatcaaagtgcttttctcacaggccggcaaattactgacaatatagttattgccaatgaaatcgttcatgccattcattccagaaaatccagcaaagtaggttaggctgctatcaaattggatatggaaaagggctttgatagagtagaatggtcttttatctctcgcttccttcaccatatcggggctcctcagaagtttatctctctcatcactaaatgtctttccactgttacctaccaattatctctaaatggtaatctatcaaatgtgttttcttcttcccgtggcattcgtcaaggcgatcccctttctccttatcttttcctaattgtggctgaaggtttatctgcagctatccgtctccatgaggaagttgccctgttttttggcattaaaatttgtcgaggtgctccctctttttcccatcttctttttgctgatgatagtatggttttcgtccctgttacatctcaatcttcagaagctattaataaaattctgcatttgcacttccaagattctggccaatctgtcaatagggacaaatcttccattcttttctcaccaaatacttcccatgattcccaatccagattccgaacctccttgtttctcaatggtgaaggtttcattagtaaataccttggagttcctcattgtattggtagggtcaaaaattctatctttcactaccttattcagaaagtttcctccaagctcaacgtttggaatgaaaagctattctctcgggcgggcaaagaaactctcattaaatctgtcattcaagcaattccttcctttgctatgtcttgttttagacttcctaaatccatctgtgcttctattcaaagcttaacagctaaattctggtggggctttacttcgaataagaggaaaatccactggaggaactggtcagccctctctgcctctaaattctttggaggtctgggttttctttctcttacttccaataaccatgcccttctggctaagcaggcttggcggatttggtctaatcctgattccctgctccattctcttcttaaagctcgatactttaagcatactgactttctccatgccccaaaaggccacaatccttcatttacctggagaagtcttcaatggggttcccaactactcaaaaaaggcctcatctggaaaatctgttctggccgtgatatccctatttctgctcctaattggattccccaaatttcccatccaaccattcttcaacccattgaaccctctcttgccactgtctccttttttgtcaaccctgaccgaacctggaatactgaaaaacttcaccacttccttccttcctatcaagcaaatgctgtcctcaatattcctttggatcttggacccactgactctctcatttggggctttcaccactctggcattcttacagtcaactcagcctatcacctagcccagcccattgccctcactacttctccttccacctctgatcctaacccttttaaggattggtggaaaactctttagactttgaaaatttctcctaaaatcaagcacttcacttggaaggctttcaaccatcttctcccttgtgctctaaaccttttccacaagcatgctatcccaagtgcttgctgttcttattgtgggggaagtgcagagtcggtttctcattctcttcttcactgtcccagagttaaaaccatttggcatcactcaaattttaaacagttttttgtggactatcgtaggcttgatatcagagatttttaccttcatagccttactttaattcccagagctcaccttcccttgttccttggtatcatttggcaaatttggaacatcagaaatgctcatctttttcaaaaacctaatgtatttgataatgttcaagattttgtctcaagttttctgcaggattatcaggatgctcaaattcatccctttgtttccagcatgactaatgatcattcccctgccgttgtggatcatattctgcttccatcaaccactgctctttttgttgatgctgccctgactactaatacaccagccacaggtatcaggatggtttttatggagggtttgtctcacattcaacagtctgcaaggatttacaaaccaggggcatcctctccaatttttgctgaagctcaagctctttgtgaagggctgcaatggtgtttgtcttccaatttgacaccaagatttatcttctctgattgtctcaaccttgtctctaaggtgaatggtaattggcatgactactcccctctttctactcttgttcaccagatcagaaccttcctctccaggttccctgaagctactttgctgcatgtatgccgccagcacaatgacaaagcacactcccttgcgaagttagccctcaggttgcgagatgaagactaggaggcttctttccagcccccttcttggctgtctgtttttccttgtttttcttgtaatcagcctcttgttgctcaaaaaaaaaaaaaaaaaaacattctctcttttttatagttatagattattttgttttttt

SEQ ID NO: 119180 - DNA, 1439 bp, Cannabis sativa
atattttttaagaatataaattggaagaaaaaaaaaactaatataattaaagatatatgttttatgtaaaataaaaataattaaaatggggtgtatttataagttttgaagtgtaaataaaattcccctactactaaatttaaagttagtgatcagcctacatctaaagcaaccattgaaaaattaagcttaggtacaggctctactctgggcatatgcggactaggcttatgcctacgatctacctagcgtagggcccaaacaataaattttctctttttaaaacaaatagttttttattgattttaaaaagactatttttctttcaaaataaggacccaatttttttttataagtcaccaaagttcaagactgcccctacttaaagtatcaatttgttgaaaacttattttattaaaattgatttaagagcaccaattcaatctactttacaaaatataaaggccaatcatatatttttcgctaatacttttgaaaaaatttataccttttttctttataattttatttaatatatataaaataaaatatattcacatttatttattgttttaatttatttaatgattctcttcgaaaaaatagatttttttttaattcttataaatgaattaatttaaaaaattaaaataattttttttaaatacaaaaataattccgatacaaagcctaaaaggtccaaaatacaaagaagaacacaaaatcaaacaattagatctatggaaagctccgacgatcaaacacaagactcatctacaataagtgtcttctttactagagaataaacaatagtatttaatgacttattacaatgggacaaaaataaactaaggaaaatattctcacactataattttttttaaattgcgtatattttgtttttgaaaaaattctaataagatttcctatgattttttattttaatattttttgttataatatttaaaatataatttattttaatttagtatgtatagtttttaagaaaatgaattcgaagaaaaaaattaaaaaaaaaattaatataataaaagatatatattttgtgtaaaataaaaatgattagaatgaagtgtatttaaaaatttttggagtgtaaataaaactctcctattactaaatttaaagttgatgatcagcttacatctgaagcaaccgttgaaaaattaagcttaagtacaggttctattttgggcatacgcgggctaggcctatgcctacgaccaacctagcgtaggagcccaaaaaatatattttctcttattaaaacacgcatttttattactgattttgaaaagactacatttctttctagataaaggcctaattttttggggggactttttcatttttacacttcaaaataattttctttgcatttttatgaaattctacatagaaactcctattgcaattag

SEQ ID NO: 119181 - DNA, 925 bp, Cannabis sativa
  modified_base (888)..(899): a, c, t, g, unknown or other
acataactttttactagtatatatataaatattaatatatatatatatatatatatatatgggaagtaaagtgtgtgatagtgcaaaatagtttcactcatatatgggatatgcattttgttagatataatatgctatattgggatttgggtttgattttgtgtgcacatgggttaggactcacacattagaccaccacacacgcgtgttgtggtcgtccgaccatgtcgagttgacgggcatattggtgtggtgtcacctaattttttacaaaaaattatttcataaaataaatatttttatatatttatttagattagtcaatgatctgtttttattattagagaacattgtcccacatggatcatgtaaaagtattgagctatatataagaacatagactacttcactcatcaccaattggttttgatatagaaccacatgtttctcaagatggtatcagagaatatatctttttctacacttaaaaaagttctcttaaaaacttgcaatttttttaggggaaattatcctatatactatatatttattttttttttcaaatttacggtttggattgctacggtagtttttccgctagtttctatgtgggttgctatgtgaattttgattgcgatttaggttgttacgttagttgctatgtgagtttctataggtagattttcgtaaaaatgtgaaacattattttgaagtgtaaaaatgaaaaaaaccctattttagggtgtttttatgtggtttaggcttaagactgcattatgctatattccacatagatctggcccgagcccagtggaccaacactcaaatttaggggtgttcatcaaaccgcccgcaccgcaccacaccgcaaaaaaatgcggtttgaannnnnnnnnnnngcggtcgcggtttgaatttttcctaa

SEQ ID NO: 119182 - DNA, 760 bp, Cannabis sativa
tttcatgtccgattggttggttgttgttattttttgtgtggaaatagttgttgatcaatttttctgcaatttttgggttttggtttattttcatcttctccgatggtgtccaataggggtctgatagtggcccaatagtttgttcaaatttgaggttagggataatgtttaaattggttcaatagtgttcccgatataggtatggtggtttagggtgtccgatattagtctgattgtgtgtccaatggtgcgtttttatgggctaggtctgattgtttgtctgatattagttcgattgagtctgatggtttagtcagatttttatttgttggaattgttcagaagtggtccgatggtgttcgatattttacagatttattattttttgagaacttttttttatcactggtaggtttttgttctaaatttttaattgtgctttttttctttggatgacaagttcaactgtttttgcagtcattatgtataatagtgcttagaagcttgagggtagagattgggtttataaccaagataatcatttgacattcgagactgatacgaacgtaacttactcacatttggttgatcttttgttcgaagaactcgatgttgataaagtgcagtattacttaaaattcgaagtgaattataagtacatgaaaaccttattatatcgccctgaagttaatggaaatgataagcgtctaaggttatttttgtttatgcttgtgaagaagccagatgaatttactccctt

SEQ ID NO: 119183 - DNA, 1939 bp, Cannabis sativa
atttcttcttttactttaattatttcagaattaattacttcctttataaatatatttatgttcaattaattaactatatatatattaacttatgttgcttacaatatgttcatcatgattgactttgtaagctgattcgctaattatgtcagttaattgttactagagagagagatcaaggtatattgttatgtagttctttttttttttttcttaattcaatctgattgattatttgtaaggaaaaagaagaattaatcacaaaatatatagtgaattactaaactaccctgaagaaaatatgcagtaattacttctttactaaataagaatactatgcggttcagtatttaagtctaacatccaaatttacatattttaattaataataatattaaaaattacttagcagtgcatcactacagtttgtttttatttaataatttaagaaaactagataataaattgcaaagtgatagcgatacatctgagtggtagtgctcaaaatccatacatagtaaaaggttttctagtaagtactaaaataatgaaaaagaaatcaattattgatctccattatttagtgagtgtgttttgtttataattaatcacacgataaagtagctattagctttctttcttttcttcatttttttggttttgaaagggaaagtacctagctatgagctttatgataatgtgtaattaataaatatattacacattgaatctcttatataaatgttttgtcctcaactgaccgacactattcgcgacgtaaaataaatagtataaaattgtgtcatatataacaacatgttacttgctaattagttttgatatggaattccataattctgaatggaagaaaaaaaggaacgaaaaattacttgaattcttgttatattaataatggggaatttcattaaattttgattcagctttcaattggagtggagtacacaacgtggctcaagtatcaacagaagccgattacgataattgcaacacagctgcagccagagtactaagcagcacaagcccattcgagttcactctcaacaccactggtgaccactacttcctctgcactgttggaactcattgccgaagtggccagaagcttaaggtcgacgtagatacctcaactaccacaccaactacacctgctactcctacaactcctggatcaccgactaatggtaccactacttcttctcctactacccccaccacttctacacccgccaattcctcgccttcattcgcacccctcggagctttatctgcagccatgtttgccctagtgctctcctccttcatgtagattaaagagtagtagtgaagtgatcgatagtagcaagcatggtatatctctttgcttgtggttttttttttttttttttcactgctacttaattaatttttattgtactgtttgaccaccgtatgttttgaaactgattggttctattatttattaattatctgtattttcttattcgatcgggagaattatttcttgaatagttgttgataattatatgtgatgagattattggattattattgtggcttttattgtttgaaatttaattttttgtttgtcttttctttcgtggtggttgacaagattaatgactctcgttcggtctcgtcttggtagatagataggtcgttgacaataaaaataagttaattaggatttttatccttgaattttgatatgtattaaattatgttctttaatttttaaaagttgttaaaaatattccttcaactgttgagattattgaatttagggatttttattcaattttagtaaaaaaaaaaaaaaaaaactaacgtggatgaaagttcaggatgtatgatttagtacatgtcaaagtttgaagagtatgatttggtagattttaaagtgtggggagcatgatttagt

SEQ ID NO: 119184 - DNA, 2087 bp, Cannabis sativa
cttagatattagaattaataattaagttggttttattcaagatacttaattatttgtctttaattctaatacattcaattaaatagataattaaatatttaagttgattttattctagacacttaaacattagttatttttcagaaaattacatttaagttgaaaattttaatttaagatcaacataaattagaataattttcaaaatatgtttgtattttaatttattaattatttttcccgttaatttcaaattgcatttattttaaatgcagatgttaacccagattttcttcaaccaaatttcagcctcacggtaatgattcaacatagaaaaaataaaagatatagaaaaataacatatgaacacagagttttttacgttgttttgcagttaaaattctgtatagtccaccagtcaatcttattcagatttttaattttttttagggcctctcttgtatgagttttttcgtcccccctcttgatcttgcctttcattatttataattacatagtgggcagtgatttacaaaagttgacaataaccgttacagcaattattccctcaaatcatgggatttgattacaaatcaagctaagtaaatgaggcctttattattcacacagctatgagtatcccgcttttattgggcgagatcaacgcgtaattagaggcatacagtaaaccttatcccataaggatgccttgctgagaatggagccatgttaactttgatggtgagtagtagctcgtcatctgacttgtcgagattaatattgtttcatctctgataactatatttgttggtgtcgagatgatcttcctcgcatgcataccatcttctagagagataaatgcctcgccgtctattatcttgactcgccaaactatcgacactcagtttgtatatcatgtaatatacactaagcgtttttagtgttatcatttgtcttccacgcagcgaggttgaggcctcatcatgcacacttgcactcacatgatttctcgtcaatacataagttagcagtttgtacgtttctgtctcgtagaaggctattgagccagccgatttataaacatactcttcgaatatgtttccgacgagttcttccatgccaagtgtactttcgtttgcgtgtttgagttcttcgttattccaagcgcgacacgtgtcttcctctgatgtgcttaccgaattttgggtataacaattaccccttaaaaagttctttttaattaaaaagagctttttaatgattacaaaagggtatttctgtcatgttccacttattttggtggttgtgcggtttcgaggcacatcagaattaatgaccatcttttccactcccgctttgaatcatgtccataggatcaaatcttcctctgatctaacgaagccactaccatgggtataaaataaggaaaaaggaatcacctttgcaccattttctccatttcaaaaagtttgagaaaaacccttaaacttcttcatcaaggatcaccattaaatttgtccgaagacttgcatgccatccttgtctttgacctttttcctgtgagtttcctccgacttcatcctctcaaagcgatccttgcttcgtttcaagatttgtagacggagttgtcaggcattgccctaagccctaacttcaaacgataagttgctttcttctttctcatgtttgttacattgtgtggatcagtaacttgatttgtttgtatcgctatcatctcatctggttttggtattttttttagggtttaaactgttcatacttgggttcaggcaatatgtaggttttttcaagatctccaacacagtactttctggtttgataaaattctctccagggattgggactgcttttttgctgatattaatgtcccactctggttttggaatttatcgttcaaaaattttcgagttaatttgagctccctacagaatcagccatccatataaactcaacccatcaaaacccaccttcaaattaaagctatacgatgctagggttagggaacacatagtgagaacccaacaagaagatatttctagtcgctacaggcgcttcttgcaagaaat

SEQ ID NO: 119185 - DNA, 1122 bp, Cannabis sativa
aagttgttctatgattgttttttaattattttttttatgttactgaaacacaatatttttgtgattttaaaactttacacacaatatttttgtaaagtttgtacagtaaaaatgtaaaaaactctgcgtgtaggtattttcgtaaacttttctcaattttacagtatttttgtaagttctcatttggtttgtgtgggaatgttcaagtttgtagcaactaaatgttggagctacaaatttagttttgaaaaaaaaaaaaaattgctagaaaaaatagtgggtattggctagaatgttgaagattttatttaattaactaaactagagacaatttacttcaatttacaccacactaccactacccacaaaatccaattgttcaacattaaagactttaatcacactgaaacttttagatttctttctctaattatttccttggtgttttattaacaaaatttcatttaattaattatttttgcacatttttttttcttgaattcgttctattcttctctaatactaaacctgaaaaatattaataaataaaattacacaaaacacaactaaaaatattttaaaatcctaactaaaaataggactaattaagtcctaacaacttgcaagcttgaagatatataggatatatctttgaagatatcaaactcgtgacctttggtcagcatatgcaaacagttgtgcattggacactggtcggatggtgccattcaccctggacggagtattcttctgtttggaaagtaacatctgtcttgcaagcctaatccacttggagtagtgtgaggtttggagcctttattaagcatattgttctacgtgttcggatgatctgatcgggaagctcgttcacctaacagaaagtgcattgttggaacatgctattttccttttgcgaacttactggtcaaacactctctgtgagatggctctttgtccatgcatcatactgtttggatgatcttccacatgatctcttttgtgacaatcagtagtccagtgattcgtaagagaaaatactgggtaagctatgcaatctcacatcacctaggaaatgtcaagttggatgattttgagactgtgtaggtatgggactacacagtt

SEQ ID NO: 119186 - DNA, 809 bp, Cannabis sativa
aaaaaaaaaaaaaaaaatagtccatagagattagagatctcttctactcctccaaagtcgttgaacactgtcgtttaagagtaaacgacatgtcactaggtgaaaacaaaaattggtattaattaataaacttgaccaggaaactcattaaaaagggcctatataataagaactgtcccttcatattaatatttcttaaagaactatctcccaacgaatgacaatgatataattattcttacaactataaaataaaacataaaaactcaaattcataatcatcatcacaattctttacatttttaattatcttttttttttaagacaaatctttccaaaaacatagaatggcgtaaaaatcatcttacgaatcacttctatcaattccaagtatgaatgttgaaagtaattattagcaaatatagtatttttttatagtagactaaaataaatgaatttaacatgagaaacacatgtaaatttatttatgttacgttgaaacataagtaaatttttattcaattatatttacatccatcttcaaggactcgaaataataatgaatagttgaaaaccatctcatatcaaagttgaagaaaaattcccaaaaatctcacaataacaattaaaggcagctcaaaacattggggttacgagaaggggtctttctcagtatttattttggatattctttagtttattttctgttgagcttgtttttagatgttacatttgtatctatagtgttatttttagtttttttttttttttttttgttaattaggatttcctcccgaactttgacatgt

SEQ ID NO: 119187 - DNA, 1095 bp, Cannabis sativa
acccataaatttctcataaaccatgttagtcaccatgaatttctcataaaccaacaattctgttatataggcacactttatatagaatagatatagactagtaatttgtttacgtggatgtttaacaaatttttattttaaattagataattttttattaaacaaattattgaaaaataataagaattagtattggtatttcaatactaaactttaatcttaccattttgaatataattattttaataataaaataataaaacaatttaaagaataaataaactcttgtatttttttttatttcttaggtatttatattttatttaaaaaaattatatatatatattataatattgataatttattagtttagttatgaatattttaattttattttttaatgtttggtattaaaaaaatcttatatagttatttggatatttttttttaaaaaaaaaaataatattataataaagtttagttatggatattttttttaggaaaaaaatgtttaaatataatatatttttaaacttttcttttatcaatatggaaataacttcattaattaaagaacaacaccaatataatcaaacaagataagaaccggtaggtccttatccagaaaaacaatagcaagggtaaattacacttgccaatcaccctaaatttgtattctgtatttaactatatttttaacatcttttacaatatgagtttaagtgttagagtagcccttaaaaacacatttattttggttgatccaaaggtagtaacaagttgctgcagcagtagcaacactaattttttgcacccagttatctatgttcaccgacagccaaccaatccactctttaaagtccaaaggccacatacgattgcccaaccaagtaaacactaattcaacaactctacgggataagtagtagaagaaaaataggtgttcatgtgattcactggtctcatcataaacaaggcacttgttagagtctgttggaaatattgtgaatattttaacaaaatatataagtgtcttagtgtgtgtgagttggaaagagtcccacatgggatatgaaccctcattgacaagggtat

SEQ ID NO: 119188 - DNA, 1470 bp, Cannabis sativa
  modified_base (1438)..(1444): a, c, t, g, unknown or other
acctcaattgttcatcgaaaagaccgttgatcgtatttttcttcttcctttgagaggccttgtgatggaagtatttcgtattgcgatctccatgtgtaagccaaagagcccaacttctttgtttccataaaagctcctctttggcctctgctgcattaaggtctctctctatctatctccgtttctgccaatctatctctccaagtgaagaagagatatgtttcaattcttccatgagagcctttgtcttagccttaagctctgttttttttcctttattccaatctttaaggacctctccacacacattaatgcaccccctaattccttgagccgatccccattttactctatccatccagacattttcaacaattttaccacattcctcttcgctagcccaagcctgttcatagtgaaatcgtgatttccacttagaactcgatttagagagattttcactattgttgaaagtaaggattaaagggcggtggtccgagttccaccaagggaggagggtgacttttgatacacaaaatctcttataccattccggattagccaaaactatatccaacttttcaaaaactaagttgttgtggcgcctattacaccaagtaaaatctcccccttccatcttaatttccttaaagttgcaatacgaaatggcctttcggaattcacgcatctgagagtcaagtttcatacatccccctttcttttccttttccgtcatgatctcattgaagtctcctccacaaagccaagttccttgcagcatgtttctaagtctctccataagcagccatgaatgtttccttccacctggatccgggctcccatagaatctagtgaatctccaaataaaacccagccctttctccacaactgcatctatgtgacaccgtaaatgacttgatgttcacctcccaaggatctttccacaagagagccaaaccaccactttttcctttcgccgccacaacaaagcaactgtcaaaacccagaacaattctaattctttccattgcagcttcatttagtcttgtttcagataagaaaatcatcccgggatgatgatctttaacatgggagcaaagagtttttaatgtccaagggttcccaagcccttggacattccaaaacatgatattcatggctttcggcgacccagctccactgggttcgccgcttccaaaagaactccagagaccaaatctgacaagttagaaatgttccctggttgcatcacctctgtagccttttcagtgttctcatccgacactttttctgtgttcaaaggtgggggtttgagtttagcatcgaccttcttgtttctcttggccactaccttcttcttccttcctcctttcagaccgggattggcaccttcaatttctgtttcaaaagtgatttgaactgttgggttttatgcccnnnnnnnaactccatttcaatgtaatctatttt

SEQ ID NO: 119189 - DNA, 8459 bp, Cannabis sativa
  modified_base (5537)..(5541): a, c, t, g, unknown or other
  modified_base (6373)..(6373): a, c, t, g, unknown or other
  modified_base (6651)..(6659): a, c, t, g, unknown or other
  modified_base (7011)..(7011): a, c, t, g, unknown or other
aagtcacaccatggcccacagtaggtggttgtgtattggcctgttcggggtttgtccctagtggtcctctcgtattcccaggggtttgtacattaggatctatcaccatcgcgtcacccagatcaactaggcatttgcgagtttacaccaccgtcttgtatgcatgttataacttaagacaaacaacaaacttgagtttaactctcaatgaaagcatcaaaatattgacctcgcttttagccaacgacagtgagtcaattattaagcgattaagaatataattaaaatagagcaaaaacaaataagtaataaaaagcaccagattttaaagaggttcaacaccgtaagtgtggtaatagcctactcccctttgattgtattaacctgagacaaagaacaaagtgtttttctctctcaaagctcttataatgaaatctctgaacaattctcttagatctctctctgaaacagttctttcgatcccattcatagtgaagctaagtcactatttatagggccttaatgcatgaggaaaggtttcccttttgcttacaatgtataaaataagaaagaatattcattacatattatgacacacaaaataagaaattagaaaaagttgccatattcctctgactcaatcacacgatcctagggattgtcttcgtgcctagacttcacgagatcattttgaagtagtgaagtcctgataagtagttcggaaaactagatctatgcctgctcggatgatctgcccttaaccctactcgggtaattagaagttatacatgtagatgtataatatgaagtctgctgaggacattcatctccgcccagattcgaggaatgcaggacatgtgtcacttgtgtattctgccacgtcattgtgcaaaaaatgtgataacaaatataattgattgtaggtttgaaattcaaacttaaacctaaaaccaaattaagacaaaagttatcttaacccaaaataaataataaatgttattattttaagacaaaacttcaaagataattaacttgtcttaaataaaaggtttatttaagaattatttaattaaaattgttttaattaattaaaaaggtttaacaagtgtattaaattaaaagttaatttaatattaattaatttaaattattttaattaattttgagggttacgacgatcataaaaaattataaaaatatcattgatactatggatattagttttgtaatttagtttctaatttcaaaggttacaaaattagaaatatcaaatttatacgcgattcatcattattgtttacttattgcttttaaataaatattcattaatagttggttaataacatgctcatgcattgaataatatggcatacatagaaatcccacacagtttaaattatcgcgcatctcatagtaaaaacatggcatattaggattgtcctatgtatttatgtgtttaccatttttgaaacttaagcatgtgaactgactaaatttaatttagaattaacttgataatttaaaattaatctattaatttaaaaaagttttaaattatgaattaaagagttaattcaaatttaatgattatgacaggaaaattatttataatttgaggcttttattataaataaattaataataattgttaaagtggttaatgtgtattaatattatgaattaataacccaaacacattaaccttaaatagtgagtaggagaaggagtacatattaatgtaacctacaatctccattatttatcaacactaagggagtatagactggcctctagacggttttattttttccccctaatatgtgtctatactgtttctcaaggttgatctcttgattaagataagaggaagcgatgtattttagtgtgacattgacccttaaggcgacacactaagttaagtcatgaaatctaaaataatggattacactcacaaattgcaactaagcttcatagtggttagttgttaacttggtcaaaaagcagtactttatattttgaaaatgaaatatgagatattcaggtttcaaaataataaagatgagatgtgtctcataggcttaatgaaatttactcgataccgaccctaaggcggtgatcaattaacaaagagctttatcgtggaataacttaaataagattttatgtgttttacttgtatgctctcatgcatcacgtttatagtactttcaaaatgatatttattattcatgcataataattatgttactttatttatttttagtcttgtctactaccgaatccccttactactttaagagcacttgaaaactaaatggtgataacttttataaatggaaatcaactctaaatttcatatggtttgtgagaatcacaaatttgtcctaactgaggagtgtcctaaggatcccatttccaatggcccaaaaaatgttcgggacatatatgatgcttggattcaatccagcaacaaggctaaatgtttcatgcttgtaagcatggatgatgttctgcgtaagatgcatgagaagaaggagaatacatctcaaataatgaattctctacaggccatgttcaggcagcagtctaattaaacaagacatgatgctactcgtagctacataaattgtaagatgaagaaaggtgtcactgtttgatcttatgtattgcacatgattgagctattgcatgaggcagagacacatggggctatcattgatgacaagactcaagtgagtatgatccttgagtcactatctccttacttcaaggctttcaccacaaactatgtgataaataagttagagttcaacatgactcaaatattgaacaagttgaccgcacttgagaaccttaacaatgatatgtctaaggaaggggaatcaaacatagttgaagcaaaatccaactctcctccttcttctagtaagaaaaggaagtggaacattaaggataacaacggtggcaagcccaaaggcaagatgtcacccaaggccaagaagaacaaagccagccctaagtccaaggacaagaagggtaaaggcaagtgtttctattgtggcgtaatgggacactagaagagaaactgtaccaagtatctcttcgaccttaagaaagataaatatgatttattcattcttgaagctagcttagtggaagatgataaatccttacagattgttgatttgggttccactaatcatatttattcttctatgtagatacttgaatcgtcaagggaactgccgatgtggagatgactatgcatgtgggtaatgtagcacaagtgtctggcaaaagtattggtagagtccgtttgaaattggataataaatttttattattgaacaatgtttattttattcctagatgtaccaggaatattatttccttatctctttttcatgattaatttttcaatattggttttattaataatgagattattatttctaaaaatgatatgcctatttgttttgcaaaacaaagtaacaaactttatgtgctcaagccaagtgagcaattaattttaaataatgaattatttagagtagcgataccttaaacgaaaaagacgcaaaaggtttatgatgatgatgaaacgaatctatcacatctacttttaggtcattttggcctagaaagaataaaccagttaacaaatgatggtccttttagagaactaaaagttggaactcttctggtatgcaaatcttgtcttgaaggaaagatgacaaaaagacctttttctgcaaaaggcaatagcgccaaagagcaacttgagctaatacatgctaatgtgtgtggacctattaatattcaagctcaaggaggttatgaatactttgtcacttcattgacgattattctagatacggtcatacttacctaatggccaagaagtctgaaatttttggaaagtttaaagaattcaaggctatggctaaaaagcaattaggtaaatcgttaaagacacttcgatcagattgtggtggcgagtatttggatttcaaatttaaagactatttgttggaagaagggattttatcccagctgaatggtgttgtagagagaagaaattagactttgttagacatgtttagatcaatgatgtgctactcatcactgccactgatcttctagggatacacacttttggtagctacttaaattttgaatgtagtaccattgaagagcataagcattactctaatggaattatggaatgggacaaaacccaatttgaaacattttcgtgtttggggctatcctgctcatgttcttaaaccttagtctaggaagcttgctcctaagactaaagtgtgtatatttgtaggatattcagatgagactcgaggtgactatttatatagtcatcaagataacaaagtatttgtttctactaatgctacttttcttgaacatgactatatgaaaagtcacaagccacgtagtcaagtggtggtcgaggaaatcaaaaaagagatttctgaaccaacaatttcagcaccattagttgaacaaccgacagcggttaccacagttcctaaaaaggaaaccccgtatatcatcacagtaggagggtatgagagaacctttccgctatgaacatgaagcacatgttcttgtttctgacatagacaaggatgatccattgacttacaacaaagcaatgcatgaacctaacttatacaagtggaacaatgccatggattcagagatggactccatgtgcaccaacaatgtctgggtatatgaaactccacttgaggatattacacccatatggtgtaaatggacttttaagaagaagaaaaatgttgaagggaaggtagagaccttaagagctaggcttgtcgccaaaggctacacacaacgagaaggcatcgactatgaagataccttctctcccgtggaaatgcttaaatccattcgcattcttctttccatagcttctgcatataattacgagatatggcaaatggacgtcaaggctgcttttctaaatggcgatcttgatgaaaccatatatatggaacaatcagaagggtatgtgttaccatggagtgatcgaaaggtgtgcaagttgcttaaatctatttggattgaagcaagcctctagatcacggaatattggttttaataagactattaaagagtatggctttgaataaacgaagaagaagcttgtgtgtacaaatacattaagggtaatgtagtggtattcctagttttttatgttgatgacattctacttattgggaataatgtagaaaggttatcaaatgtaaagaagtggttagccgaaaaattccaaatgaaggatttaggagaagcaaactatgttctcaagatcaaaatatatagagatataaagagaagaacattaacactttctcaagaaacttatatagataaggtgctagaaaaattcttgatggagaattccaagaaaggacaattaccatctagacatggaattactctatgcaaggatcatgtccaaaaactcctcaagaggaagaggacatgagaannnnnccttatgcatcagcagttgggagcgtaatgtatgtaatgttgtgtacaaggtctgacatatgctatgctatagggattgttatccgctatcaatcaaatccaggtttggagcactagattgtagtaaagcatattctcaactatctttggagaatgagagagctcatgcttgtatattccgatggagagttaaatcctaccggatatactgattctaatttttaatcagagaatgatagtcaaaactcaacatttgggtcagtatttactcttggtggaggagttgtagtctggagaagcattaagcaaaccagttttgcagattcaaccatggaagtctaatatatagcagcttgtgaagcagctaaggaagtcgtttggttgaagaaattctacacagctctggaagtagttctagaagtagaaaaaccactggtgctctactgtgacaacagtggagcggtggccaactccaaagaaccaaggagccacaagagagtttgagaggaagtaccatcttctaaggagtacagtagagagaggtgatgtgacggtcttgaagattgcttcggaacataacctggaaggtccattcacaaagacattaccagcaaaatcttttgtgggtcatatagctaatatggaactatgggagatgcccaatttgcttttagggaaagtggaagattattagggtttatgccctgaaaagcctattaacacattcctaattattaaatgaagagtcaaacatttgatatatgtatgaatgttaaatttttaatatttattattgaataatttatattaaatatcaaaaaattctttattnatatatgaggttgtggcttgtagctgtatagagaactaagaccacttagctatgaataaaatattcagcaacatattaaagttatggaatctttaatcaatagtttctagtacggttcactgatactcgttcttcggtgcaagtaatcttggttcaaattacggatgtagtgagacatcaaagtgaaggtactgtaaataatagagattatctatgacaatgactgacatgaataaagttgtctttatcaatatgtcgtttatcataaagacctaatnnnnnnnnnaacgatgatcaatagtagattggcctaaatcctaagttatcatgaactcttgtttatgttattagtttctttgattcacccgttaaagtttctcaaagaatatgattcttacaacttctcttttggaaaactaataacatggatggttgggaacatgatgtacaattatagaatcctgactttcttaacggatcaaattttggttccctttaagtgttaattctagaactagaatgttgtgcacaaatacagaagggatcttgaattatacttccactagagaattaatgaaaataaaggtaaagaagtaataattagaaaaggtaaaatagtattttgaccaaaactaatnacgaaccaacacatggagggctaatcaccgtaattgatcatatcaatggacactatagttcaactcagtaaatataattctataattactaagagtgtaattccatatttatagtggagtaatcattgaattaataaaaaaatagattatttggttgatgaaactcaataaataatgtagtttattggagcttagaattataggtccatgatcctcgaatcgccaccttgagacactgtcaagggtagggataaagagttgtataaagatgttggaagaaaatatattttgaattggcaaaatcgtaattatttttttaatataaataaataattttttcaaatgaattaaataggaaaaaagacaaaaattgtcaagacaaaatttgttgagacaagaattgtcagggcaaaagttatcaggataaaagacaccaaccttgtcctaaagatagtggtaggtgcctagcttgttcttgtccctattagattgtctttttgggttaattatttatttaattaattcaagtaggtaaatatctaatttgaaaagtggttaaagatatttcaaggttgttgaaatattctctcaagtagttgagagattccctcataaatatcagtaaccgaattcggttatagatatttatttatttaataattaaataatgatttaattaaagggatttaactactataaataggagcctgatttgagaaatcaggatcactcttttacactgcaaaaattcaaaatctatagagagaaaaagaaactatttttttctctctattgttcttgctcatgtgttgagaactcaacaagaacaaaggttatacactttagcctcatagctcatactattccttgtgtgtggtggatcgatttggaagatactggtgtgagttcaaattgctaattcctcatcaactagattaagggatacaacatacgagaagtttcgaggataccctgttaggcttcaagaggtatactctaagctaattgtttttattttttttgttttaatgtagacacatatggagatcctaggagcaatagtacaatgataatcagataatacaaaactcttcccctgcgtacctgatttagtaccataaaaccaacaaattttacatcagattttgttttattgtaaataattaaataataaaataattaattgggaagtaaaattaaataggctttatataaaacatggtgtaaccctaatgaaaaaatccaaattgaaaatcttaaattttttttattgaactagaaaaatattttgtagactttccttacaaagaaaaaaaagttgacgttatttattcactttttgttataaaataatataaaattatataaagtagatgaaaagaaagaagaagaagaagagagaaagagaaggtgaatgagaatttctcagttgtttattccaatggggt

SEQ ID NO: 119190 - DNA, 1329 bp, Cannabis sativa
ctagctagcttgtcctccagtttcaccaccatatcctcctccactaccaccaccaccagcttgtccaccagtttcaccaccagcttgtcctccagtttcaccaccatatcctcctccagttgcaccaccaccagcttgtcctccagtttcaccaccatatcctcctccagtaccaccatcagcttgtcctccagtactacctccttcaccgacttcagtttggcgtgtgccatgatcaccagcactgcttccatcttttcttgcaccactagtacttatagtactatcaaagaatgctctagaggcgcatgtaccaattaccaaacccaataaaagaaatgaaaccacacttattattctaactctatgactactatggatacccattctggaaattaattaatacttataattgttatatatagttttgtttgatttatcttataacatgcaacaaatggcacctataaataggaaaggaaaagtactgtaaattagttatgcctagtatatagtctttaaaattatataagagatcatgatggtttacttcatgacaagatatatatttaataaacaagtcatgaaaaacaatatataagacacacataggatttgtaataattatttatatatttccccaactttccattcacgataagttgatgcatgttcattattattattattattttgctacaataaaaatggatttatttaggtgttaatggtatttatcttgaaatgacctgattttaattattaaccttacataagtatgcaatatattgacgtttacttggggtatagtgtatgcaatttcaaattcaattaaataaattttgaagtgtatattcatattttccacccgtatcagttcataagatttttaatcttttatcaaattggtatttaatcatttttcaaaaaaaaaaaaaaaaaattgaaacttctcaaatattttatatttcttaatataaggcaaataatatctagaggaatacttataactacctctggctaatacattctaacgtcgatagctagcttaagcagttattatgctctctttccctttggagagaaggaacttttgattatttttaacttctcgatatgatttgtagacatgtaattcacccaggtaaatttctctaaaggtcacatttagttagtctttgaattctatcatagttagtcaatatgatcaagtcataaatgtcatagatattttgtaattatcgatctttcaatatttatgcactactataaaaaccctctttcgagacagtttttaagccatttcagcgtcggttttggcaaaattcg

SEQ ID NO: 119191 - DNA, 1152 bp, Cannabis sativa
tttatatataaatatcgaaaaaatcactgctcatatgtggggttgtgatcttgtaatgtataagaaaattaagatcgtaaactatgaataaaacagtcatcaacatattaaagtttagaatctttaatcagtggttactaatatggtttactgatgcccattactcggtgcaacaattttgatttaaattactaatgtagtttgacatcttagtaaatatactgtatataatagaaattatatatgacaagactaatatgtaattactcagtgtttatcaaactaattgtttactattaaattagagattatatatgacaagactaatatgtgtttactttcttgttatcaaacattgtggtgtaaatttgacccatcttatattttgtgccaaatttaacctaattttagcatgtgctaaatttggcacactttttacactaccattagagctttattttttaatggactaaaaatagcaacacactaattttatagctcttcattggagatgctagctcttagagtatctccaatagggtgctataaatgtgatatctatgtatattttagtccattttcataaaattaaactcccatggtggtgtataatgtgatttaattttggcacatgttaaaatttatgtcaaatttgacacaaaatacaagatggactaaattttacaccgaaataaatattatttttttctttgcctgtccgtttgcacaagactccttgatgttggtcaaaaactgattgtgttggaggactagtgtgacatctgtgatgtgtgctgttatttggatagggaaagcaaagttgagcaagtttaagaaatcggttttggctgctgctcttgcagctctgatttatactctatggagtaatcgaaatgtcaacaggtacaaaatgtaacttaaagtagggtgtcatgtatatggccacggaatgtatctaatagtgacaaagcatggtttgattctttgtaaatagtataaagtgtgaggtcatctccttttatttgaggatgctctttgattgtataaattgactattagagtaatgaaacatcatcttatccataaaaaaaagggaaatttgcggcaaaagtccccaaatagtttacgttgatgcagattagtccccaagct

SEQ ID NO: 119192 - DNA, 1751 bp, Cannabis sativa
aattaacaaaggatttatcttttccacacttccccaatacttgttaaattttatcttcattgtttgagccataatactcattctcatatcagtactagcaccccaaacatctaattgatttccaataaaacaaatttgctcaagaaatatgtttgaagtaacatggagagtaccagagaaccgcaatgtagcatcataaaatattttcaaaaacttaacaaagtaccttgcattgtcccaatcatcagaactaggagacttgcttccagaactgccacaaaactctttaacatatgccacatcatgtgtctccattcgttcaaatgccttctggtattgaatagcagcttctagcataatataagttgaattccagcgagtaggaacatcaaggcatgctgttttctttgaggtaatcttagcttgttctgcacatgacttcaattttaacattcttgcaccagatcctctcacaaatcgaactacatttctaatctttgtgatgacacctccatgttctttcaatccatccatgacaaccaaatttagtatatgtgcacaacaacgaatgtgcatgtgcatcccttgcaaaattgcaccaccccaatcacacacagagccaacaaggtaagagattgctacatcattgctggctgcattatccacagtaacagtaaaaatattttcaattccccattcaagcaaacattgttctataccctttccaagtgtttcacccctatggttaggaaccacacaataattaagaatctttttctgcaaacaccaattctcatctacataatgggaagtcaaaaccatatagtttaaattttggcaagaagtccaagtatcagtagttaagcaaactcgtagcttcttaccaataaaatattctttcaacctcttcttctctttcatataaagattaaaacagtcacgagtcacagttctacgtgagggaaccacaaatctaggctccactaatctcataagatccttgaaaccttgtcgatccacaaaactaaatgggagttcatccataaccaacatcctagcaatattctctttaaccaattcagcattataagttttagccactaggcctccatcttctccatgctttttagcctcaaagaccaaagtcttctgccttttttcatctctattagtaaacttcttgcattgtattgacagatgagtgagtagattggatgttccattttttttactcccacatgcatatgaaacaccacagtaattgcatctagctttaggatttttggcatcatcaattaccttagtgaaatgtgtccacacttttgatggaggccttgtaggctttctttttggagcacaagaggtaggactaggactttcatcaccacccgcgcttggttgagaactcagttgagtgcttggttgagattgaggctccaaagatccttgaggtaggactaggactttcatcaggtattgatgttccctcattattacaattttcctcaagagaatgattttggattttaggagccatctgcaaaaaaaaccaccaaaatattattgtactaaactaagtatactgtgatagagaaatgtgatatccattagtgaataaaaatgtcatcggcatcttttttaaaaattgatacaatatagcttcttacaaaagtctttcggtcaaacaagctagtctttcagtcaaacaagctagtatatagattatactaaaagtctttcagtaaaaaaaa

SEQ ID NO: 119193 - DNA, 1372 bp, Cannabis sativa
tacaatcatcaaattgcatgttctaactttatttgttatggaaccttaatcaattaatttatatttaaaataaacaattcaagaattacgaatgaaaaattcagcaaaaaatgttttgcggtaaatatttaagaaattaataaaagacagagatagaaatacaactgtaattaactttaattaaataagtcaccttaaatcgacactatattattttttatagtgattggatatattggcactcaatactcttttcattttaattttttttttttgattgtagcgtaatagtattttacaattatttaatagcttaatagcttcaaggtcttaagttcgaacccatgacttctccctttttcccatccctccctcaccactaagttagccttagtggcttctctttccattttaactagttatataataatataatattaattttagtataatataagttattttatatttattgtttcaaattccataatagcatcttattggttaatatttaaagtttactcttttaatttttatcaaatttttttaaattaatatttttattgttttttatttatttattttaaactgtaacttaccactagagtcttacattatttaacataacatattttactatcgttgtgattcttaaaatgatattgttagtgcttaataataatactcttctaagattcaaactagatggtacaattatgtagcatatcagcagagcataaagtcccactaatcatttcatggggaaaccaagaaaaacatcccataatatttatatatatggtatcatataccaaaaaaaaaaaaaaaagaaagagagagaggaagaatgattgctcttttttttttttttggtgatagaagaatgattactaattagggtatgagatatataggactcacatgaatatatagtatttgggcactgatagcaaaccaacctacccctataccaactattctttcaccttcacctaattcatttggtgtaccttatcattatatactatccttaataactttacccaggtgcccgtgccttaataggaatgttaactggactttacttatatgtaaaaaataaagaaataattatcatgtaataaaaataatttttcaccagaaaaataaaaaagaaattatctcatatactatttttattaattttttttcttttaaatttacggtttagattactttagtagtttcttcagtagtttttatgtaggttgctatacaaattttagttatgacttaagttgctcaattagttgctataaggatttctgtgtaaaatttcgtaaaaatataaaatatatatatatattttaaagtgtaaaaataaaataaaaaa

SEQ ID NO: 119194 - DNA, 2204 bp, Cannabis sativa
  modified_base (1226)..(1236): a, c, t, g, unknown or other
gtaatctctttcagttgcttttttcatatttgtaatcaagttttgatatccaattttatctaaataagtagtaggacgatgtccatcatcaacctctttgatacaggattccaagaaaaaattcccactctcagaattccatattgctttacctcgtggtactgctacatcacttttagtacaaatattgttttctttcaccatctaattaaattaaaataataagttttatcaaaaaactaaaaagtataataatgagttataaagctaaagactaatccaacacgaaaaatacataataactatgatgaaagcatcatcatcatcctaatttacttgggtacctaaaaattttctcataaataaggaacaattttatcataaataaagattgcattaagatgcaacaaccataatgtattgatgactaattactaataactcaagcaaccacagggaggaggagacaaaagaggtaaattagggtctaacaaaattaaattgaaataaatgtcttaatcctaaaaagttgatgactacactgtagataaaggtgttgcatattagaagaaaaataatttaaaaagcacattcccattaaattttttcgccttataagtgaggaaccactgtcaggggtacccaactatgttagagaggcagcacaagttttgctaaagagaggagagaatagcaaaaacaaaacaaagaaaggaaccggacccttgcaactgaaaacatcatgtgctcatcaattcccaagaccagtactagtaagtagtaaatagacttctaatactttctaatagtttctgggtctccataggttcttattgtaaatatgcagtaatgccctccctttcttgaaaagtaactattatagtaagacctatatatatggtggtgaagtatatagaaaattggtcaattgaataaatgaaattgagttttttgtggaatatactacatattgatattttttggagtaataattacacactcatgaaataaagttatcatcccattaaagctttaaatttttagtttcatggcatactagagtaaagttttgaattttattctagtttatttttctttgaagaagaaaaaatggcgttatttgatgaggttcaagacctacaaaaccctccaatggttcttgatgccttgttcagtgaggaagaaggttttgaagatgagtttgaggagaagaagaagaagaagannnnnnnnnnnaagaagaagaagaagaaaagagtgagaactgtgataatgggtctgagaaaaaacaacaatctttccctttagttttgctagaaaatgatttaaaaggagaagaactcaagatcagtagatgagattgcctccattgaatcattctgatgatatggatgtagaagactcacatcgaccaaggtttagagaggatacaattgtttgtcagtttgttggttctgctattttggatgaaccagaggtggaaaattcctgtcaccgtggcttggttgaccccacaatcaacttgaaggaggtcatggatgatatcaataatatgttttggaagcccattgattttgtgaggacaaggagatcaataaaataggacaaaactcctaaatcaatgaatgactttggtggcttttcaattcatcctgatgaagtcttgaaaaatgaacccccaattaagcaagtgcctaagttatcgggaaagccaagaggttctgacttgtttgagcctactgtagttaccaaggaggccctgaatgatattaacaagatgtttggaatgcctttggactagtaaggtatatgaaatatgttgttgtaagaatttgatagcgtgtaatggcgcagcctttcaatgtgaaaatttgagtgatttttttgtcattgaatcgtttctccattatactatttctctattgcaaatcaaaaaaataaaaataaaagaagactcctgcgatcaacataagtgaaaaaaaaaatcaaaaaaaatattttcatggcattcaaaagaagagttaagagataaaccttgattgtgcaagaactattaacaatggtgttggcgaacggtgagtgaccgatgacaaagaagacgcctgcgatcgaaggtgaggagccgtactacgatgtctctgcctctgggttgatttttacgaaatgagaaaaaaaccctaagtaaaatgacaattttttaattt

SEQ ID NO: 119195 - DNA, 1524 bp, Cannabis sativa
tttagggcataaagcccaacaggatcacctctgatccgaaacattcggatacttattggatcttggatcagatccgctccgcccaacctaatttttttctggatcggatctgatccgacccgatttaaatttattaaaaaaacttaatttaagactcagatcccttagaacctagacccgaacacagacctagacccgaaccaggacctaggactcgagatcgggacccggaccttgactcgggactcaaacccaaacccggacccagacccggactcaggacccgagacctggactcaggacccgggatctggactcaggacccaggatctggacccagtacccgaacccagactcggactcgggacccaaacccgggacgtagatttattctggacccaaattgggacctgaactcggacccggtacccgacccggactcgagacctggacccggactcgagacccagacccgagaccgggtcccaggactgggaccgagaccaggacccaaacttggacccgaacctagacccgaacccaggatcgtgacccagacccagactcagattctgagccaaacttggacccgaacccagactgagaccgagacccggacccaaacccaacccgttgttggtgttggggtagagtttattaaaagtatattatctttacacaatctactaatacatgccaataccaaacatagtattatatttaacaatactaatacaaaattaaaatagatataaaattataagttaatattaaaattctttaaaaaaaaaagtcgactcggatcagattcgatccgaataattcgggtcagatctgatctagtggggcggggtggggtagatccttacatgatctggatcaggtcggatcatagctgggtcaaatccgacctaacccatttacactcctactgcagaaatcggttccataaaagaacaaaacaaaactacacgtcaatgtataaatcagattttatttatttattttcgatttgtatccgacaacaaagtgctccaatctaaagtgaatcaaaacaagatcttgcctaactgtatttgtttaggttaggttggtcctttatctacctcaaatgaactagagttgtaaacataggctgactttttttatcatacgagtccaaaaagtacgagcacaactcaacaagaaaaaaaaattaaatttagccatgacacgatatgatgttgtgaattagcatgacacgatacaaaaaatatattagagattttatatatcaataaaaaataaataaaaaaaaaattacatcccaaccgtaaaataatacaaatgagtaaaataagagatatataaatattacagcacgtatatatactatatattatatataagaaaaatactagagataaattacaacacatataatatacaacatatataatataggaagaggtttcaatggttacatttttattgtaaccatcatggttaaatttttttaagtcattggattactattaaatggtt

SEQ ID NO: 119196 - DNA, 1781 bp, Cannabis sativa
aattatacttgtaatccaccaatttctcagcagccacaatcgccgagggtaaatcagttaccgcttgcctcctcaatttcgcctctacccacggctgcaatcccgacaagaagttaaacatcttgtcctcctcggacatatattctttcacatactcttgcaccgaaccagtgtgcttgagtttttttagggactcacgagcgatccatgtcgtgttgcatggaaggaaatgatctttcaactcctttttcaacacctcccaagtctcaatattgggccttctcgaacgtgtatcttcttccatctagttgcgccaccataatttggtatcacccttaagatacatgcttgtaatggtcactctatctgcatttggaattctagctcccttgaagtactgctcgacatcccaaaggaaattctcgaatttctagtgccattgaaggctttcggttcagtgactttgatttttgaggaaagggctaaagatgactcagttccttgtgagtgattcgttatcgcccttttagttactgctacatctgcatcgagaggcatgaatctctccttcacgatagtttttccacccccttcatcttctcatcgaaatccctctgcatatccatcatggccctgcaacaacccacaacttgatttgatgattccttcaacaaatctcgagctagagcctcaagggactccaattgttcacaatgttgttcaccatcatcttcggatgcgttcatgtttgaatggcttcttatgtcccaaaggaggctgcaagcaccatgttcctctgtcaagcccccatgtacgtgcgtgtggacagtatgcaacacatagtgtttaaatttcctaatttttccaatttttcatgattttgtcattttatttcatggatataaattttaattttttggtagactttttgtgtagatttttatttttgaaatttcaaagctaattattatattaaaattaattattgttaatttgattaattttagacattagaagactttgaatttgaaaattgatattttctacaagttgctattacaattacttttaaaattttaattatttattaatttttaattataaaattaaatatttatattttatttaattaataaattatatgaaataccttatttgacattaaaatatgaatattatttgaaaataatatagatattttttaaaatctaaccattaatttatcagtattttaaaatttagttatttaaattcaattatattatgagattagaaaaatagtatttatttatcattttatcttgttagatatttcttttttttaaaataacattaattttgaatagttagttgaattttttctttgaaaacatatttagaattgttacaaccctaattttcaacattttagggtttactttttaaaatttaaattaaaattaaatcttatacccaaatatcctaacttgttacatgtttatttatttattgaattgtttatttaaaaactttttttaataaacctattatttattcactttaaatggctatgattatcttgttgatcaatccaatgatccaaattaatcatagttaattgtcaatagatcaaataaataaattataacagataattcggtaatcttcttttattcatgtcataaacttagtaacatgtaggacccatctaagtttgtgtatatatatatatatatgtatatgagcctatatgtttatttttgggcttagatgcatataggagcccatttaatttttgtaat

SEQ ID NO: 119197 - DNA, 1182 bp, Cannabis sativa
agcaaagaactatccaatcaacccaagttttaataaaaccaataaaacttaatgtaagcccaaataaaaagtctaacaatctgtctttggtctaattgttaaggattgtcaatctttactttttctttaaacaatgtaagtctttgttttgttagacgatcaataaatcaagttgctcactatgtagctaggaagtctcgatttctttttgatcgtagcattcttgatcataatatttcggctgatttacaagtctttttgtatttcaaatgcttatttcaatgaagttgttatctcatcttaaaaaaaatagatgacatcattagttaacattttcatattatgagagggttataaggtataaagaggattgaatggtgatttaatcttattaaagtatgttagaatagcttatacgatactattagtaattcaattttatataagtactagtttaaaaaggttgataaaaaaaattagatacagatcacaattaaaatatcttcttatcttggatttatgatcttaagatatggaaagtttaaaattaaaattaagagacgttacctaataaaacttattcaataattagtaaggttatgggcaaagctacagtactctataatggctaaaaatcacgattcaataaaagcaaatagaatggctgatattgtgttgctacatcaacatgttaaattataaataactagggaactaagccgcgttttgcgcggtgttatctaatttttgtaatctttatatatatattgtaattatactgagtgatataatttcaaatataatattttgatgtgtgttattataaacaaagtaatagtattgaaattataaatataatttactatttttaaaatatatagaaagatagtgattttatgaaaaatattaaagattataaaattaacaaagaaattacatgtacttttataataaaataaatgaaaaagttcatcatttctaaatttaatgatctgatcttgtatctgatgatgtagttatttttaaaagactatctagactttttttgcttaaaaaatataaatagtttaactatcttttattaaaaaatttatattttgttttgtggtgttgttagaatattttctccacaaaggtgaatgtaatatgacagctactaaaggagccgtcataacattacta

SEQ ID NO: 119198 - DNA, 980 bp, Cannabis sativa
cacaacaagtattgtgattaaaaatataattagtcaaaataaattgtaatttttgtgactaatacctttagtcatggaccttttagtcacaacatcagaataataatttataattagtcacaattttgtaacttttaatcacgagttttactgtgactaaaagtaagaaaaatttgtaatgataagccgatgttaaaattaaatatttatatcacatatttttatttttttttatatatttacacaattcatatccaaaaatataagaataatatcatagatgaaatctttatttatagatgactcatttttactttttatgaaaaaatgtagatggaatattaaaatgatctattttgggataatagagaaacttaacttcactacaaaattgagaattttgattctctaactagtattatccttaccaaaggtaacaataatgtagtatacatggctaataaaatccatatgcaactgttaaataagatttgctcgaactttacgttagtcgtaccgcagtacactttagttttaaattgtttagcattagagaattaattctaaattcttatttaattaattggataatgctctaagcactgtaattctctttgctttatttattagttagattgcaatgatttaatatataatgtcagttgcaaatcatttatattaaaaactaaatacagagaattttttgcattaccattatacatatatatattttgaaaacactattatacatatattaaaatatatataaggcattttataaggtcaaaaaaaaaaagtgatatgtccattcagtgcgtacttaagtgggcagttttgttccacatccatataaaagtggcaaacgtgcaaaagtagatatgaaatttaattaaacctaaaaaaatctataactaaagccatccaaagtgactccacattactcaaatattacttctcacactattattattattattatt

SEQ ID NO: 119199 - DNA, 870 bp, Cannabis sativa
aacatagaaaaaaattagcataaaatttagtatacgtgcctcacacgtcgttttttactagtatataaataaatatatatagtagaaataattaagatatcaaattaaaagaataattgagataacaactaataaaaatgtatagtaattctttaaaatagttaagtctcaaaataatagctaaaggagtgcactcccatcaccttttttactttattcttcaaaatgcttcactaaaattccattttttttttaaatttatctcacactatacacaacttctctattttttttataatatatttcatttatataaacaaaaggttaaaaatattaaataaaaaagaaatagaatgatgagagaaaaaaatattaaaatattattatttattaaaataacatggagaagtaatattcataatgtaaaattttaagctcatttaatgaaattcttttttaacaacatttcttcatattttaccttttgagttatagttggtttgtgtgctctatctgcagctccacaaatactttatatagagcatattcacattaaatctccacatcatatagaagactagccttttcaaatatttttaactgatattttattgttttgactttttttttaaagactatttaaataatatattaatatttagatgaataaataatattaaaatgaattaacaaaagatataaataaatcgatataaaaaaggtgtggtaaaataaataaattgagattagtattgatttttgtaggtgaaaattgttagacttttatatgtataaactgaaacatacatgattaagtataaagtgcggaattaataaatcatatatgcactataatttaaggatcgaaat

SEQ ID NO: 119200 - DNA, 2794 bp, Cannabis sativa
  modified_base (2747)..(2748): a, c, t, g, unknown or other
ttccatttgtaattaaagtttaattttcgcgctaattttattagtaatcccaagtaggggattagggtttcataagtatattgggtagcgtgcctaattatttagggcgttacaatgttagccatactgatctatcaaaaattggattgagcgttggaagaatcttttgagaagacatagcatgttttagatgaaaccaagaagaaggaggttcatgaatccatgaagaatgattcaaaaaccatcacgaagcaagcaagatcaaccattgtcacgaaccttccaaacaatgtacagagacaggtcattggggagaagacagctcttggaatttggagcaaactcaaccagttgtacatggctcaatctactacaacaaagatcttcttgaaagggaactattatgggtttaaaatgaatgctaggaacacatttgatcaaaatctttatgagcttaataaaattgtgttagctcttactaatatgggtgaaaccataaaagaagaggaacaagttgttattttacttaatactttgcctgaccaatttaaagaaatgaggattgttattatgtatagtaaggacaccttgactttggagaatgttatgagcacactcagatcaagagatgctgagttgaatttgtagaaagctgctagacaagaatcaaagacagatgaagctttgatggctcgaggaagattaccaagaagaggaatttcaaaattcaaagggaattcaagattaatgtcaagacctatggaaactaggaagtgtcatcactgtggcaaagttggacacttgatcagaaactgttaggacataagggacaaaaggaagaagaagaaggataaagaagaagatgacaacaacaatgatttgtatgcagtaattgatgattctaatggagatgtatttccagtcattaacaataaaaataaagatgaaatcaagactgatagagatgcttgtaccagttattatctaaaggatcaagatgattggatcttggacagtgggtgcacttatcacatgattcctaacagagactggttcatggactactcagagataaatggtggtgttgtaatgggaaatgatcacaagtgtagtgttgttggcattggttcaattctcatcaaaagttttgatgggactttcaaaactctgcacaaagttagacacattccagatttgaaaaaaaaaattaatttctttgggaactttgatgatgaaggatgtgtttacaagacaagtaaaggagtgatcaaaatcactaagggatcactgctggtactgaaaggaaccaagagacatggattttattaccttgatggtaaaactattactcaagcacaagctgctgctgttgacaagtgcaatgtagaatcaaaactatggcattccagattaggacacactggtgaacaaggtttagttgagttatacatacaagatttgctaaaggattataatcatgctaacttgtcttttgatgagatttgtgttcagggaaaacagcataggatcaagttcccaaataacaactattgagccaaagcagttttggaatacatccatgcagatttatggggagcaagcagggtaaaaactcaaggaggtaaataatttttcttgtccattatagatgattttagtagaaaaatttgggttcttttattaagacataaaaatgattgtttagaagagtttaagaactggaaaactcttgttgaaaaccaaacaaattctaaaatcaaagtgttgagaacagataatggattaaaatttgtgaatgatgaattcactgatttatgtttaatgtttggaatacaaagacataaaactgtgataaaaactccacaacaaaatggtgttgctaaactaatgaatagaaatttacttaacaaagttagatgtttattattagaagtatgtttaaagaaacagttctggggagaacccctacacaccgcctgttacttaataaacaggaatccaaacagaaaagttaagctgaaaatacctgagcagctatggataggtacacctcaatctctatctcatttaagaatctttggttgtgctgcttatgcacacaatgtggaagacaaacttgagaaaagagcaataaaatgtatattcttaggatatcctacttgtgtaagaggttatagattactctctgttgaaactaataaaattgtaactagtagaaatgttattttcaatgaaaataatttcccttttaaaagaaatgagaaaggtgtagtttctgacatttcatgtaaacaaattgatgctcaagttagtacacaactttagataggatttcttaatatcttaaattaatttttttaaaaaataataatttaattctgataattagatttgaaatttgaaaaataaaaatcaaaatacaaaactacacaaaaaaatccgaaattaatttcatgaaaaaacatgaaaaaatgaaaaaaaaaaattggaaaaaattgcatgtggtacagatggtatgcatttcataccatccgcgcgcgcgcctggagtgaactggctgagaaaactcggctctggaggctgcactcagcctttccgcgcgtggggtgaaggaattctgacacgcatgtgcgtgttccttcgaacagtggctgtctgaatcacgagtgacacccgtgtgcacgtgtaccacgcgcgcatatgggtgatgtcacccctgatattttctgattttcaaaaattcatanntaattcaaataaaatcgaaatcaagttctgtaaaaaaaaagtgaat

SEQ ID NO: 119201 - DNA, 2008 bp, Cannabis sativa
agagagagagagagagagcaaaaagaagacggagattgcagcattgattgttctacatcatagttttttttcttctccttaaactcttactatttattatgattttcattataatgtctagtttcgagtaatttctttttagctaaggattatttcaaaactcgagacataaatctttaacttttatgatgaatgtcaacttttagtttccattatatcgaattgattctattcttctatattcaatacaatgattattgttttaatccgttttagataattactaaattaaattttactttaatttattgttatcttggaattactattcatctaatagtctaagattgtaagtgtttgtgataaattgtaatttctaataatgtcaaaagtatttttaattgtgatgaagaatagaacctaggttaaaggaattatatgcttcattaatttgttgtctagattaatctatctccattgaacttaaagctttatctaagttaaataaattacatgctttgtgaatttactgcttagataaaagaattaattattgagtatttcgtattgattacatgcaatatagatgttgggataattgactacttcggcattatctgcggaattaatatatggtgtaaatatgctttctttttatttcttatttaatcaagtttctctttttctaattttaataagtaaacaaatgtaaaaaaaatgattatcttaccattaattttcattacttattactaaacatgaaaaatcatcataccaaacgccccattatagtgcatagtgattatgaagatcaagatttgttgattcttcatattgttggactaggaggactaggaaaaaccatacttgctcaattgggaaatttgaaccaaaattgtgggtttgtgtgtctgatgtatttgaattgaaatagattgccaagaaaatcataaatcccaagaaaacttagacttgaacacgttgaagaatcacctcatagaaaaattatacaggaaaaggtttttacttgtgctagatgacatttggaatgaagatagggaaaagtttgaagttttactgaggagcttgggtgcaaagggtagcagagtattagtaaccatccgtagggaattggttgccagaataactaagactactgaaccatatgagttaaaaagtttggatgaagatcaatctcggtctttattcagaaaaatagcatttgaagggaaagagccagataagtctagaattttatcaatgaaaatggaggttgtagaaaagtgttggagtcttggagagttcctcttgtgatcaggacaattggaagactatttcaatcaaagatgtcattacaccctgaagaagatgtagaaaacgtatgttattcattcatgatcagattatgcatctagtaaggggtttgttctttgaaccaccttccaaagtatcgggaataataaagaaaagttaaaaatgcatgatgccatgcatggccttgcaatttcagtagcagggactacctggagttgtgatagatggttcaaaggaaaaaattatgtgatgataaaatttgtcaagtgacaagtatctttaacttatagttctatcgagtcattcaaaataccaatgtactcaattaaacaaaataagaatgtaagaacatttttatcatccaatgaaataaaatatggtcataatcaatcgaccttgtttggctttgcttctataagctccctttagcttttagaattaaaaaagtcattcttagggtgtttggataaaaaatgaaaactcttttttttttttttaatttaaaagtcatttagaagaagctaggatttgtagcttctcccaaaaggacttttgagtagctaattttaaaattaaaataagggcattttacaattttgtatacattattttaattaattacaaaatatgtgcaaaaaaacttattatcatgttctcatacacttttatatataattaaaaacttttttcaatt

SEQ ID NO: 119202 - DNA, 1415 bp, Cannabis sativa
gagctatcctggttcgaggagatgtctcccccgattgtggattgctactttgtttaatcatgtgtgattttgatcaccgcgtcaaaaaaaaaatgataatttaacttgatgtttttagttctttcgtgaaaagtaggattattcgcgataaatacagtagattgattatcacaataaatgaaggcaagggtgcattgatgaacatgtaggttgtttaagaggtgccgaatctaagtgattttacttcttgtagcactaagggtgcattgatgaacatgtaggttgttataattagctctctgagaagtgtttcgatttattttgttaaacaataagtaaatatagtggctcattcatttgcaagagtctctatattatatcttcattgtcgtttcaatttggaaactattccaactgatttgttgcctcatttgataaccgagattattaattaataaagtgatgatttttcattaaaaatatatatataaatctccctcttcttttctctatattgcctattattttattaaggcttgtttgtaacgtcgtattaggttgtattatattgaactggattatgggcccgtttgacacaacttttggaaaagttaaaagctactttttgaaaaagctatgataaaaatgtgtttggtaaacagtcaaaaaacaattttcttaaagaatttttggagaagctacagctaaaacctgaagctgcttcaaaccaacttttagaaaaacttttttaattaaaagactaatatatatattttttttgtactaacaccatatttacttatttatcacatattaaaaaaataaaaaaaacatgtaaaaaaaataaataaaaaaaaattaaaacaaactaattataataaaataaataattattaaactcttattttttttttaaaaaaaataatatattttattttagtattaacaaacaacatcaaccaagaatttttcttatatacttaagtttctaatttttttatatttgataaaacataataaaaaaatactataaattatttttatcaaatgtacataaatttatatttgaaaaaaaaattaaaatatataacaaataaaatattatataaaataaaatttttacatatttgtgattatagtaaactagattatttataacattattattatcatcataatagattttaacaactcacagtactttgaaatttataatttaccaaacacttaactcagtttttttctacagttttactacaactgttttttctcacagtacagctacaactgctttttcccactgcacagctgtgtcaaactggccataagtatcatatttttatataatactatattaaactttaatttatactaaaatattatctatttaggtgtctataaaagttaataccaca

SEQ ID NO: 119203 - DNA, 1110 bp, Cannabis sativa
agaaaatggtaaaaatgaagagtgtggagtggagagtgaaaggtgtttgagatgaagagatgttttggtggtgaagaggtgtgtttgaaatggtctttcaacactatatttataggtaaaattaggagattaaattaatcaaaataaaataaataaattgattaatttaattagtgttgggaagagaagggataatcaaagtatatgtaagagtgttagaaaaaataaatatttatttggatggaaaaatagtgaaatgataggataaaaataaaatgggaatgtttatttaagtgaaataaattgagaaaatcaaatagatatttaggtgtaagttgtgggagaaaagattggtattttggcattttctaagtctttttgggctgagagaagagcaaaataacaagtcaatttcttcttcttctttttcttctacaggcaccacatggccggttgcagtagcctgattgatctgatgacgttgaggtggcgagctggggttgggtgtacgctgaaagaggcgggacccgcgttgaaggaataaagagaggccttctggtgcgttatttgcatctgccgagagtgggaagcactctctactctggaccgtcaataaagagttggacggctgagatgcgagtcaacttttgattgcaagtggctgatctgatttccttttgaaaattacacttttaactccatttctcccatatttttttaatttaatcccaatctttttcttccaaacatatctaaaaatacataaaattaattagaaaattaaaatacatttataaataaataacaaacaatatattctaacaaaataattataaaaaaaacataataaactataaaaataaaataaaactaataaattaaaaattaattaaaaacttaaaaactaaaccaatttcagttaaaaaaatgtgaaaaataactctaatttctaaaggaaaacatatatgttacattaagtgatagaaaaacaaaataaaatatatatgttacatcaagtgaaagaaaaacaaagcgtgccatttctttttatgagaatcgacattgacaatgatatatttgaagaccagcctcttcttctcccctcttttt

SEQ ID NO: 119204 - DNA, 2651 bp, Cannabis sativa
taataataataataaataataactgatgtcacccaaaagaagaaagatctgttcaaatgtactcaatgtgctcaaaattgcttaccaaatccaaatttattacttctataatcttattcaaaatttaaattttccattttgaattctttcatttacttgtatgtcatctctaacatgtggcaaaattgatttggtttcttaatcacctatttttgctgtactgtctgtgttttattaatgcattctcattccaattctgtaagggactggtctttttaaggaatgcaggatgcatgtgttttgctcactttgattttatcccaagttcaatcaatggatacttttgtagatgcaaagaattggttctagtttggatttgtatttttctttaagagcttttatacaaaggacacagtaccttaagaagttaagcttgataataattatgaatcaaattcgaaaattgttatggaagactatttaattcttttggggtgggtttcgaatagcttggactgacttaatggcagaacttcattacaaaagggttctagtttaagaatagaagttttggctggtttccttttcgacatgactttattgttgaagcctaccattaatacttttctcatttcatgtggaacctactctgttggtattattttagttgagttgaggtcatgcatgattctcttatagtgttctttatgtgctgaattccctggcaaaaccttgtcaccacaagttactctctaggagcagtgcctttaccttttgatgtattcttaatccttattgcggagtaagatatccatgctttctattgttattgaaattataattttgtgtaaacaaactgatgctttaagtattatatcaaattctgacaagactagtctgtgtgaggctaatttgctaactagcatgtgtatcacaattgcattggcttgttaagttgtttctttgcctaatgttacattgtttcttcctttgatatgtatgtaacttccaatctacacacttctgatactggataaattggtattaattattaatatttttttttaccttcttaatattaatttttcaggaggaagctccaaaaaaccgagggaatcgaaaaatgcagcgatattatttcaagtcaacatcagtaatggttgtccggatttggtcctcatggcttgtaaagcaaacatctcaaccagttgattttgctccagaaagtgttgtgaagctccaccttgatgctcctgacgagaacctaatggaacatattccaaactttgatgtggttatactttcttccggccattggtttgccaagcagtctgtatatcttattaacaatgagattgtgggaggacagttgtggtggccggacaagtctcggcatatgaagatcaacaacattgaagcatttggaatttctatggagacaatactcacggcttttggtactcatccaaattacacaggactcactattgtgcgttccttttccccagaccattacgagggtggggcttggaatacaggtggatcatgcaccgggaaaacaaagccgcttgcagctggtgaagttgtagaaaatggctttacaaacataatgcatgaaaagcaggtaagtggattcaaccgtgcagttaagaagattacaaacaaatcaaagatgagtttgatggacatcaccagagtgtttgagtaccgccacgatggacatccaggcccataccgaaacacagatccaaataagctcacaaaacgtggtcctgatggaaagcctccgccacaggattgcttacactggtgcatgcctggtccagtcgatacctggaatgaatttgtgcttgagctcataaggagagaccaagagaacaacaccagccttcaatcgtgagacacttttagcattcattaaagtactctgatctaatttgaaggtacctttgcgtttttactagatttaattaacataaattcaggaaggaaaaagcctagtcaagtatatttttttgccttgtgatattcttatagctttatagagagattatttactcactcgtaatagatgggagggttagttccaagttccaactcttgtactgtaatttgtaagttacccagatcattatgtacctagatagaccgagtattcttttttccactgttacacgtttccattataaataagatatgttctgagtttcggcagatgctccattcatcaaaagggtttgttatttatatattttactgatcttttatgcctacaatctttatgtttttgggctagtttggtatgactgttgctaatgcaacaattagttttattagttgcagttgcggggctgaagataaaattgttgcgggtaaaggccatctccaagtccaaccacaatattatttattattatttttttttgaaaaaattatttattattattttacagtaacacaaacaataatactgaaaaattttatttattataattttactccactacttttttaaaatatatttaaatttagaggagtattaatggaactctcttttgcactctatgtgatgacaaatgtcatatttttagtaagagtgagttttacttaataattagttataatattctaatgttattacaattgtgcca

SEQ ID NO: 119205 - DNA, 1865 bp, Cannabis sativa
  modified_base (33)..(38): a, c, t, g, unknown or other
  modified_base (1833)..(1836): a, c, t, g, unknown or other
gtaaaaatgtaaaaaaaaaaacattctttgaannnnnnaatgtaaatattttacaaaaaattgtgtcttatgtaattattctttttttttaagaaatgaaaaaaatatccaaaaaaaaaactaatcaaactgtttataaatatttaaaaaaaattaaacctaaaataaaaaaataataatgggaccaactatttgactttcgatctaatctaatatttgtcatataatctgatttaatccaattagtaattgaattttgaaaatcatcatccgcttcaattcaattactaatttgctaagataatgttggttttgcaccatgttttcatggttttgtatggttttttttttacaatttttgtgcctttttattcagagtagttttgtgatatggtcgatagataagagaggtgatccttttgtactcatgactcctacttcaacgacttttagttttgacagataagtttttcaagtcttttttttatatttaatatggtttgggttattacgttctttcacattatctattttttcattatatttatggtgatagaattttatttattgttatttgtatgttcgttttgtggaggacctacgattacagagattttgttgataagtttgacttttaaatgcaatctattggatattgattttcaagagttttgaattagtagggtgttagtaagttgttattagtcaaagggtaatacttttggctagttatacttagatcattttttttttgtttttagtttttattgttgagctagtgaaatgggttgtgtgttaaactctaagtttcgtatattaatatttattttgaagattgtcattctaatataattttattttttagtttgatgttgtgatgttttatttttaattttactattaataatggaaaggcgtttttcaatgtgctgggatgttgtttgaagacgttatagttttattgtctaaattttgggagtagttttgtcccatgttgttcacgttaagaatttagcagcccatggtttgacaaagcatgcttttcggttagacgatgagctatcctggtttgaggaggattctacgctgattgcgaatatttgtatcgtaaattcatcagtgattctaatcactatgttaaaaaatatgaagaaatatactttaaaattaaatatcaacatttattttaagcttaatattccataaagatatcttcattacacgtttaatgcaattaaaagtttaaaataactaaaacaagccaaattttaaaatggaacaaaacatcacgaaaataaaaacacaaaacaacctagcgttacaaattctacaccaaaaaattaaatagctactaatttttttttccaatatttttattattataaataagtttttaaatatatataaatataattggattcaatcaatttttaattaaattttgagattaatatccatcaaatttaattagaatccaatttttaatatccaatctataatcttattataattggatatccaatttttgtaatttagttgaattgaatccgtacggttcattggttttcaaaaggctctagaccaaggtcggcatcgatctgactccattcgtagtagacattctagagcaacccatcgacatcgccttggagcagagaagtaggctactgcggttagtagggatccaacttttttttgctgattctctatgacatcagttgggtgaaataaatattttcacttatgtttgataatgaccacgtctttaatacttgtaattgtacatattgtttcctacaaacaaatgtaatattgttgagaatcatggggttnnnnctcaaaaccaattggcaatgagtggagta

SEQ ID NO: 119206 - DNA, 839 bp, Cannabis sativa
tggaaagtttttagtaattacacagtgtaattacatccaattctcatgggggtcatgagaattggagagtgtaattggaacccctcaattacttacatggttagacaaacatgctaaattgtataattacctcaaattacacacaaatccaattacattgtggctttccatacgcaagattatccacaaaccgtttgtattgatagattgaccaaatatatataattattaattgagattacatgctctttaattaaattaaaaattatcccattataatgtttatagattttagaataagaggaatttatttattttaagaatttcttttggttttttacctgaaaataaatatattttttttttaaatgaaaatattaagaatggaaaaaagagaaagcttttctattcacttcggaacaaattggtttgagattagaaaacatacacatacatacatttacacaattaattcagtcaccaggaacaatagaaatagaagaagagaataatagactgaaatttttatcttatattatatatttttatttttcaaacagagagttcgggattatatttttaaaattctaaatatctgctattatttatattatttattttagtgttagtaaatcggaagaattcaatccatcaatttaaacaaatggtttaaaatataatataattttttgttaaaaaaaataatataaattaattggaaatattctattaaagttacggaagaaacaaaacaatatcgttaaaccaaaaattaccgttagacacttttaatatataaagatatttatgtactatttttgccattttaagatatatat

SEQ ID NO: 119207 - DNA, 1718 bp, Cannabis sativa
  modified_base (1618)..(1620): a, c, t, g, unknown or other
taatacgcctatgctagttaggttgttacacttaggttgtataatgtatattatacgctaagtgttctaacagtcaacatgcctcgtcttaacctttttatacgaagcgaggttggtgcctcactttgtattagtgatgtcatccttacgattgcgtcttctgatgcgaaatggtttctcgttaatgcatgagtgaatatattgttcatcctcatctcgcttaagactttactgtcagcgaattataaatatattctatcagctccacatttaatgagctattctattttaatatcctttaatataattgccattatattcgttgattcgtattcttcaaggttgacacatgtcctcctctaaagtgctagtcgaatttcaggtataacaatttccctttaaaaagaccctttttagtaaaaaatgctttttaaataattactgagggtatttttgtcataattcattttgaaattatgcatgcctttgattttggtagtttaatggtcccaatgcacgtcaatatcattaatgaaccgtcttttctacttctcttttattttcatccattagatcttctgttttaggatctgatggttattaactttagagtataaaacggtaagaatccaattttctaccatcttcgtcttcttcaaaaacttaagctttctaaaacttgaacatcctgaatccgtgcatgccatccttatctttgaccttcttcctacgcatttactcggactcgctcttcgactcctagtgttcgaaaaactcttcttgcaggccatcgcgtctccattcgcagaattctccaacacccggttttttgacttaacacagtaagtacctcatccttttacgtttccctctttttttgggttatgattgtcttgcattttgttacctcattcgaattaacaattaggattcatattttctgggtgatttatagggtttagacataatttaggtttatcacattccttaagcctctagtttgataaatttcatcagaaattgggattgtttttcttttgtaaaaatgtcccagtctggttccgaagtttattctcctgaatttttagaaccaatatatcctaaacatctagcctctccatataaacctagaaatttcaaacctcaatcaaaattagaagtaaatgatgccagaattagagaccatctaattaagtcgaaccaagaagagactgtaagtcgttataggcgattcctataagaaatttttgagggcaagcatcatttcttacgagacgtggcctggcctgaacccatgatattaacttctattccacttgtaagataaatgtttttacccaaagtcattgttgcttttgaaccaggtgaccttgagtttgaaatcatgtctcctaagcctcgcaaattaaagaccccacaggaccccaatgttacctttgaggcagaacttatcgagtccaaggttaggtctattggggcatacattagtggcatcctgaagtcttgcggcattaagcagcggaaagggtgcattataaggtctgtggcacgtagggaattcagctgttgtcccccagaaagagtaatacgcgaggatgttgggctttgtgccctaaannnaactctatttcaatgtaatcttttctatttaattatcattaaggaaacagatttaattttattacttgtttaatgtattatttggttcatgtgatcat

SEQ ID NO: 119208 - DNA, 3454 bp, Cannabis sativa
  modified_base (1208)..(1211): a, c, t, g, unknown or other
caacctagatctcttgtcggcttgggaagaactttttaacatgctctccaaatctacgtccattcttgcgaagacaaaaggaattaatagcattcattcaaagacaaaggtaaaaagggagaacgagacttgattccctgcctaaggaatttaccataaccataaggagaccgggtgtcactagaagaaggggaagaaggaccataatattcactaagctccttagatcttgtgatctcaaaaatgtcgtaagggttaagtggagttaaatcccagctcaaatctatatgggctgctctatccaacatggttccgtactattcagcaatcccatagaataagctatcacagctggtttgaacatgaaacttggggtgctagctgtcgaatctatgggagatacgatccatgaggagagggttccaagtctccgaggacccactacaaaaaggcaacagatcagtgagcaacagtgacgttgggtaaaaacattgttttggcaaatggagtagaagttaaaatattaggttcagactaggccccattttgcaaagaacgatgcttgccctcggaaatctcttgaaagaatcgtctataatgactcgcaatctcttcttggtttgatcaaatggtcttcaatacttgaatcattcacttccaatttgaactaaggtttgaaatttttgggtgtatattggaggttagatgtttggtatattctggtgctacacattttggaggataaatttctgaaccagaatgagacatctccacgaaagaaggacaatcccaatttctggatgaaatttaccaaaccaggggcttagggaatatagccaacataaactatgtctaatttaaaaagcaaaatatatatgaaccttagatattaaaccgaatgaagtaatgaagtgtaaggcaaatcatcactcgagtaaaatcaaagaaagaatgaggtacttattgtgtgaagttgaaaggccggacactagaaaatccagcgaatgaagacgtgacggtcggcaaaatgagttttttcaaacaccgggagtcgaagggcgggtcattattgctaataatgaccctcgaaaccatgaagccaccaaaatcaaaggcatgcataattttaaaaaggaattatgacgaatatatcctctgtgatcatttaaaaagcactttttattataaaaaagaactttttaaggggnnnntgttatacccgaaattcgactatcatttcagaggaggacatgtgtcaaactgggaagaatacgagtcaacaaatgtaatgataattatatttgaaaatgcaataactcattaaatgcagaattgagagagtatatttacaacttgctgactttaaagtcttatgcgagataaagatatacaaattgttgcctcgtgcattaacgagaaaccatacgacttcagacgtacaaggcgaggcgtcaacctcgctacgcattaagagacaagacatgatgactagtaagatagtgtataatacacattatacaaactaagtataatagtcgagtaaatccaaaccactaatagcgaggcacccatctctcaataggaatggacgctcatggtaccttcactaatcagctccagacacatttcaagggggttcacaactctgtcgaagtcagctctctcagatagaagctgacatacaaatgatattgactgctgaggttcaccttgtcacccagaactggaattttcaaatgcagcattatgtcttcgaccgcaggcaccacgaggcttacattatcaatctcggaaagacatgagaaaagctccaacttactaccaaagttattattgctatataattaggcatatgatatatatagcctcttgccttgtagaatatattaatatatcactcaccattgggtagtattttataattgccagactattccatatatacaatcggtatatactgtaagtcttttcattacttcgtctcaccatatacatgtatatatatttaattcacataaatacacattctgccacctttatatatctatatatgtatatatactatatatatggccattgaaaaatttatgaaatgacaagacctcttttcatgctttattatgtaattgattgatttcacaattttcctatatctacacagtaaaaaaaatttattactcctttgtcaagatatattattatatataatataatacataaatatatgcactgcactattaaactaatgatacatatacatatatttacatatttatatatacatatattttctgtttacaattttttttgacagtatatatcttgatacatatatataaaaaaaaaaaaaagtcatatcactaacatatatatttaagccacacattatgcctatgcccataaattggctactttagtttgacttgaaaatttatatcaaattaattttgattttttttaatcataacttttatatcagcaagtaagtggaagcgactaatttgagtaattgattattttgcattgataattcccaaatagattaacccaatttattattttctttcaaattgaatccgtattttatgataattttagcaacataaaaatttttttggatttcttattctttcctttggttatataccacatattgacttattttctgaagtctagtgaaccaaagggaaaccttgaagcttttcaatagatcaggtagcataacgccataaagatttatattattcttcttcgattatatatcacatatcgacttattttatgaagtctaatgaatcgaagagaaatataaaagtctgatgaaattgacaacatgagaatattagtctcttcctttcccctttgattatatatcacattaacttattttctgaagtctagtgaattagaggaaattcaaatgacactttgtagtaaacaaaaataaaaaaaaaactaagaagaagaagaggtcgatccatttatggattttcacttacccttgtgaagcttcaataatgaccttgaataatgcaatttttttcttcctcaaattttttttctgttttactcttacgtatcaattctttgccagagatttcaaaatcctttttaactgttttgcctctatctaattatagcctctttttttattatttttttttttttgttgataaaacccactcaacgtaaaagtggtggaagtggagaaaaatctccttaatcactcttttcttttggactaactcattcttatttttttttttattattatttttaataaacaaatatttcctttaagttttaacagcaacaaatattcatatactaaaatgataataataattattaatttttttttcgttcaacagataacacgacttacacaacacactactacaatgttagcctttagaggctgttttttcacccccatttataaaaagggaagcta

SEQ ID NO: 119209 - DNA, 1186 bp, Cannabis sativa
atgaagcagccaaaatgacatacttgtgtataagagctatcattctgtgggtgtaaaggtccaattgaaacttgaaaacgggaaagttacataatatagcatgaattaatatataatattcatacattaatgatatacaacgaaagtcgactcaaggtgaaggaagttatgccttagttgatgatgatcacgataactaggtgatgcaaactggagaaaataataaaacaagcaaggagaaggagaccaaggtaaagacaactaaaagcaagtaaaacaagatgctataaatcgtcgttgatggtatttttaatcccaagttgaaaacctacactccactcaactccatacaaacacaatcaattcacacaagattgaaattaaatgaatccacttaataataaataaataaaaatctagacttggttggtaatttggttaggctctttctcatcctcgttcttcttattcaagtaatctttcgtttcattcaactaaagattagcaaactcatagtgcttccatgcctcaaaccatggtcctccctgagtataatgtgcaactttcagataagtattggaatcaccttcaaccaccttgttatgccattctaaaaagttccaaccaaaaggaacatatccaatttcatcatctttaagccactgaaacttgtggaggaaagcaccagtctctgtattaacgagttcatgagtgagaatcttgttcttaggataatcacaattgtataaaaccttagaagaccaattcttccttggtaaacagtctgaacatctccatccatcttagtggtttctttgggcgtgtaatcgtgaacacacagtaaggcgaatttatcactatcactgttcctttctaccgcacagttgcaagagctttgaatatgtatttctaatacaaaaaaaagataaaatatggtattcttaaatttatttacaaggctatttacaaaaatatgggaaaaacaattaaagttttcatatatatggcatgcaaacttaattatattaaatatgacatttttttcaaaaaaacttaaaacatgagaaaaaattattataaataagaattaatgccataaaaaactgtaaaattgtgattcttatttttatcatataaaataaccagttatttacacaaatactgtaacttttttttaaaaaaaaaa

SEQ ID NO: 119210 - DNA, 1857 bp, Cannabis sativa
  modified_base (1786)..(1791): a, c, t, g, unknown or other
aaaaataaaaaaagccactctatcattgccagtgactcctataaaattcaaaattttattaataatggttagccattgctcgactttcataaattctaaacatccaagaaagacttgaggtgcttgcttacgcagactttcatataatggttccatttgattaacaacaacaaccaaccctattttcataacaggggcaggacccatctgcacctcgggagcaggcattgtaggagcaccctgctatctcaaacatcgaatttcttcatcttattcattaatcgtggcttgtatttcaaacctacgttcccaatcctgggcagcttgtggtgggttaacataactccaaccgcgtgccctaccttttaggcctctacctcggccacaaatattaagggaaaactgaactccctgaccgccactagatccgactgaattactttggcttctcgtgcttgttggtttttatggtccatatcagagttataaaaacggaagtagaatttgatgaaataatttttatctaatatgaaccataagtccaaggatctcaacataatatataaattaaatctaaactactaaaagaaaatcaattacctcttgaagcctattagggtatccttgtttcttttcgtataacaatcgaacatccaattcaagaactttgttgaagaatccacaccttgatcttccaagtcagtctcaacactcaggaatagagtgggctattggatcttattggatgaataaatttaggtgttacagtgtgtaattaactcatgagacaatataatgagattaaagtttttaatctcgcacacaccttgaatagtttgcagtcgtgtgagatgaagagagaaagaggcatgtgacaaagagagagggagagagaacagagttgaaaaatccaattctatttcctctattttcagtttgttatctgtctctattttcaatattgttatttatccttctatatatctatatatattatatagtattataaataaagcctttaatcctttatttgaaataaaagaaaaatatctaatttgatttgaattcagaatttaaattcaaatataaatgtctaataattgaatatcaaactatcagtagatcttttattttaataattatctttttaattaaataattatctaataatgtatataattaacaattaaaagataattaacttaatttaatttaaattattttaacttaataaaataattaaatcaaattaatcatgggcctttatatgtcatcctacttgtgtagaatgggcctacatgtgtgagccatattttaatatccaaaatttatttcttaattttaccacaaataaaatttattatttattctaccaataaataataattgattaattctcataaatctcttacttcattatgattaaaataaatattattttctctaaaataatatatttctctctttaatattgtttagtaataatattatattcaactaattaatataattttatccaaataggtagattattgtcctttatttaaaatacaattcgtgtttagatgtccggtgataattttcaataaatttttattattattttgtttgaccaagtatttaaaacttaatagaaaattttaaattttagtaattacactcaattcttataattctcgtgggatcataaaaattagagaatggaactagaactcctcaattacctctaattataggggtatggttactagtgcttctactaactgttatattattttatataatnnnnnntttagattaaataattaagtgtgacaaaatattaattttgtaaaattgtaacatacattatagagt

SEQ ID NO: 119211 - DNA, 573 bp, Cannabis sativa
  modified_base (494)..(504): a, c, t, g, unknown or other
caaaaattatcaacacttacatttatttaacttctgattggctcaatttctttccccatagcatgcggaaaaaataaggagccccacaatagatttaccctatatatatatttaactaaaacaacaaaaaaagataaaaaagagtaatgaaagaataaaaaaataattaaaagaatgagagaaaaaaaaatgtaatatttttacctcactactatttatagagctacaactacaagtaactaaaagaatagttatgatctatcttagtttactatttatctcacttgatggaggtataattttactaaattttttaaaattttagctaagagcactcacaataagtgagctataatagctaaaaattaaaaaaaaaaaaaaaaaattagctaagaatttaaaattaagctctccaacaaatactttaaactcgtaactattttagttcattccaaacttcaagaatttttctttaggctaattagtaatttttnnnnnnnnnnnttgacatgtactaaatcgtgccacctaaactttttttgccattaaaaattccccccgaactattgagat

SEQ ID NO: 119212 - DNA, 705 bp, Cannabis sativa
tggggaattagtaaaattaccataaatgcccctaggttataattttagtttatgtttctttgaagggtaaattagtcatttccattgaaagacacaaggctcggctcgttgcacaaggatacacacaacaagaaggattagatttctttgacacattctccccagttgcaaaaatggttaccttcaagctactattggccatttctactatcaaaaaatggcacactttgcaactcgatgtaaacaacgctttcctaaatggagatctccatgaggaggtttatatgcaacttcctaaaggcctaactctaccaactgaatttgcaaacagtcctgacattgtatgcaaattaaacaaatcaatctatgggctcaaacaatcatctcgatagtggtacaagaaactttcagatgcattaattgaagaaggcttcaaccaatcacaagccgattataccttgttcaccaaaggttctgaggaaaattttattgctctcctagtttacgtcgatgacatcatcattactggaccaaacttggacttactcactcagctacaaacatctctacacaacaagttctctctcaaagcacttggaactctaaagtactttcttggttttgaaatagcacgctctaaagaaggcctcttcttgtctcaaagaaaatacactatccaattacttgaagacaccgggtatatag

SEQ ID NO: 119213 - DNA, 1403 bp, Cannabis sativa
catttttaaactcacccgtttggaaaatgcattctccctaattccaagggcttgtttgggaggaaagcgaaaccagcttcttcaatttcttcggtaaaataacttgttaagcatttccaactatggggcaacgcatactgccacgccctaccactcttagcccttagatttccttttatatatcttctgaggtttatcatccattttaaccacaactcacattgaaccttgtttacgcctcagtattgaaaccagagaagcctttgttttctaaggtaaatcagattgacaaactcattgcctctctatacttattatttgttactttgaatgaattgaatgatgaaaatcacttgatttcataaacgggttctcttctttatgattcgttggtttcgttgaggtggaaaacgaagatgcttataattgaaagattgataatatattattaaatgagtgtgttagtttatttatttatttattttttttggtagaggggtaacccctaaaagttaaaaggtataatttgctatttgtgttgtttttgtgtttttggtaatgtttgtttgaatccattaggtatttcacaatgttacaaagatggaacagggctttttctcatttgtcaagactgggatcacagtcacagaagaacttgaatcttagaaatgatttctatgtcatttcacgtcaaagttataagaaggctgctgcaactgcaactgtggctcctactacttctgataacgttgaaatgagatttccaagaaatgaaactgcggtaggttttcgaagacacccttcttgaaatttaatttccctattatttctagcttctgtttaagaatcatttagtgttggatgatatgtccctttaataaaactcagacgtttcgtttcaggaaaactaaaacagaaaagtattggatagttttgtgtacaatcttttgagtgattttatgactcttgtgatgtcttatatgattgcaaatactatacatgccttgtgtgttattcttttttttaaaattagtgtcagcatgcacagttgttggttatattaaatttgtcaataagtttgaaatcatattatggacactgctggccattacattgctcctgaaaactggtctgccaacattcaacaggttaatcttgataaaatgttttggtccaagccctgctcattggctttggatccctcttccccactgagaattgaagagccaaaatatgagggcattaagcatgttatgctcaagctgatgctgttttattctaaacaaagcagatctattaggggggcaaatgcagtttactcgcggattacctcccaagttgatgaacctgcaatttatgaaggtgaaatttttatcagcatcatttagcacacacagtaaaat

SEQ ID NO: 119214 - DNA, 2278 bp, Cannabis sativa
  modified_base (864)..(866): a, c, t, g, unknown or other
ttctctataaaaaaacaataaaaaaaaaaaattaaataaaagtaacagattaataacatttaaacaacaacaaaaaaataacttacaaacaataaaaatccaattgctttaaaaaaagaaaaaatcaataacaaattaacaaaagtgcagcgtaaaaatacatcaaaagaccgtattttttataaataaaatcataaaaatgtctaaaattcgtataactgtatctttgtgtattttttttttttttttgtatttgtggaataatcacaaaaaataaagttaagaaaatattttcgggctatttgttttctcaaaaaaatattttcaataaaaaaatatgtaggtcgtttattaatttagatcattattgtattgattttataaagatgaaataacattttagtttttaaaataataaatatctttaaggccaatttatgatttatatttaagaaattaaatagtagactattgtaatttttgtaccaatgttgattacgactttccctcttttgagctcttttagcgttatgatttcagatgagctctgaggcatggcaggtcgcggttggctacacaaagtgtaatgccctaacgattaggcacgctataaaaactaatattaaaaccttaatctcgctaaattgagattactagaaagataagagcgaaaaaatttaaacttaattgtaatgcaatgaaaacttgtaataattttaaactttacaaacaaccaaaagataacatgttttgggatcccacaaaacttttcacaaaatattacaagttggttcatatgcctgcctaagcggaaaaatccgagattacataatacaatcactggtagacccaacccgcttggtnnngtgtggcccgaacatgtacaaacaccgccaagctctcgaactcatggctgattacagacagatttaccctttcctacacagtagagcacccgtgagccaagctcagtaaaacagtataagtatcaataaacgcaataaacattttgcatacataacaatgccattatacttattgtctatttgacatagacctgtgtgttacgctcacacacctatttatgtctatgtggcatagacacacgtgttacgctcacacgtctaattataataaggccttagaacggttcatctcgattctaatcatcgagtcaaaccaaattataccttgaatgcataattctttacatcaatatatgtaaaatatagcatagcatttaaaatcatataatcactagggtaataaccctaggacatataaccgctcactttagcgtaataaccctaatcccagttctcaattaatcacaattataatatccatcatgattgctaccgtgcttaactctacgtgctaactactatcttacctgatgtcccgtatacgtggagattccaaatccccgggtgctcctaaccaagtgtcggtaatcctagtaacaatttttgagattcacaattagggttagtctttaaatgcactttcacatatttataatattggcattcaaatatagataaacatacagagcttggaacgagctttccaacgatatttggaacatccaaaacggtgttcggataaaaaagtaacgcataaaataagatcaacattcaacctgcctagaaatcaccaggcgggccacggcacatcccaagcgagccgcggcacctgggttgaaaaacccaagatttccatgggggcgggctgcagcacctgggttctaaacccagaaaaccccattttgtccaacacaaaaccaagtgttgtgaaaattgtgtacgcaagtatacgcatttaaacaagtaataaagtgataagtaagatcgtctccatagggattccaaacaaagtttgatgtaaaaccaactaattacaacttacagtaagaggaaataacatgaaaatggttgagcaatgattcaaaattaaaatgacagtaattaaacttgctaaaattaatactacttttgctagaaaaattgcttgcaagaaaaaaattataataacgtaaaatcttgaatagaattccttctagttaggttttttctccaggtgttacagcattggttcagcattactccagcattttgcatagagataacacaaattcctctaggcttgtgagaattttccaaaactcacaaattaaagtctaacacttagctcaacatattcctatatcaaaccagctagcagaacactattcaaacatcaattcttaagttatgcaaggtaaatgaaatattcctat

SEQ ID NO: 119215 - DNA, 7119 bp, Cannabis sativa
  modified_base (4598)..(4604): a, c, t, g, unknown or other
aggcctcatttcagtaattatattagtttacataaatatcatttataggttgtattatactcgaaattcgattgtacttcagaaagtgacacgcgtcattctcgtgggatatgaaccaatagatttaatgataattatattattaaatgtaaaatgaaataactcattaaatatagaataaatcgagtgtgtccgtaatttgttggctaaatagtataaagtgagacaaggatatacaaactatcagttcatgttttgacgagagaccatcttgcctcgaaaggcgcaatatcgagtgagctataagaaacaaatagcaaggaatctatctcgctccattgacgagacgaattggttattagaacacttagcatataatatacattataataactaagtgtaataacttgaaggacatgattctgaagtctgcaaggccttatggtcaaagagcagttcttaaatttgctcagtacactggtgctcatgccattgatagaatatgagtaaactaagtcactcatttatgtactaggtgagatgcctcatcgagatacatttggcaacgtgttcctatccatgtcagcattaaccgccttaaaaacggttaaatcacagctgcgtgattctctaatgatatcttcacgtatttaaatgtaacgtaattatagcccacaatttcgagaatattgttacgggattcaaatttaaatgtaattaatttcccacctatattactgtaaataggggcagatcatataaaaaaagggatgaaagagctcagagagagaagaactttactgattgtaaaaccctatttttgtatccagaataatctgaataagatagactcgtggactatgcagagttaactgtaaaaccacgcaaaacctggtgttattattatttctattattcttctaaaatctctcataatttttctgccaaatttattacgaaaataggctcataattgttaacgaaaatatgtgttaacagtttggtgctttcattgagagcctacgtgataaaagctcaaaaaaaatccctcctaaccaaagaagaaggaattttttctccatggatgataatggggaaaacgacaacagtcctcctgaagagcccaatcgtcgtcctagaaaagagccaatgggttcacggaggccacccaattcacgaacaacgcgttcaacacgttcaagaagaaaccaacatgataatgatcaaaactgagaaattgggaatgaggaaaccaacactaatgttggtggttctataccttgagtgagggtgcctatgatcccactagatacgtaccgttggttgagttggaaaattgccaactccaacaacgtctggctgaagcaaaccaacgaaacattgagttagagagggaggtagccgcagccagggcgactcaagaaaataacacacagaaccaacctgatcttggagtgagaaggccacgaggtagagctcggggcttaagaactaggaggcaggagacagctcaggaaaacccctagaacactcaggaggaacaacctgggggaactggggatgttccagaagaggaacaaccaaataatcaggcatctcgtcaagaagtgcctcagagaactcatagattcacaacccaaaagggaataaaaacaaagatattccagagtcttctcgtagaaacgagaatggaagacagcacaagactagggaccaggagatccctcgttgtaacaagagaaaccctgagactcaacctaggacaagtggattaccactgagacaccggcaacttccttctcgcagtgatagggaagaggcctatacacaccccagcatgggccatgtatcaaacctttcccaaaggagaaaacatgtacgtgatgaggcaagttttagcacgagacgtataagatctcgagatcacagtcgatctacatgaggaggggatagacctcgacatagtaatgatcgagaaagtatgagtcatacaaggagtagtcaatctgagagttactcagatacgaggtctatgagaaaccatgaatgaagacagacagatcttaatgaacatttgaatcggagtcaacttgatttgcgtgagtgcttaaatcagaatgctcctgatttacgccaacaactcaatgacaatctaaaataataggatccaatccaattgcgaatcagtgagttaggaaaaaaattcaagaaataccaagatgggaaactgcctgattacgacttaggtgaagagcttaaacctttccatccaatcattatgaattacgaatttccccaaggttttaagaaccctcacatctcgccatacgatgggactacgaatctggtcgctcacctcaacaattttaataccataatgtgagccagcaatgtcacgaataatctacattgtattttattccccacctcactgactggggcatcgagcaactagtgtattttattccccacctcactggctggggcatcgagcagctggttcaataaattcacccatcactcaatcacctcttaggaacatctgtctaaggatttcaagaaacaatttcaggcagcaagagataggcgacctgaaacgtcttcccttactaatgtgaagcaacaaccgggcgagtcacttaaggcctacttaagtcatttaaatacagccgctgttagagttagaaacttgaacgatagtatatagcttactgctcttcaagcagggatcacgactgacctctcgacaactggaggaaaactgtgggatgacttacagggtcatccagtaaaaaacatcaatgagttcaatgaaagagctcaagtgtttgtacaaaaagaggaagcaaggaacgagatgaaattgataaagactggctcacaaaattaacccagcactctctcaggaagcattgtctcgacgaaagctgacaatcttggaggctctagcgccaagagaaaagactactctagagaataagccaaagataagaaaaagcaaaagaagcacgataagtatgtgccaatttcaactatttacaccgagcttaatgaaactcaggaaaatattttcctcgcacatgagcatagggttgcattttgcaagcctgaacccatgagacgtgtgaggcacaaacaggatgcagcaaaattctgtaaattccacaaggaaatagggcatacaacagatgaatgtcgttggttgaacggcgagatagagaaccttatctcgcgtggttactttcaacagtatgtaaaatgatagggtaatggacaaaaccaaccaaatctgcccaataacccagacaaccaaagattacaacctcctcctgtagaaggagagaacatcttggtcatctcgggagggccgcatcttggtggagaaagtagtaatgcccaaaagagatatgttaaggaaataaaaaatgggtgtttagttttcgctttaaaaccatcaaagaaagctaacactgaggaatctccaattgtgttttcagaagaagacacaaagcacgtgaggtatccacacatcgacccacttgtaatacaatccatctcgccaacaaaagaataaaaagggtgttggtggatgatgggagctcagtgaatatcctttacaaggatacactaaagaaaatgggattgcaaaatgcgaagttaaaaccttgcatggtgaatttgtgcagattcactggggatagtgtcgccagtcaaggaataattgaactcccattaactgtaggcgagtcgcctttatccacgaccttaatgcaatattttttagtcgtcgacctaccatcagcctataatatcatgttgggtcgtcttacactaattggacttggagcagttagttcaattaaatacctgtctttaaaattccaaacatcatcaggtgtaggtgtagtgtgaggggaccaactactggctcagaaatgctatcgcatagagctaaaaaaataaaaaagccggccatcagttaatggcagtcataatagaggaaggtgagaaacaggatgaggatctagatcctcgagttcaagatgaaaagaacctgttataaccaatagaggaattggaggaagttattttagatccaaaaaatctcacaaagtgtgtattccttgagaaaaacctggatgaaaaactactaataagttttctgaaggcaaaccaagatcagttcacctggagccatttagatatgacagggattgaccctaaagttatttgtcaccacttgaatatcgacccaaattacccagctaagagacataaaagacagcccttggattttgaaagacaaggggcactcaaagaggaagtggataagttgttactaacgactttatacgcgaggtattctacccctcgtggatatttaatcctgtccttgtcccaaaaccaaatggaacttggagaacttgtattgacttttcaaatttaaacaaagtatgtccaaaggattgctttccactaccaaggatcaaccaattggtggatgcaaccgctggacacgaactaatgacattcatggacacatattctggatataacagatcaaaatgcatgtccctgatcaagagcatacaagtttnnnnnnnaacatgggactttattgttataaagtcatgccttttagtttgaaggacgttggggcaacatatcaacgactagtaaatgaaatgtttgaaaagcaaataggaagaatcatggagatctacatcgacgatatgttggtaaagtcagtaaaaagtgaagatcatacaaaatacctccggagtgctttgagacactgaaaaagtacaatatgaaacttaacccaaagaagtgttcctttggagtctcctcaggaaagtttctaggattcatagtcaacgcgaggggcattgaagcaaattcagagaaaattaaggctttgatagaaatattgtatccaacaaaatggaaggaagtccaggccttaacaggaagaatggcagctctaaatagattcatcttaaaatcaattgacaaatgcctaccattcttcaatgtgttgcgaggcaaaaaaaaagttcgaatagacagaagagtgcgaggaagccttgatagctggtttgaaaatagctaaagtgttaaaagttaagaatttggtgtgttatagtgactcacagttaattgtaaatcaagctctaggcaaatatcaagcaaagggtttaagaatggcaaaatacttggagaaggttcagaagaacttggaaaagtttgattattttgaaatcgaacaaattccaagagaacaaaactttaatgccaacgccttggcaaaactggcctcgcaaaacgaacttaataacttgaatttggtaccagtggaagtgttaagcgaaccaagtatatgtgaaaaggaagaggttgagatgattgacggtttgcctacatggatgatgcccatagttaactatctattcaacggaaaacttctagcaaacaaaaatgaggcaccaaaactcttatattcagtacctcgctacacgatcgtagaaggaaaattgtataggaggggttattcaatgcctctcctacggtgtgttctccccatagaagcaagcgagataatcaaagagatacacgaagacttttatggagaccatgaaggttggcagagtttgtcaaagaaaataattcgacaaggatactactggccaacaataaacaaaggcagacgaatttgtcaaaaggtgcgatagatgtcaaagattttcacatatacctcgcgtaccactgacagaactaagaatgatgacctcactatacccatttgcgatatgggggatcgatttgattggggcattgctcactgggcaaggaggagcaaagtacgtagtggtggtcgtcgacttcttcacaaagcgggcagaggctggacctctagtttctatagcttgcaagaaagttcttcactttgtattcaagaacataatctacggatttggaatacccattaaaatagtgtctgataatggaactcagtttgatggagagttatgcgctgagttctacgaaaggaacaaaattattaagagcttctcgtcagtctcaaggcctcaagcaaatggacaagtagaagttgttaataaaagcttgaaggatactattaaaaagaagttggacgctgtaaaaggtagatgggtagatgaactaccacaagtactttgggctcacagaacgactgagaaaacaacaacagggcatactctgttctcattggcatttggctcggaagcaatgctaccagtagaagttaatattgcaacacacagacaaaatttctaaaatcaagaaaaaatccaagaactcttgaaattgtccttggatctacttaaagaaaaacgtactgagtcgcaaattactaatgcagcataccagcaccgagttacgagatatttcaataagaaagtgaagaaaagactctttaatgtcggtgacttggtgttaagacaagtgtttgcaaacacgagacatgcatttgcaggagtatttaacccaaactaggaaggtccttatgtaatcgaggcaatagttagaacggggtttataaattggctcggcttaacagttcgctaataaagaaccattagaatattaagcctttgcgaccctactactagtaaactcataaaaatgttgtaatctctctttctgatgtaatttttaaaattcaattattattaataaagttgaagtattattcaagtaattacaaagtcttattctttaaaattacttgaggggtatatatatgtgtatgattaactagaatccatctcgaaatacatgatatattgcaaacccaattgcaaactcacttcactttaaaaaaaaaaaatccaaattgattgaagttgtctatgaacaatataaagtcaaaaggaaaataaaaaagtagcagttgtaaatgagatttaactcataaaaacaactttaagctacatgcgaagctgaatttctaacgacttgtattttataggaatatattgaatgagttaccaagatgccttgagaaaatacttaacctaaaatatgaatagaaggcctaactattcatataggctgttgaccgagggtttcggcaac

SEQ ID NO: 119216 - DNA, 1956 bp, Cannabis sativa
  modified_base (26)..(68): a, c, t, g, unknown or other
tttccataaaccttgttgattagcannnnnnnnnnnnnnnnnnnnnnnnnnnnnnnnnnnnnnnnnnngtagttagggtgttacagatattgtggagcagactcgagatgtcagcaccatatcttgagaagagtttaagaccgtgtttaaagaaaaattttattacattgttgtaagaacttcacatatggaagattttgtgaagttgacccaagggaagacgacagtgcctgagtatacccttgtatttgatcgtctatctaagttcactgatgaccttgtaccaacagacttcacccggaaacaaagttatgtaaggggactgaatgccactatctgtcgggacttgaaaattaccactgatcaagacacgttatacaagaaaatggttgagttagccttgattactcaagaaatgggacaacatgtaattaaagagcaagctgccaaggatttcttcatgccatcgaatcctagtgtggtggtagtatgagtaaggggaccgatagtggtaacttggatcacaaacagaaggctgaagcttctagaacactgggaagtaatagaaagtttttgggaaatagaggtggccgtcaagcctacaagtctacatttagatcatatcgagagtgtcccaaatgtaaaaagcaccatcagggtgagtgccgggataaaacatgtttccagtgcggtatggtgggccactttatctgagattatccacaggctaagaaagacaaaccaaagaagaacaacaaccataatctggggcatctattcattatgactcaggttgacgctaatactagtctgtcaatggtgacaggtaagttgtccattaacagttgttcttgttctgtattatttgattttggagctactcgttgttatttatcaagtagagaaattgagagttttcataaactatgagatgtgtatgcttcggggtttggtaccctgttaccctcgggagacctaattgtatctactcagtgaattaggtctttttctttttggattcatggttatgaattaaccgccaatctaattgagttacaatagtgtgattttgatataatcatgtgaatggatttcttatctaaatatggggcaacaattgactgcaagcggaagataattgtgtttgaacctgacagtgccaatccagcggtgtttgtggttaaagtacaaggatcgttcatacctagaataacactcataaaagctaaagatctgatgtgcagaggttttctaggattcctagtaactacagtggatactagacaacctgtgtcatctagacctaaaaatacgagactcgtgtgcaaatttctagatgtatttctagaggacttacctagattacaaccttcccgagaattgagttcataatagagttagtttcgggagcagaaccagtagtaaaggcacctcatccaatggctccaacgaaattgaaagagttgaagatctaactccaaaagttacttaaattaggatttataagactgagttattctccctagggtgctctagtgttatttgtaaaaaataaagacgagtcatgtaatgccctaacaattaggcatgctacgacaaccaatattaaaaccctaatcccgctaaatcgggattactagatagataagagcaggaaaatttaaactttatatgcaatgcaatgaaaatatagcttgtactaatttttaactttataaacaaaccaaaaagataacatgtctcgggatcccacaaaattttttagaaaatattacaagtcaattcacgtgccgacctaagcggcaaaatccaagattgcaaaatacattcactggtagaaccaacatgcttggtctagaatggcacaaacatgtacaatccaccgccatgctctcgaacacatggctgattacagagagatttaccctttcctgcacagtagagcacccgtgagcc

SEQ ID NO: 119217 - DNA, 1608 bp, Cannabis sativa
aatattttcgtaactatatttaaattattatttttaagttgtatccaaaaatcaacctgatacaagattctaaagaaattgttttaataaaatatccataattatattttagattttgtagtttcatttgtattagttttactactaatcaaaataaatgaaatagtgatatgtatatagccacaaagtataaacctacaatgatttataagtggtgtgggatttttttttaaaaaaaaatcaccaaagttaaatcatccaattaaaaaaaaaataacatcaaataattttttaggacgacacatcatctcttttaaatatgtatattataatatagaaactttctaaacttgaaacaatgaaaaacaaaaataacaaaagttggaacaatgagaaaaacttacaatagagaatattaaaatgttatatgatataaaaggattaactttaactttcatataaataaaatgtaaaataattaaaataaacataatttaaaaatatttaccgtattttttggaaacactataacaaaatattaaactaaaaaaattaagaaaaaaacaaaataatatttttacgtgattgaaacattaatgagttttagtctaattttattaactattggctatagaatgtattctctcgttatgaaccactaaattttcgaaccgtttacatggacgagatacgtaatacttatagatagacatatatgctgggtcggatagatctaagttgttttaagattttgagtgattaaacttcaaagcctactaatagggaagttacattatttaataatataatttgaattatttgacatggtaggtgagccccgattccaaggatttgccttctgtatggtgtagtattattgacagtgacaagtttgaggcgcaagctatcattaggaaagaaatgttagagtagtgggtgtccctcttaaaaggtgatttcctctttgtcgtgtgcatttctaaagtctgacagaagggacagtcacgagatttctcgatatcgcgtcatagacataccacgtaagctactttctggatgacgggtaatcctaaacaacccttcgaattcttctcccgtatatctcatgagagcatccttattagtttttcatatctctttagttttatatatcttccttgtcttaaacttgcaggcttaagagaagttacaccatattcagacttcgttttatttttacctttatttttataatttttaagatatacctacttttataaatgatttccacattatatcccttaagttaatttaaattatgctaaacttaagtgaaaaatgaaagtatattagacaactcacttacaaaaataggtactttttaataaaatacaatataagaatatttttaattaatggatacaaaaaaaaaatttcatcaattatccctcgaaattcgaataacaataactattacaaattattacaaaaaaaaattatatttaaattatgaattttaattaataaataattattataaataaaagaataactaattacatataaataataaattatattgaattttcaaaaaaaaaataaaataaattatattgaaaaataaaatat

SEQ ID NO: 119218 - DNA, 713 bp, Cannabis sativa
  modified_base (67)..(73): a, c, t, g, unknown or other
aaatgaattaaaaatacttctgttactttattgatattgaataatatggattacattgaaatagagnnnnnnntagggcataaaacctaacaagttgctgtaaagttaaatattaatagtaattattattttaacttttaaacatatttttaattacataaccattaaaaaaaatttatttaatattttattaactgtatttaaaaaaaattaaataacaattaacaagttcataaaaaaaaaaatataaaccaattaattaatatcagaaaaactataaaacacaaataacgttaactacaaaaaaaaataatacacatgattttattaataaaaatttataattgtattaaacataagacaatatatatatagatttacaataatatagataaataaatatatacatgtaaaaaaattatactatagaaaagataaattattacagtgggaattttgttgtgatattttttttggaaagtgaaatttgttgtaatatgatcattatatatattacactaaaataatacataaaataaatttatttacatatatatactttaaatttattttgtacacaaccaaaaaatacactcattatcactacaagaatttttgtcaaaactttagtttatgtaggttaaattagggaaatttatatgttatactaacttttgctatttttttacaaaaatactgtcagacggtatttt

SEQ ID NO: 119219 - DNA, 1591 bp, Cannabis sativa
  modified_base (1362)..(1363): a, c, t, g, unknown or other
  modified_base (1413)..(1414): a, c, t, g, unknown or other
gggggggggggggggatgagaataagtttgttacattttctgttatggtagttatctgttttctgttataacagtctctctctttttcccacgtgttgtgcctttgctagccttttgtaacaacttatctgttattggatccaatatatatatagtagcaaggctcctcacttttacggtgagccattttcatttcatcttcatttctactctattttcccacttcatcatttcacacaatgctataatgagaaaagttaacgtctctcatgaagggctatttgcagacgttactcaagaaattgcttctactaatgaagaccactacaaccagatgtagcaaaatagcaagaatgagcaccatcggtggtgagcgttgatttcaccgaatacccagattcgaagagagaatggtggaggagaagaggtcgcgagagaaggtttatatataaattacgttgcacaacctgtgattcgatcccaagaacccccacacaaaagcaccctcccatatcccctatggccacttgacatagcctcaaggggtatagtaatgctagattgaagctgcaacaacataacatttaatattcaagaattcttactggtacataggcttccatcgaagtcactccaattttaagatcattattaacttagaatcaattagtattttttaattatggtaaaatttaattattatcttttaaaataaaagataagatcaaatatttcaaaggtattatgcggctaaaccctctcaactattattttacttgcatttaaacctccaagtttaaattttagtgataaaacctaccaatctccacttctgtttacaagtcaaaggtatcgtctataagagtggttatgtgccagcatggattgcgccacatgtaaataaatatacaggtgttacattcatattagtccacataattatacatatttaaatattataaaaaaataaaattaaaaaaataaaagaaaatccaaaaattaaaataattaactaaaaaaatacttctctctttcccgtaaacagtatctctcccctaaatgctaaaattttattttgttttgtttttttcaacaatcttaaaccattttaaagtttattcttcttcttacaggcagcggttagatctgggcaagggccggtcagagctgggatgaaatcggtcgaatttggttcgagatcgatcaaatataggctgggctccttcaatctctctcgatcttggctccgatggtgcaaacgccatggttcctagtgtgtgggtagcactactacaaaaataggtttttccgacgtttttaaatagtcatttaaagtattctcgtcggtttctataaccgtcnnctatacgaccgtcgtaaaacgggtgtaataggcgacggttcaaaaccgtnnctaatgtgggtttcccgacggttttaaaccgtcgggaatgtaaaaaaaaaagaaaaatctatattttcccctattttttttcctccattcgctttataattttacctaaattaaaataaaagaactaattaattttgttacaataacaactaactttaaaacacattaaatttatac

SEQ ID NO: 119220 - DNA, 655 bp, Cannabis sativa
aaagaaaactccctcaagattcggactcttaaccaccagagtccctgcttcaaaatcctgaaacgatgttgacactttgctgtaaatcctagaacctcctgcttctaaaaataaaatcctgcttttcaccacacttaacaaattccctttttctgcaattttctattttgtacctgcaataaatcaccatagatattgcaaaaatattagtaacaatagggaacaaaaagatatgtatatataatgtaattatataagtatgaatatatattacatttttttttcttcttttttatgtttttttcttttctttttacaaggggttacataatatatattaaacttgatataatcatcttctttcgctctctggttgcccaaatatgatacattaaggccatggaaacccaaagtccttcttcaagcttctttcaaagtgatggaggtcttttctcggttgacctcaccaccccaaaacttcactccctggcctttcaccaagaattttcttcttgaaagtgcatcacgtagttccaccaccccatcggggtatactcacatcaccaagaaagatccatcacaccttgaatctagtcgtccatgagtagccttcgttaaagagttagaaaaaatcacttgttgcccaacttcaaac

SEQ ID NO: 119221 - DNA, 1183 bp, Cannabis sativa
tttgtcatttaacaaaacacaggatacaaaatggtatttacccttaaataaatgttattttgtttttttttttccccggtaaagaaagtcctcacaaatttttattcatttatttcgggaaaaattatatattgtatggcgtgcccttgtaagttgttgtctattgctatccaacgtcaatgcaattggagagcaagtattttatttaataaaaaaatgataataaattgaaagtgaacccaattaaattatgtggtccaataccttatgtacaagtggcttggttcaattgaatattacttattggattgtatgtttagtcaatgataaataataatgattaatcctatttgttcatctttttcaaaaaaaaatcctctttgttcattttgaataataatatactttctttaagaaaaaaaatataataataatgacaaaaatcttataccatttattttaaaaaatcaatgattatttaaaaaattataataataattcttgcagcttaatgctagagaagaagggctgtgctgcaagatgctcttcaagtggctattgtttcagccttcaggcaggcccacccaagttcatcaggagttttggagcaaaaattttaatttgagtttttccttttaacaaactagttttttttggtatataatggtaaaattttaaaataggtattttgaatatttaattatatttatagcatttttaaaaataaatgggtcttttcaataaaataattatatatttattaaataaatagtgttacaaaactaaaagatggtatttttaaaaataaattgggcttttttctaaagagatttatgggaagaaattagactcaatactatttttatattgtccctttttacttttattctcttttttaaatctattatttttacctctttttttaaatattgtacaaattttgcccttgtcactttaaaatactctccatatgactctcttatgtcatggtattttgggtacagtatataaaaagagatatgtttcaattaaatataaattagaggtaaatttggttaattgataaataaaaaaaatatttttttcaatttataggtgacgtgggcaatacccatcctaaaattatcccaagtcaagcacgcttaactgtggagttcttttgtgatgggctaccgaaaaacaa

SEQ ID NO: 119222 - DNA, 536 bp, Cannabis sativa
tgggaacaaaagtggaggacaccatacaatttttcaaaggataagttgcaatttacagtcaaattgtttagacttttaagttttgtacgatctaactattatagtggaaaaattatggctatactctccaacctctattatcgtgttgctctgtactcattctatccatttggtctattaagtgccaaagtagactaccattctgtatacaagtatacacgtgaaaaaatttcattggtcctcataattttaataatttaaaattgaaaaaaaacaattaaaattataattcttttaaaaaaaataattaaaatttaaatatttttttctttttcttcttcttcttccttcgggaaccaatatgattccttctcttctttccttctacatcttcttccattatcaccaccacaattgttgacctccgaagcctgaatacctaacccaaaaccccaaataaccaccttacagaagactcgtcccctccctccttcacgacccatttaaacccaacccttgcaaaaaaaaaaaaaaaa

SEQ ID NO: 119223 - DNA, 1620 bp, Cannabis sativa
gtagtttcctattttagtctcctagctttgtatataaatatgtactattctatgaaatatacacataattcgattcactattttctacattaatcaagtttcaagctaggaaaattagtgcttcttttgaaggtagatcaaggtaagccttgctattctcatcattttgtattttgaagaaaatagattggttttaagtatggtttcataaattcatttatttatagggttgtgtatattataatttgtttctgagcttaaagtagtttgtgagtaattttaaatttgtaagggcttttagttgttgtttggttgaaagctttaagtttgagttcatggaactctaccttgagctttaatggtggtttgtgaatttggatggaattgtgatgtttgagctatggattatatttagaacttgtagtaggtttgtcttttaagtttggtagcaggtaatttggagaagtagaatacgagcttttccatttctgtagaggaaacagttaactgttccattgaaaacaatgaatcgcttccccatgcaaaaatgtaggcaaacgataaaccgttagggatgttctgggatgctagattttttgtattttatcaatatttagggtattaccactctatttatcaatatggattttctagttttgagtttaagtcctggaaaggattaaaatgagtttaccagtgtaccgttgttgtgacatagggccagggatcgtccagtgttttccactcaggttgaccggcacgcttgactttgaacttaaggtaagaaagtataattgtaccacagaacatgtcaatatatgattcagtaatcaccgtctataagaaagagttaaaactctaaagattttctcattaggcagcagtataagaaagaatcattacactaatctaaatttgtcgttaggtttcttacttatcatttgtctcattaggaaacaatagtgacattgtattatcttattaggcaacgatataaggttgtcttattaggcaacgacaagtgataattacttcattaagtaacaatatattagtttgtcttattagaaaaatatttgttgttaatgaatgtttatattggatagcatgatttcttacttctgagtaaagtatgtgagaatctggttatgatggaatgagtatgtctgattatatctctgtatagatgtatgttgtttatgttttttgcttttcttgttgagtccttgtgactcacggtcagggccggccctgaaaatatatgggcccaagacgaattaaattttggggccataaaatatatataaaaaaaatatcaaaaaaagagtattatgggatttgaacccatgaccttgaatactatgccatccacttcaaccaactaaactatgaatatttgttgcatataatacacttagattttacttaaataaaaacctaataattttttttatttttttattttgggcccctagaaagtgtgagccctggcacgggcctagcccgcctatgcctagggtcagccctagggaggaatatagtactgtagcattgtataatctgtttacctttgtaaaagataagatatgacttctttccacgttgccttcaattttcttt

SEQ ID NO: 119224 - DNA, 1050 bp, Cannabis sativa
  modified_base (883)..(884): a, c, t, g, unknown or other
  modified_base (911)..(912): a, c, t, g, unknown or other
tggtcggtttgatggtcggtttcggtttttcagtttttatgagcacccctagtttaattatttggtgagtccaaactgcaaaaattgcaccgcactcaccattttttgcggtaatttctgcagttttttagtttcgcggtgtaagtgcagaaaaactgcatgtgtgggttaatttaaaaaaatagccaaaaccgcaccacccgcaccgtgaacactcctagttaatatgatatgattattgaattttggtgggttaaaaatagttgggtgatattgatagtacaatgctactagccaaaagataacacctttagcttaacattttttttttttaagttttttcattaatttttacttaatagaattaagtgataaagtcagagaatttagtattttagttatatattttgacttagtgatgaaaattactatcgaaatctacaatgctgacttatgccatcgaactggataatttttgtctaactgaagagcatgttttgtcaaactataatttgcagatgaataaagcaacatgaaacaaaattgttcttaaaaagttagacaaaaaaattataacattctcaaacaacacacaactaaactttagcttttaatattaatctaaaaatatcacaaaataactactaaaaataaattatattaaaatgacaaaataataataataataataataacaacaacgaaattgtacaagcttagccaagccacatttttatatgtggttaatagatatatgtattaataacaaataatatatgtgagattcgaaaaaaaaaaaaaaaaaaaaaccttacaaaaatactggaatttgagttaatttttacaaaaatactgtcacaagaaaatattttcaaaaatactnnaatattttcaaaaatactgtgtttttnnaaaacaccagtagaacacaaaacataacaactcaaaataaacgtagaacaactaaaaaacaccagtagaacaacagtgagaacttaacacaatatactgcaatatgaaacttataaaaaaacacagtaagaaagtaaa

SEQ ID NO: 119225 - DNA, 1836 bp, Cannabis sativa
  modified_base (1417)..(1424): a, c, t, g, unknown or other
aaatctaacatccaatatatgattggatcggatctggataggcctaaaaacattggatgtgatccaatgaacacccctaggtatgataaaaataaattagcttagcgccatgtgatttgaactaggggcagcaggtgatgaaagcaggacactgtttactaaggggccaaaatatataatttccttttgatgggttaaaaattcaattcttaaaaaaataacataaaaaaaaagctcaaaattagggcgagccagcaaaggacccctcaatattaattaataattactacatttttttttactagatcattctaataaataaataaataaataaaataatccaaactaccaaattccctctcacactacacttttttttatttttaaaatttgatgagcactactacaatatgggcttttagcttcatttttttcaacccattttataaaaaaagaagctaaagaatatgaaaatacctgcattgacatttagagacagttttttagtatataccgtaggtatagaatttgtatatatttatgccgtcggttgggggttgggggaaaatgagggtttttgattaaccctatagcgtcggttaatttggtattaaccgacgcaataggtgccgcctttattcgacacttggcacctctggcgtcagttaataccaaataaccgacaccatagggttatgtatcagaacccttacttcgtattcctcatttcactatcttcttcagcacgaagaagagccaccatagcagccccaaacccatgaaaaaaccatccccaaccaccactaaaatagtctcaatctctctcatttcttcaccatttcatcccatttttgtcttaaaatcttctattttcaatacctgaacctacacggtaaaaaagtttggttttttttctcctctatatatcaaaccgaacctattattaaaaaaggtggtggtataactattgccaccgattttggtagagaaaacgttgaatctcaacgtccattaaggtataaatatgatttctattcgttttattaaagtacattggtattatttaatttttgtaaattcttttggggatttttttcattttattaatattatattgtgtgtgtgtgctataggtggctggatttttatcgcaatttgtcaccggattatgtttataaggtaaacatttattaacttaatatataatatatatatatatgtaaatattttgtgttttattattgaatatgtgtttatatgtattgtgtgtatatatattatgtttatactatttgtgtatttttgtgtaattgtattgtatgtatatttgttgtgaatgagaatgaggtagtaggaatttaattagttcaagaaataatgattttaaaattatgttagtgtgatatataattgattnnnnnnnnatatgtatatgttatttttttaaaaaaataactatagaatttagtaactagtaacttgttatattttttaataactagtaagtaattaaataattaaaattctaatttggttgtatattgtaggttgtgagctaatttttgaggttcgacatatttcggtattgatctgattttaacgtgatataggtatatatattcactagctttttgttattataattaattatcaatgcatgtttagtggagtttgaatatcttattattcatctatagtgaaataggttctgcgaatacatgtactgcgatcgaatgggttgataaattttgtattatttatgtttttttatttgttctgtattgttaaattttttttttttttttttgttactttaggcacttataaaatttttgg

SEQ ID NO: 119226 - DNA, 3400 bp, Cannabis sativa
atgttcggtcggttctcggtttaatcggtcggtttgccattgacactaaaaccgaccatgttaaggcggttttaactgaaggcggtttttttggtgtaggtttgttcggtgttcagatggtcggtgtattcgatttggtcggttttttgaattttttgctcacccctagtggcagtggtcggcccctacacaagaagttggcgaagttatatttctaatagatatttatcaaatacaaatgagaaaaatcacctaagactttataaggtccatatccgaccactgccataaggaaatagcagtgctcattaaaattggatagcactgccataatggagtggcagtggtcggctactacacaaggaaaatggatttattggtcaaatttcattttcaacatccatatcaattacaagtgagacacaccacccatgacttcccacaggccatggccgaccgctgccattgtccaactccaactggtggcagtggtctcccattaggggtttggacatcgaaatgaggtttttgggtcctgagactcccaaaatataactcaccataaaaaaagagtcaaaacacgctccgagaggtccgagagcatgcatggccgaccactgctgttttgccatgttagtgctcataatcggtacaagacaacataaactgccttcagtaaaataggcataactctctcattttttatccaaatgacatggtttaacttgcattagaaagataatttcaagacaaatcaaagtgtgcctcacagccatagctcaattatgaagtttaggtctaaaattagctcacaagataggctggtaaattttactcgaaattgagtaatgctactaagcgagggttgttggaggacactgccatggtccatgatatggaatgagctaagttatatatgcttaaaaaattccaaagatgtgaaacagacttgttagttttaactagcgagcactccacaccaagtggacaatgaagtacacccatgtgggtccaaatgtcaatacataactaaaataaatgtatatggtaaaaggagacataaatactaatatgttctcacacaagtaacaaagtgcataaagttggtccatagagagcactaccataaatcgttattttcaatatttttctgattttcttggttgagcattttaattttatcatcttttaagagttagaaaatatttagggtcaaacgggcttgtgaaaaccaatttatgacattttttgttttcagccactgtactgagaaaacggtaaaccgtttttataggaactcgtggctatgggtttttaggtcatttcattccttttattttgctataaaacctatcctaaacacttacaactccccactctgatctactaaccctaaatggaagccttcattctctctctctaaacatatttcccttatctctttctcaaacctcatccctttctcaaatctcatcactcgcttaatcacttcactttctcattggtttcttcctcatctaggcatgaaaaaaagctaagatcatctacacaacaagaggagcaaagaaccacggctaggcatgagctcttctctcatgggaaatttgccactagattccatgaagactgctcaaaaagagacatactctatggtaagaaatgtgatctagatatccttgattatgttgagtttagcaatttatgtaaagatatgggttgggaaaccttgataggcatttaaataagtatttaccctaaggtagtgagagctttccgtgcttaaattgaaagtgtaatccttagtatcaagggaatcatcaagggagtaaaatttaccttaccattgattctttgaatgaactcctagatgccccaaaagaaggtatcttacttgaccctagacctagaattaggaatgatgccaactataaccacacctttttttcaactagagtttgtgtaggagaagatattcttgataaactaaaatgccacaatctcactctccaaagaaaaatcataaactctttcatatgtaataacaacctagctcctagaaagggacaccaagatgaagttagtgcacttgaccaaattctcctttttaacatctttgtccaaagcaaaaatattaacttaggctatctcatcattagaacgatcaatgatgtctacaagcctaaaaaagaaaagccttaccctatggtgctctcattagctacttgtttcctcttctaggcattctcatcgaagatgaaactgaggtcctagaactcaaggattctgacgttttaggtgcaaacacatataagggtatgtcttacaagtatgatgaagaggaggatgaatgtgtttactctaaacacgattcacaagctcatggagaagtccaagtgctttctagtgctagtgaataagaagaagaagtgcaacctcaagcacctcttagtcacttgcatcatattttagaatcatttttcatgtttttagtgtgcttacaaggcttagtgtctttgactctctatgtgttagtgtgctttattttagttatttgaccttgttttttggatggcatggttgtttgaacttgaatatctatggtctatggttttttttaatgtatggtatgttatgactttctatcctttttttcttctttgccatttattttatgaattcccttgccaccatttcttatgaatcaaaagaaagagaagttctatatatagtgattatttttatgttgacaaaaactcaagttttggactaataatgttatttgaatatgaatattattgaatgggagtttacaaaatcatgcaaggtaaaactaaaaggtaaaattttattttttgaaacccttgcacacatcaagggtgagttaatctaatatattgtttcaatttatttccttcaaaaaaaatcaaatatttgatatcataaaaaatggggagactgtttacccaaactcttaggtctctcattgttttgatgattaacaaatatttgattattatttgtcactaatgatttgttgattttgtagcacaattaaagataagtaatctttttaaggcaaaattaactccaaggacaaaataataattttaccaaaattctcgaaagtgaccgaaagtggattccaagactcaaggaactcaagacaagactctatgaaggtttatatttacatttcctagtcttgtacaataattttcaagtctacacttaaaaaagttctaagtacaaattttggctcactaacttgtgtgacaagttatttcacaaaaacgatatctaaaatttctaaattaatttttaagatcacatatcatttaactaaaagaacaaaactgaattgtttgaaatcagataaacgagtagaaagttatgcgcattt

SEQ ID NO: 119227 - DNA, 1124 bp, Cannabis sativa
ctctctctctctctctctcaatccaatatttgttcaagaaatacggaccgacacggtacgaaaatactgggcctacgggtcgtgccaggcttacccttaaaaaatattgacacaacatgatccatattaaattgtggcacggcaggacacgaccaattttttaaaaagcacaaataaatactagtcgaaccaacacgacatgtacgaacttacagcattgatcgagaccaaacatttctcatacctaaaacgatgaacagaagcaaccgagtgaacaatataattaagtaaaattgatattagatttcatatgaatatcatatttcatatattttattgtaaaaaaatgtcaaaataaatttttacataatgtgaactaaattataaacacataattttttctttttattaaaaaaaataaaaaaggaacaagttgatcggattagttgtccccacttatctttatctaagtctatcattgcccatgtctttatttgtttttaacttttgtattcattatagtgcttttataatactataataattaaatttatatatatgttcagtttgatggtcaacatttagatggatacattgcaccaagatttccgaaagtgtttatggaagtgtacaaagtcatactcaatcactacaaagaggaggaagagttcaagagctattttgaagaaggcatgcatgcataataaatatatgattatgtaagggttaagttgaaaaataccctttatttgtgtccattaatcaaaaatactcttatattatattttattgaaatatatccaattttgtgagtgagttgtcaaatatacccccacttttctacttaagtctagcatataatttacattaacttaagggatataatagggacatcatctataaaagtaggtatatcttaaagaaaatgaaaatgaaggtaaaaatcaaaacaaataaaataaagtgggtatacaatgtaatttcctcattatgtaacatggtaactagggtcggccttgagttgtattgggcttggagaatgataaattttgagaaaattaaattatatatctattttattttacttgtttaaattttaccttcatttttatattctttaagat

SEQ ID NO: 119228 - DNA, 676 bp, Cannabis sativa
agttgcaaataatgaagaataaaacaaacagatcacttgagtcaagtcatccttgctgtttacagtaatgccttgatcattaatgagtgatttaatagtgtttttggtcttccgtgaagttgcatgagcgtggaaaaatttagtattttgatctccacattgtagccaatccactcgcgatcgttgatgtcaatattcttcttcttgtgccaacaaatcatccaagattgcttcagtatttttgagctgagaaaccgtatcattggttctgtctactgcattatttagtgcagcaacagattgttgcagatgagagatatccttcttcatcttcccaaatttcctagtgtgccattgttgtaaagcatccgtgcaagaggagaggttattcaggaaaacatcaacactgccataacagtcaggtgaccaattagatcggataatgacagcagcatcctcctccttgagccacattttctcaaatctgaagcgtgtttttcttgctggttttgcaacagtagagttcaaaagcaacacatttacaacaattgccctgtgatccgaagcatagtaattgttgtcgagcaaatttcgacaacaccagttttgtgcgagtattcaagggctacttggataccaaaaatagatatgcgagtactcccttagaatagcgagt

SEQ ID NO: 119229 - DNA, 3053 bp, Cannabis sativa
aataagattacaatgaaattggattttatttaggacataaaatctcaacaaactctcacttgcattaatatgaaactaaaagtgcatttcaatttaatcttatatacttgatgtcctaatcaaatgtattactgggcattgtactaggatctgatagattgtattcagtatcaacctactctattatcacattttccttagtcataaaatctatgatttctagatgttttaatcctcttaggttacaagattttttactgtttggcaattgcatatgtgttatcatgaagtcgcattaggaaattattcaatgtttggaattatgccaaagtttgtatcaaactttcttaagtctgaataattcctaattgcctttagggaatccttattattcagcctaattggtagagttagagaatctagataggcttttacacttcttcaaaaatcacggctccacccccagagtaatcaccaattcttaagtagactttctagcattaacgcaactctaaaagtctaatttggtgtagcctaagggttttaaaataccacccttataactaacttatagtttctcttcttgcatttgaggatatgtttgagtatcttccaatattcctttatggattgaactaatactcacaactcgattaatgatcgcttagctttattttaagaattaggagatgattagggcttattgccaggaataggctttaaattattatttttgtaattgtggagatatatttaaattttaggtgtattaattatgttatatatgaaattttgtgttttttacattttatgcccagtaatagtagaatatcacgatttggccattagagtcaatttgaaacggtgtagtatcttagatttagtgagacaatttagttagacatttagaatgtatggagtatttggggttgtgatttcataccattttaccctagattatttagtttacttcatactgaagtaagggtaaaattgtcattttaccctagatgtttattatttattttgtgacttgacttgtggactaaggaaatttagttcttgttttgtttagtaagtatcgatatttactctaattgattatgatgagtttccttttaaagtttgatatcttattcattgtattttgattatttgttaatcttgaacgattttttttttatcttaattggcctatttttggaaagtttcatggtttattcttatttcattttatttattttttaaaaaaaataagggaaaaagagttgggtggtttcctctttgttagtgggcaaggcagttaatttttgtttaaattggtttcctttttgctcctctttcatatctttattttaaccaattcatttgtcatttaaatctcaccatcttctcttttacccgatccctcttcgttggtttcttgtctctttgttcttcattttcttttttagaattttatggctaagacaaagaacttagggcatccaagcaaaatggtggattcaaaaattgctccctcaaatgcttcctccgtgccttcaaaatcgcctcctactgctgcaactgcttcaactccaggggattcatcgcctcctcagcatgaatcaaagaatgtggctatcaagaaagcttcttcttccattcccacttccagaaaaagggcacccaaaattgtggttggaaaattagtgagacccgtccgattgcccagatcttctaggttcgattcgaagtcttcatcttcgactgctaaggtatctccttctcatggctcttatcttggactaaattgtttcattctgaagaggtaaaaaacgtactcagaagcttatttttccttacttaacctataaagttctttcctctcagaaggatgtggtttattcccatgagatactcgagcctcccctcactggcaccatatttcaaccctcggagtactttgatggagcctttcccaagcgtcctaaggtttctgttggtgcaaatcatgttgctgctgctacaaattccagttctgtttctgcatatgtgcaggaagtcattctggtgaacaatcgtttagttgccatagaggaggttcaccaagagatgtctaagcaactgtccactctgatcaagctttacggggcataagttttccttttatttttgactttttgttggacttattttaatttctacttgtctttggcccttagataaacaaaaagggggagtaatagtttttaatttcttgctttattttctcaactctgttagtacctgtgctaaactttgaattaaagttagtattatatttctgtgtttctcagggggagttttgtttggtatggccaactttgttttgcaggtacttttctattaaaaaatattttgattatctaaagttccaaatgagagattgtaggtgccaaaatattttttatttatggtgtgatttctttgtattaataaaccaattttctcaccttaataatttatttttaatgacgacttgaagctagctcaagtggccataggtgggtgtgtgtgttggaggtcatgggttcgagtcctaggtaaaacatggttgtaatatataaacgcttaaaataaaaaaaaaattatttttaatgctcttttctttcataccaaagaagctttattcagttgtttattttttaagtttggaaacttcttgtaagagaagaaattctcttctggaaagttcgctttatatggaaactttgatcatggttaattctctttaatgtgttcgattgtgtcttgataaaatcagatcaagtacactgtttttggcaggtatcaagtccatatacatgatcggtcaccattttggcaagtttccttttctggtctggtttgttgctgcagaacctgtctctgttgctgcaaaataagattttctttaggaaagtttgtagagctgtagaatctactttgtggctgtctcaagggttcctatgttctataaatagaacttagagagcagccaattgagtcaactcttctagctttcattttttttttttttttgcatattttca

SEQ ID NO: 119230 - DNA, 677 bp, Cannabis sativa
taaaaacattaccgaacagccccttaatttgttagatttagtgctattttactccttggccatttttcttttttattataaccaaacgcaacaaacataaagtagattaaatctgtattcttgtacagtatgtttatttaatataaattacttgacaacacagagtggatccgtggcgcaatggtagcgcgtctgactccagatcagaaggttgcgtgttcgattcacgtcgggttcaattcacatctttttatttattttcttaaaaattaatgttctataatattattgaaacttactttgataaaaatattgtagctctgctacggctaatcatcagtcatcacgttcatttttatgttattttaataatgattttttttttaataaattatacatcgattttttttaaataaattatacatcgagtttttttttactttatatttattcgttgatcagatttttttttttttttttttttcaaattcttcaatctcataaatgttctttaattttctttttgtccaaccaattataaatggggaacttataaaagtattgacttttggttcaatctttataaaaatactatcacacgagacagaaataacttttatactattttggttcattttttttttcttttatactgtaaacacacaaaaaaaaaaaaa

SEQ ID NO: 119231 - DNA, 567 bp, Cannabis sativa
aaaatcattagatttatgccgcttacaaactcaaaactttgagtatttatgccgctatttatccctttaaatatattataactaatgaattacggattgagagcaagaaagattacataatatataatttatgcgagagaattaataatagattatattataataaattgtaaataataacaaatatttgacacattaaatgtgatggataatatttttctcgtttgggggtgtggaaattattgtacaattaatcaatatagtaattatataatattttaaaatacaagatgaggaaatagtaattacataaatttatattcttttatttgataaaataatgttagtaattaatattaatagtaataatacacaataatattatttaatattttaaacattttgtagtaattatataatgtaattatacttaagggattttttcatctatagctttattagggtcaaattttacatttttattactatatgagaaaataaaccaaattagaaaaactgaagttttttttttcaaaaatacgagagtcttcttccccaaaaaacttc

SEQ ID NO: 119232 - DNA, 927 bp, Cannabis sativa
  modified_base (867)..(867): a, c, t, g, unknown or other
agatttgaaataattagtgcacatcattaggattattggcttgaaataataacatgagaaatttaaattactagacagattccacacttcaatcttatacatttgatatgttagtccatctataaattactagacagattcgtttaatgtgtgttggcgtctatcaacatttagaggaagaaaagaaaaattgaatatgttaattatatgcattagcactatggtgtgcctcaaattaaatcaaacaaaatcacctaccacaactaaatcaatgatctctctgccaaaatttccaagggaaatatacacaacaaacaaaccttgcagccatctcataaaatgagctacaaacaagttaagatatggccctttcaaaatcgagcctttcttttcctagcagtgtattttgtgtctgcaggtacaatattccctcttcttctcaactgttccttcttcttcagtatccattccctgtccttcccttttttcattattctttgctttttcaacggcctgtgcctgtcagaaacacatacctgcaaacgaaaacactaaatcagctccatccatgacctaacatggctaaagaacaggccttaaatcaggtgaccaaatgcattaaatttttgcatagagataagtagagcaaatggtgttcagtaaaagtttacagtttgattttcttcatctccgctgctatcgtcgtcttcagagcaactctctccatccttgcctggtcggccacaagaaagaacaatgtatactttctttttcttggcactgtttttgaaataatttttagtcaaatttagcagataatgagcagaggaaaaaactatggtctcgtttggtaacacttttgttttntaattttttaatcacaaaatgaaaataaaatttttgtttttaaaaaatttattttttaaa

SEQ ID NO: 119233 - DNA, 986 bp, Cannabis sativa
aaatttaacagaatatttatattctgttaaaccaagaaatgccgataggcacttttaatatataaagatataaatattaaaaactaatttcaccatagcatgaaatcgaaaaataaaagacatcgatacgtgatatgtgatggggttttcattcaaataagttcatagtatatgaatcgttaatattaaatttgcaaagagatgcatctgagctagacaatgaattgtaatatcatagaaataacctaaactttccatcctacgagagcatctacaaaataatgaagaagaataattattagtatcaaattttcagtaaatatatgaaaataatatatatcttaatttccacataattattatatgatataaagactaaattattagagtatctgattttctttttaaaaaaaaaaaaaaaccaataagattcttgctaaagccctctaaaatagtattatcatttattgagttgactaaaaatagtcgaagccagtaacactactacaatattagatttttaaatttaaattatttaataataacaaaaataactgaaagcataggctttcagtagcatctcccattgcagaaaggaaaaaaatatatgtgggcatcctattgctttgattatttagaaataattaaagcctaaagtgttctgaacttctaaatgagctttgggcctataagaaaaccctaacatactcagtcgcctctctctctctctctcatattcctttctcgttgagatctcacccaccagcaaccctagatcatgtatgtttttttttcatctctcttgtcttgcccgtcgtcggcccagccaccatcagtcctagaagttgttttttttttcttcttctttttctctctttttcagtgcctcttagccaagctactgtcgaccctagaagttctcttttttttttttctagctctttttctcaatgtctcccttctctctcttgatttttctatgatcg

SEQ ID NO: 119234 - DNA, 1189 bp, Cannabis sativa
gaagaggaggaggaggaggagaagtggagagaacagatgggggcggaggagagagaagcaatacaacaacttacaagagagggaaaaagataaagagataacgacaaaaaaatcaatggggtcggtctggggctggggctggggactaggactactaggactgtgaatgaactcaatacgtcgccgtttaatgaattatggcaaaataataataatatctaactatatatacctgagctgagctgtgttaagtgacgtggcgatgtactactggttatgtgtttcttctctttcattcagctaacggtatacgttacgtttattcttgagattttcttttgttttttttttttgaacaatgagattttctttggttacatcaaattcaattattttgttttttctttgagagatttatgcaatagtagagaactattagtgaaataaatgcttgatttagtttatacttgtatatatatatggctaaatttagtttatatttgatgattactttgtaagtagattgtcaacatatgacccctttttatgcatataagtcatgtaagtccttattagtgtttcacaattagttatctttgaaaaaaaaaattaattattatcacttttcaatcaaccatactaattagaaaactttattagtaaacacctcgaataaattttcaaactacgccatacaagatagaaaaataaatattaacgatttattacctaacatattcatttattaaagcacctccaataacttctcttattcaaaatacatttttttaatcttttttaagggaaatgaaatttttactcaacggcaaactcaaaaacaatcagggagaattggcttcctcgaaaaaaaaaataataataggaagaattgaccagcaagaataaagccaaaaataaatttaagtatgacgattatctatttttataaaaaaaaaatgctaaaaagtactagagtctctaacaaccttataataaagtgtcattcgtaatttaatattagattcgatttattttacttttaataataaatataaaaaaccaataactatttataagggatcacctcatatctttatatattaaaagtgcctaactgcatttcttggtttaacaaaatataccttcaaaataaaagaatattctgttaaatttaacgatgttaataggt

SEQ ID NO: 119235 - DNA, 2319 bp, Cannabis sativa
ttgataatcagataaataaactgcttctaatttagagatctaggaggaagacttagttgagagtattacattattaaattgtaaaaattgctatagatcaatcaaatacgcacacctaattattatatattattatcgtgttttatgttatatataaattgatcttgagttatttattattaatttttctaacatttttctcactttgattttagatttgtgtgggatttataactttattggcttatttttttctcctccattctatccttaaagctcgttactttaaaaacttttttgcaagcccctaatgggtataattcttctttcaccttgaaaagtcttctttgggggcgtcaactgctcaaaaaaggtcttgtgtggaagataggtgctggtaataatattcctttgtctgcctcaaactggatccctggtatctctcatcccacccttatgcaacccattgatccccttcatgcttttgtttctttctttatcaaccctgatattacttggaatgtccctaaactcaaacattattttccttcatatcaagttgatcatattcttcaaatccctttagatcctactatggttgactctctgatatggggttttcatccttctggtcttattactgtcaaatctgcatatcatctagcctcttcttctgcctccaatgactcacctccctcctctaatccgaacccttttcagcagtggtggaaagttctctggacgcttcccgttccccctaaaatcaagcatttcacttggaaagctttcaaccatattttaccttgtgccttaaatttgtttcataaaaaaattatcccgcagccatcttgttcagtttgtggtagtaatatggaatttgtcacacatgcccttgtggattgccccagagcaagaaacatttggaagctttcaagattcaaaattttttaccgtgatcaccgaagaacagacatccaggaattttatctccaagcaatgcaactcatctcaaagcatgatttccctctttttgttgctttcatttgacacatttagaatactagaaactcaatattatttaataaatctattgctcctaacaatgtggaagagtttgtttataattatttacaggattacaatgaggcccaacaaaacaatcgtgttggtcattcggttccagcctctaatcagctcacacactattcccaattgtttccagtagacgactttcatgaggactcctcggctctttttgttgacgcagttttagaccataagcatggcttaacggggattggtttcattttcaagattggtcatcatcagattattgcttcggaaaatcgtctcttgcctggtgcatccactcctatttttgcagagggtcagtctttgttgcaggggatatcttggtgtattgactctcagttgaagccataattcatcttctccgactgtttaaatttagtttcaaaagttaatggtgattggcaagaccactccgctctttctcgtcttgtttctcagatcaggctgttcttctccaacttccctgatgcctccttgaagtacttacctcgccagttcaacacagctgcccattctcttgccaaggatgttattataaggttgcgtgaagaaggccatgagggattattctaattcctttgttgttgctgcttgtgcttagtagtgtttttctgcagcttgttacatctctcaaaaaaaaaaaatgtatatattaaaattatttttttttagaaaacccatacttgatatactaattaatttttttttaaaagaaaacagatatattttattaagaggcacaaaacttaaaaagtctcaaaatacaaaacgaagctcaaaagattattaaacaacaaaattcataagaagccctagccaccaaacacaggatctaataatattcttagacctacatcaatgagacaaagatatatacttcgaaaagatttctaaatattaaaaattttattaagtagaataccaaactcattataactaatatatttactattgaattatgataacaatcgaaaaaggttgtaacattcttaaacccaaaccaaaggcataaagataggctatgaaatagggccattgcctcttctacatgaggctcgaaggtactaatatattttcttcacttatatataattaattcttttaattttttggggaaaaaattgtgtgaaattatttattttttataatttaatccgtgcacgtatattttgctcattatttagttacaaataaagttctaaaaaatttgtagaataatatatgtgt

SEQ ID NO: 119236 - DNA, 1782 bp, Cannabis sativa
  modified_base (1091)..(1096): a, c, t, g, unknown or other
gtaggtcattaccactatcacgggaccgaacttctaaaaattttagtattttctttacttatagttctttgctttctattgtttattttatttaattgtttaattaagactcgttgtcgtttgcttgaagcgaggtcaacaggtttctcaatatcatatttttaactagctggtaaatattactgatttctttttgtcaaattctagtccaactctggcgataactccaacaaatgtccaatatcagtgataacttcggtgtctaactacgttgaatttttgggagcgtcgaatttttcgatgatgataataattttgtcaaatattctcattctatttctacttttattgcgattaatattttgttttagtggatagtgactgttttgtgtagtgaattgatggtcgattcttggagcttcttagaaatttgtaattggttttaattttggtcttgtattggttttagttttagtagtggtttggtggttaagtcttggagcttataagaagcatgtaaatttataaatgagttttgatatttgtaatgtaattgattttaacgttaagaaaccaattgttgatggtgagaactcctcaacaaaagaataaagacttaaaataatatttaaagatcttgatagaaaaatgattgaaataaaaatatcacaacctttgatctccaaaaatattatcgttttattcactaacaccaaaagttcttttataataaatttaagggccctatttatagtgagcctttagtactttacaactttactagatccctactccatcgaatgtgaaatcactttcacatctgataattttgtatcctaggtggtttgatgtactcgacatcctaagttacactaaaaatacccttttcattttgtacctgcacgtgaaatgaactttgtctctattaacactcattgtactatcgttatctcgtctgacacttccttaattagattgtttgtgtcaagagggaaaagaataacaacaggagtattagattgtttttattttctatttttttaaattaaaatcttctaaattatagaaaaatctatatatatataaaggannnnnntgaggcggtgacgtggcggtctaaaaatactttaaagtcattttttttatttttctccttaattctcttatttttttaatttttttaattagttaattaatctcgtattttttctaattttttaatactattattaataatttttttttttaaaaaaaaattacataatataacataaaactattcaccttcacgtttttattttctaattttttaaattaaaatcttttaaattatagaaaaaaatattaaattaaaaaaaaaactcttgcatatataacataattcttggtttatgagaaattatagggtgacttttttttaaaagttttttttttctcttctctgccaaagttaacgatttattcttaatttaaacaagataattttattttttctgcgcaaaaaatatctgtaactaaagtaaaatccataatatcctaattgcaattccactgcgcataagaatttcacgatgaactcaactccccaagtaggggtgcacacgggtcggattttcgggttttcggggtttcggattcgggtattcgggtatcgggtagtggaaatgtacaaccgaacccggtgttcgagtttgctggtgtatcgggttcgggtcggttatgttcgggttgggtttaaccgggttcgggccctattgggctgagcccgaatttttagtttat

SEQ ID NO: 119237 - DNA, 2346 bp, Cannabis sativa
ttgatggtaacctatcttaacacccgtaaaaatctaatcttaagttcaataggtaataacaaattaatagagtgaatatggcactcaattgtctcatccatggatgagtacatgcagtaaaaattgagggttaaaacagaaaagttttttaaaaactgacaacggcgtcaagttgatactttcccccaaatcataaagagcatttatttcttctatccttctgatggtgtatggtatggtaaaactcccaggatctctaagtttgggggggagcttcttctgcaataacgcactgcactcttcagttaatgtcattgtctcgtaatcctccatctttctttaacttggcattttttctaaggccaccgcgaatgaaatgttgatgtgcaactttttgaagacttccagaaattttgaaaactgcttgttcaagttgttcttgcagagcctctatggataaggaatttttacaaggtgctcaatgctaataggtggtgaagcttattttgatgtaagaccctcagtagtcttcttctctttttgttctagtgcccattgatcctgacccacttcttccactggttgtttcttactaggcccttcatacttcttcccacttctcaaagtaattgccttacaatttttctttgggtttacctctgttgtactgggcaagttaccttgaaagcgattagccatttgagtagtcaattgtcccatctgagtttctaaggttttaatggaagatctagtctttgtcatgaactgaagtagtaaatctgtctgaagattagaccttccactagaaccttgttgttggttttgttggggatgattttctattggtagaaatcttgctactgctgatttgaagactgcccttgaaaattctgacgacagccccctccttggttgtaaccatagttgttgttatgaggatagtttttaatgcctttagcttgttccattggtaaactattcacatttatcgggcaagtgtcatctgtgtgaggccctccacatagctcacaagtaacttgagtctgttttacctaagaagttgtcaacttaatcatggcctctacttaggatgtcaactttgctatagcatcaatttcatgcacacctgtaacttttttcaattggcttccctcagttggccattgttggttattcatggccatctcttcaagcaagtcataagcctcattcgcgcttttcctcataaaagccccaccagttgtgacatctatgactgttcgagtaatatcaaccaacccattgtagaaattgtggaccaacatctacttctcgatcccatgatgtgaaaattttctaatgagatccttgaacttctcccacgcctcatatagagaatctttgtctagttgacaaaaattattagtctcccctcgcagcttggtagctttagctggaggaaaggactttgataataacttcattgtcaagtcagtccatgtagcaatggagttggatggcaaagataccaagtaactcttagctcgccccctcagtgaaaatgggaacagtcttaggcaaatggcatcatcactaactctgttcacctagaatgtttgacataactccatgaagttagatagatgcaggtttggatcttctgagggcaatccaccacactgaactcttgttccttctattctgtctacaggtcttctcgatctcatgatcaacaggcacttttgaacttagtccttgacgtcgcataaaccaaaagcacctgagatagcaacaaacaaggaagaaaccaaagtagaattttatctaatttttgtaatatcattgtttaaacaattttccggtaacagcgccaaaaacttgttacgaaaattataaactacgcaagtacacataattaagtagtacacacaggtgaggtcgatcccactggaaattgtactgaataccactaaattagacttgtatttctatttggtaaataataatttttgatgaaaataaaaataaagaataacaagaaattaaaagtgaatgatagattaaaaaactaacctaactcttttcagatcttttaggtcataaatcatattttatcaattgcatctctaaaatagactaacatacaatccgcattaaacaataatctcaaggtcacaaaggctatgcaaatactctcattttacatcaaaacctagtttatctaattttagcattctcaaaacttactttttagattttgaattgggatcatagaatacgaaaaaatgtgaacaatctcaaacatagaattaagcacgaatatagataaattcacaatcaagaaagaagaaattgttgggttttatg

SEQ ID NO: 119238 - DNA, 2012 bp, Cannabis sativa
tttctattcccatatttttaattaacaaaacaaaatgatacgtgatgaatttatctttctcaaaatgtggtaagaaaatagctaaaaatgttaaaaatttcaggtaaagttttctagtcccactttaaagacataaaggtatgaacaattagcttgaatatggcaagaaaacaactgaaaatgtcaaagattcagacaaagttttctacttccacattccataagttttaacaataaaagtaatcagtagaacttaaacataacaatgaaaggacattctacactttcaggggtacatagatgtatatcctactctcaagtgagctgagaatttggacgtctccaaattcctagtcacttgtttaagatgcatcttaaaaatgaaagtataatgcattcttttgaataattcttcagatttcatttcattatgcctggaggcgttacataaagaagaaaaattataaaaatacaaccaatagaagaatatgcttgacgcaagtgatccacattccaagcttgtggaatctttgatccatacagtcttttcaattggtacgtactattacccactttatgttggatcttgtaaggtccctcccagtttggtctgaagacccccactcctagttcctgagaagctgggaatacttttcttaagacgagatctccaactttgaatgttcggcccttaacttaaacattgaagtgcctagaaatatttccctaatacattttagttagacctgagactgttcttggagatccttgattaagtccaaagactctttaagcaaagcgtggttctaagttaggtcataagtttcttgtctgcgcgaaggaatggtgttttcaattaggatgcctgcttcccatctataagccattgggtaaggtgtgtgcccgattgaagttcattctgtggttcggtatgcccagagaactctaggaagttcttccaggcaatgggctttgcaggcctgcaatttttcttcaatgtggtctttaagatcttgtttacgacctccacttatccattttcctatggtctggccacaactaagaagcttttgataatctcgtgttagacacaaaagtctgtgaactacacgctgtcgaattgcttctcattatctgagacaatcttatgtggaaggctgaaacgacacactatatttttgatgacgatatccaaagccttcttcaaggtgactatattcatgggttttgcttctactcacttggtgaagtagtctacaaaaactatggcatacttaactccttattttccagttggtagagattccactaagtcgattccccaaacagcaaaaggccaaggactattcatcaaagtgatttctattggcaaagctcgtggaacctttgcatagtgttgtcattgttcacaattctgaacgtactcaatgcaatctttcttcattgttggatagaagtaccattgacgaagaatcttctttgaaaggctcgatccggaagtatagtctcttccttcttctcacggatgcacctcttggtcttccttgttcgggtgcacctccttaactctctagagggcgttgtctactccatcacctagaaggctgaaagggctttcgggagcaggaggatctcgtctctaagggcgaggctcctagaagtgtgatgggcttgagccacacttaggcccgcctccggtttgtactgggccttcgtatgctggaaggctcgagccactgatcacatggatcttaatacgccacatgtcgtttttctaaaaacgtgaataacaaaaaaaaattatgcataattaaaaaaatgaaaagaaattaaaataattattggaacacaatataatgtagataaattataaaaatgttaagagttattttttaaaattaatttgagttttttttttaaaaaaaaaaatattggggtatttttttataattttgtgagttgaaaaaaaaaatagagaattactccatataatatatagggtgattctacaa

SEQ ID NO: 119239 - DNA, 1275 bp, Cannabis sativa
accaaaccttcattatatgattgtgagtttaagaagaacacataataattaaaagctgaataaaacataacaacaacaatcaaaaactagctttatcctatatgtcacattacatataatacatttatatatatatttatatggttagtttttcataattatgtgttaataattaaaaaccccttaaaccccaaatatcatcatcccaaaacacatcactaaacaaagaatgactaaaatcttcaccattttccacatcccaaaatggcaaccaaaaagccccccaagacatttgctcatccaccacaacaccactcaaccaaggccaccaccaattctcctcccaacccaacaacccttcactctcctccggctccggcgccaccactacctccggtgccggcgccggcgtgacaacagcaacaacagcaacaacatcatcttttttcgcagctatttcaacaggaggagcagtagtagtagtagctcttgtcttctttctcttaccaaaggtcgaatctttactaattgggtccctattagccaaaaccgccatagccgcatttctttgcctcttcatattatttttttttggtgttgctccaaaatgagttgatggggtttaatttaaagctttgcccatatacaaaaaccaacgctttcgtgaatgaaacggcaaattgatgataaatccaaaaagagagagagagagagagagagagagagaagaaagtggctttgtttgaattgaatcaaaccaagttggttatttgtgatgtgtgcaagtgtgagttgtgtgtgtgtgacaactttatttaagagattataatagtgaaaaatgaaaatctgtgaaaaatatcttttcacgtgcatcttcaaaaatttgggtttggcatgtttcccaagcacgccctcgagctaccaagagccacccaatatcttcccataatttaatattattttgtgtctttgtgttttcgaggggatatctatatctatatctatctttccatctattattgagtctataaatatagctacttgtatgagtcggcagcaattagggataacgagacttaaaggccgtaatttggttttgggtcacttggaccatattggtctggacccatcatcaaatgggtccaataaattaaagcattattattaagggatattttcaaaaatatgggaaaaatgagtcatcttatgataaatatggcaagaaaactaaatgccacaaaatatggcattaactaaccaagcaaactacaaata

SEQ ID NO: 119240 - DNA, 1256 bp, Cannabis sativa
tttctcaaagttggtgttggccaatttttgcaaaaagctgaaattttttcttaaattcttaaaaaaactagttttctaattttaccaaacacattttgaatgatagctttttaaaaaaatgcttctagctttgttaaaagctatcccaaacgcaccctcactaaatacaacaccaaaacaatttcttttttcctttctattaatcttttacattataaaattaatgttcgtacacttgggataattcatttctttactatattttgtttttcttttaaacattaaatatgtgcctcacaagtcacatggtcaggcaaagcatttcttctctcactcccggccctgttgttgttttgagtcaaatatttgttgctcgcgcacacaagcgtgtcttcaggtacatgccgggctcgtgtcgcttgcacgtggcccgtattctgcatcttaacatcttcttccccaatttgcagggaattattattattttttactctaaataagcaattaaatttctattcaccataaaagtcttatttaattaattataccccaacaagtgatgtaaaatacatatttctctaagatatagagatgatgagagaaaatactactttatgagctcctatattatatatccatttcaaagaatgttattctagctaatctacatttagagaaaactattcatccttcaaatcatattttatttactcatgtgtcctttttagtctttgcttattattttatagtatatttaaaaaatataatgtttaaataatataaatagaagtataaaagaaataatgtatggtgtaatataaaagattgagaaaaaaataaataatataataaaattttaataatgtattttaaagtataaagaataaaagtcattgtaagtgctctttcaagttttttatacataaaaaaataatattggtacatcattatatttgtatgtagtagtaaaataactctactttcaacatatggaaataagccactaaaactaatttagtggtgagcgagggatgacgacattgaaatcttagaaaaaccttccacaaaacatcgataataccctgccaactagagaaaacttcgtacctcagtaactgttcttggcctcggccaaattttaactgactcaatctttcctagctcgaccataattccatcctttctgacaatatgccctaggaaggacttttttaacaaccacaattgtaacgccccaatattttgccttattttac

SEQ ID NO: 119241 - DNA, 2320 bp, Cannabis sativa
  modified_base (2210)..(2237): a, c, t, g, unknown or other
gccaaatcttatgcgaccattgaatctagaatggttaaaaacaagggaggagaccacatcctcaagctctgaagccttggaagtatcaaaaatgagatcccaggagctcaagattaagtacctagcgctaaagctgacaaaaggtctggtgcactgggtttcgcttatccgatcctgatgtcattttgactgttcgtctagttttttataataataaagatctatgaagtcagagatgtcaaattcataactttgcatttctcattctggcatacttagaaatgaagaattttgagtctctcaagtctgcagaacaacaacatctttgtgaactagggaccagcttcgccagaacacaacgactaactaagtgatgtcaaaatatcacttacgcatcttaaagtacatcccttggacgtttttacacttacctagcatccaggttaacgtcatatgtcaacctgggtgctgggatggcaacatgggcgctagatgcgctgggtcatatgaaccaccttcaattaaacagtcataattcactcaattacaatccaatggacgcaattaaacttgtttttcgaagctaattcaattctctatgaagtcatgtctcaaactcgagacataattctaaagttatcgtcgtcaatttcaccccaagggagttacgaaaataagctccaagttacccgcaacaggacctactgggcttcaaaaaatggccatcaccactaagagctaatttcatctttagatcatcatcaacggtcaaaaatatatatatatatcttatttgtgtttttttcctattttttgggcctccttcacctattaaaggagagctttataagctcatttttcacattcaggaaactacccacaaagtcaaagcttctctctctagtttttctctctagaaattggagcttctgacacttagtctttttctataattaccatcttatgagaaataaaaactcgaaatagacatagctccataactcttacgatacggggagtgaactattataaatttgctaggtctcacttataattacataactacttttttatttttgccaatctagcgagcagttgggacttagaagtctagtctaaatttttgaatcaataatatgtttaaacaaaagttaacagaatgtaaaaacaaacatgaaataaagaacacataagattgtacatggtatcagtaatcctttcaaattgctactactccacgaggccactcccagagaattaaatttattagatgaatctcaagtgattacaaaaccaaattgacttataccctctttgaattttctgcaaccattgtaatatatctttctaacgaaatttctgaagtgttgagaccttgaactcccttcaaatcgtagcacttgcacacttcctcccaaagaatgactcacttgcacttttcctcctgaagagtgacgaacaagtcttctcccgaaacttgaggaacgatatccaatgtttacaacctggacaatttcaacaagaaataatacagaataacacaataacaaaatactaagaacttattcaactcaaatttttcacacactaaagaaactatctctaaatttgaaaagtaatttagaacatgatacaccaagagagatgatggaattcaacgacctaagattgtatttatacactttagaaaccctctaggtcgtgatcaaagaattaagaatccatcagctaataaatggaaaatcttcccaaacaaaaaagtcagattctgttcaaacagactgtacgtcaatttgttcaaacagataaattaaagctggacaattttttagcaacttaactatataaataagaaaacttgaaaacctttatccatatacacggtttattaaaaataaaaataaataagaataaaattaatatattttgatttttcttaaaaatacaaagtgaatactaaataataatttaaataagaaaaatttatatttattcactaataaagtcgtacaatctgatttgatagactttctacattaagaaaagaaaagatattttcgaaaataataaatacaaatacacaaccaaattttaaaataatacacattatttttatttattttatacaatataccaataaaaatttgacagggtgaaatataaactaaacatgctaatattttacaaaattaaggtgccgtttggtaacnnnnnnnnnnnnnnnnnnnnnnnnnnnnaaatgaaagtaaaatttttgttttaaaaaatttatttttgaaaaacaaaaatgcgttctgtaaccacttttgtttttcaattt

SEQ ID NO: 119242 - DNA, 1397 bp, Cannabis sativa
taagtgatggctatgagagtggagttacatcactgaactaaattcaaagatgaatggattttagattcaagatgtactttttacatgactaataataaatccttactaatttcaggaaatccaaaagagagatggtcctcctaggaaacaaccaaacatgccatattaaaggctctagtaatgcgacctttagccaaaaaattaatttctataagtatgctagatgaccttggtgttgtgagtaagattgaaacatgtaccatgaaactaagcaaaagttttatgaccctaataaaaggctacaaagaaagaggtctatactacctaaaaggagaaccagtttcaaattgctacaacacagcagtagaaactcctaaagattctaaggcagccttatgacatagaaggcttgggcacattagtgagaaatgtttgtaaattatgagtgaacagaatcttttatgtaaagataaagtaagtaaagttaaaatttgtgagcattgcatattgggtaagcatcataggcttaaatttaaagatggaacacaaaagtctacagaaattcttgaatacatacatgctaatttatggatagtcttgaaaagataccaactcatggggggagtagttatttcctatctatattatatgactattctaggaaaatttgggctattcttttaaaatgtaacaatgatgcttttggtaaattttaagaatggaaaattttgatagaaaacttgactaacaaaagggttaagactctaacgataatgtcctggagttttacaataatgggtttgacatatattgcaaaaaagtaggcatccataggcataagactgttagacataccccacaacagaatggagtagctgagaggatgaacagaactatactaaacaaagccagatgcatgctctttcaagctagattagctactggattttgaagagaggcagtactcacagtagcttatttgataaacaggagtccatcaagtgttgtggagttaaaaacccctgaagagaggtggtctggtaaaccgccagatctgtcccacttaaagatttttaagtgggcaacatatgaacaccaaagtattgggaagctagagccaagagctcttaaatgtgttttcttgggatatcttgaaggtactaaagggtatagactttgagtaagggaaaaacctagtatgaaaattataaatggtggggatgtaatttttaatgagaatatttctccatgtgttgctactaactctactaatgttgtagtattttattttacatttctaataataatttataatttatgtttgtaattttttagtataatagtatcatttctatgaattttaagttgttttgtggataataattagtttattgaat

SEQ ID NO: 119243 - DNA, 5332 bp, Cannabis sativa
  modified_base (5304)..(5307): a, c, t, g, unknown or other
ctggtaaaataatttccaatagatggttgggaacatgatctacaattatggagtcttgactttcttaaggatcgaacattagttccctttatgtgttaattctagtactagaaagttgcgcccgaagttagatggaatctgaattatacttccactagtgaattaatagtactaaaggataaagaattattaagaaaggtaaaatggtaatttgaccaaaattaatcacaaaccgacacaaactaatcacgagaattgattatatctaataatttaaatttcatacatggttgttgtgtaattacctgattgaataaatatgtcaaacattataattactcaaaattacactcatttccaattaatgttgttgttacaaaaaagtaacatgaaaatagatattttttaaaagaaaaaaaacaagtgaaaaaccttttaaataaataaaatctgtaaaaatatgtataagaaaatgaaaaaaatataaatatatatttatatatatgattataagtcaattgtgtaaattttccttcaaattttgagtattatactagctactcatttagcatagactcgttaaccaaaataaaaatgcctaccatttatttgttttctttgcacaatagtaatattttattttttttgtatagtgttttattattcatagctttgttcgaatacatttcactaatttttattacaatgatatgattattttctttttcttatgaatttgctggttatgttgttctttattgataatatatttaaaaataattgtctaaaaaaagtagtaatattcctacaattctacaatttaactattttttagctttagaatctaagtttaaccttatattctcttttgtatggacttgttgtcgtctcctaaacaaaagaatatttttttttccttgttgaaggtattaccttgactgcaacactagtgtatggacaagaagaagaagaagaaaaaaagaaaaagaagaagaaaagaagactacaactattaacaaatataaaagaaacatctatcaacacaaaagtaatcctcacagcctacatgacatcaatacttatattttttttactaaaatcttaaatcatcaaaataaattgaaaaaattctcatatgaaccgcaattgaatgtacatatcttcccatagaacatacaccaacacaccatttactttaaaggtagtcgcattttattcaaagacgacaatataatagccaaagaaacaacaactcttttcattgtctgatgctcttgtaattaaaagatattttcatcaattaaaaataaataacaatgttggctttagtaacaaacaaaaaattaataaataaataaatagcaataattcaaaaatatatttgtacacatatttgaccatttgtgtaaacaactcttataagttgtatcacatatataccacaattaaatccacacattgttttttatgaaatggctttggcataatagtaaacttctcaaatttaaaactcctataaaaatgtatgctaaaatcattagaaaatgataaatcacatatcacgagctacaagacaggttaagtaataaaaaatttgttaaagaaacaaataagctaaattataacttctccaatccaatactcacaaaatcattgataattttcaatcctaacacaggattcaccaatgacacattgctaaaaggggcagaaatatctacacaatacaaatacatattaaatgttagattgattcacttaaatgatatagaccaaaatataacaagaaaaaaaaacaagtaaaatcaaaagagtaccttctcacaaattgatatatccccaacccatcttcgtaaatcagtaggatctttaattgcacctttttcaataatgggtctctaacataatattcaaagatttttataacctcaatctaaaacaatttagtatctataattgactaaaaataattaacactaacagaaattctcattggtataaactaaaacttcatggaaggccctcttagcttagcctcataatcacacaataaatttatcaccatgttcaccacctgcaaaattatttatcaaacaataggtaataatatattaaaaaatcaaagcagtactttgagccaatatttattcaacaaacccttgtcccaatcaatgtataaacatttagtgatagaaagtcttctctctcacccacgactctttcacttaaatataaaacttccttacaaaaggaaaaacgcaaaactaataaaagtaacacaattattgttgacaattaagttacaaatataattcttaatatgagataatagttattacttatctacaatttattgagttgtcaaatatatatttagttacaacttcttcacaagaagaaaatgaggactctccaataaaacagggtgtcgagcaaactaatagatacaatgtgaaaatttctaaaagcttaaggtgctccttgcatctctcacaagccaattctactttgctatcctgatatatagatatataaaattttaccatttacacacactactaaaatatatatttatacgagaaaaaatataaaataaaaataattacccaattaccaattcagacaactcgaactgactaatatcatataagtttaaatcaaatctagaaccactgttagtagctactaactctttctcttccttaacataaggattaaaacatccatatcctcgcataaatcttgtgttcagaattgagctataattcctctttgatgattctacgcaactatagttacctttaattgatattgactccttatcttttgttgaaactaacacattagctttcaacaaccccccttccatataatctccatcattcgtctctaaacaatttcactcattcaacattgatgattcattttcaaatgacacttctttattcttcacaatgtcttcaagctgaatattgtcctcactaatgtaataatttggaccacaactaacattcaaaccattttcatctaccttatttaccaatattttttcatctttcacattaggtataatcgaaacatcaagatcactactgttaaatcctacaatatcttctaccaattttaaaaattcaccattttccatagtagggtccatatgatatgactacataattttgagttccgagtcctcaaataatgcaattgatgttctcaataacatatcatcacgcttgcaacaatcttcataaaaacaataaagatcataagcacaacacatctttgaccttataagtgacaccttctgacgtaactcttcaaccttacaattttgctcaaaaaaactttttatcaaatctaataatttcttattatccatctcgacctacacacaactccgacaccaaatgataaattttaaaaataacacgacaaccaaaaaaaaattattagtcaacacaaccaaagaagaactaaaataaaattatccattatttagttaaataacttaaggtctttgttctctcctccctttctagttccctctctctcgttctctttaagcatagttgcatatgtttacaatatgagttgtagtttaatagcttgttttggtatctgaaaataatgtctacttatcctttcttttggtggaagaagtaggcatttcactaaaaatggagctaatgagatattagtggaaaatgaatattgaatattactttctttcatattttatctcattgttagggctcaaattgtttattctgacctttctccttggtcaattcattgtcacaatgctcacttgccattcaatacaggcagtctttgtttccaatatttttcgatgatttaaattgtgtgatctcttgagctgaccaactttaattttataggtatcctggtcatgctcgtatgtgggtaatacttatcaggtctggaattggatagcataaaaggggtgattatgatttggctacggaggactggcataattttgtcggttcgacaaaatcttcttatggtattgatatgagtattttatcaaaacctttctcagaagagcaaaagaaaaaaaaaatactatctccaggtgactcctaagaaaattttaaatgtatctaactattatgttcttgataatgtgacttgtttaaaaatctgcatgttcttttactgggacattttaaggattaagacacctgctaatggtataagagcacacttttctggactaataattttttattgggatatagattgttttttgtttctcttgagcataactttattaaattccaagttctaatagaaatgtcctcaaaataaaaacttttttaaagtgttatatggcgtaatatacaatatataaatttctgtagagatcattgtggagaaaacttcatccaaatcaagttatagggctcttgatcgtaataaaagaggttaactgtttaacagtctttgtcaatgatattcttgaagttaaagcagatgttttttttttttttttgtcaataacaatggaacatacaaggctttgtggctttgggggatggtttgatattcatttttgagtaagttaatctcttagcatttcgtttagtctcaacacactcttttgagcaattccacaacagtattaacatatatatatattgttgtgtagtctttgctacaacaggaaagaaaagaggacccaactcgcaagaagttgagttgagtactgcaccttgtctaaataacgatacacattgagggcaacaggtatggtctctgaagcaaaacgttttttttttctagttatctttagaaactttgggtctccttgtataacccatttgaggtcatctgtggtctttgtgcaatattattgttgccattttgctataatatagcatatagccaatttgataagtgaattagttgattttggacaaattgagagttggtatgcctgtattatttactagatttgtatctgtttagcaaaagcgtaagtgtataaactaagtcagctgcttattgattgttgtgatttttgtttttatttttttgatagtgattgttgtggttcaatgatagataaagggaaatttacatcatacattgcctttttctaatttattacatatatactgtcaagcggtatttttttcttttttactatgtgtattttttgattttattacggcaatatactgctttttttttgtacaaagtttttttatttttttttcgagtgattgggacatgggctgtcacaaaagtgacaggttcttcttcttttttttttttttnnnntttttttttttttaataattttaaa

SEQ ID NO: 119244 - DNA, 939 bp, Cannabis sativa
attaattgtgtcgtatcgagtcgtgtcataatcgaaattattcgaaatacttatactcaaagcaagattaaaaaatgtagataaaatggaccaaccgtccattttgttgcatgataagatgcattgtgttttcttattccacaatgtgcttgaaaatattggcagtttcgaaaatatgttttttttgaatagtaattttgtaatcataaacattatccataattttgttttatcattgttaaatgtcctactctacaacattattgggtttcttggtaattagggttttcattgtttggttggtgttggatatggaaactcagctaagcaaatgggcccatgggcccatgcatccactgatctggtggtctgctatctttgttttggacctgttatggtctgaactctgaatgaatatggggcccaacccaacatcccaaatgtcaatgatcattacctcgattttattatttgacaaatattccaaaatttaatattttggtttttgattttttttttttaaaaaaaagaaagccagagagtgacgatcaataattgattttattgctacactacagaacagcaatgtaagaagctaaatgaatattgccagttactacaaaaaaaaaaaaaaattcattattcaatgagagattagaaagagagattagtcccaatttatttatttagtaaaatttgattggttaaagcttgaacatgccaactcaagcagtttggagccttaggctaaaaattaaaattggatgttttattaaaaaaattatcaatcaatacttcctaaattcatttttttaataaaatatgtcataaattctaaaatagataaattttttaaaatcatatgtattgagaagggctgttcatccgatccaatccacatttttttgatcaaacaacatctaatccgcactaagtgcg

SEQ ID NO: 119245 - DNA, 2534 bp, Cannabis sativa
gatgatgatggcaaaggtaaagataatcaagaagagttattaccaacctcttcatatgttgttgagcaagaaaatgtgtcaaatgatgatgacacaaatgataatcatatacatgaatgttcccctgatatcatagtcttacctgatgaggaggagaacacaattagggttaatcaaatgtttcaagacaaaaggactcttgtgaatacaatgagtatgtattcaattcgaaataatcatcaacatagagtaaagaggtcgtcttcagaagattatgtgttggtatgcttacatcatgattgtccttggtactttcgtgcttcgaaatgtaggaagactgaaatgtacaaggttagaaaattcaacaaggctcgtacatgtttgtcgaacaatgttgtagttgggagccatcgccaggcaactagtacggtagttggggattgcatcaaaacaaagttgttggattcggaaaatgtatacacaccgagcgacatcgttgatgatatgaatgaagattatagtgtatcgatttcgtatcaaaaagcttggagagcaaagcaaaaggcattggagcttactagggaaaatcaaaaagagtcatatcacaaactacctggcattttatacatgcttcagaaatgcaatccaggtagcacttttttttatttgtcacaatataattttttaatttttgattatttttcattgtgcattacctctaaatgactcttaatggaatattaattcatttacaggaacaaaaacagacatagtaatggacagtgaaaacaaattcaagtatttgttttttgcaatgggatcatccataaaaggttggcatcactgcacaccaattatttttgttgactggacattttcacaatgtacatatggcgaaattttgttaacagcgagtgcacaaaacgcaaacagaggaatttttccgttggcgtttgcagtagttgactctgaaaatgctaattcatggaattggttcctaacaaaagtgaaagaaacatatggagaaagagatgggcagtgtgtcatttcaaatagacatgagagtatcgaaaaggcaaccaaggagatcttccctaatttgatgcatggtgtatgctcatatcatctactacaaaatatcaaaaagaaattcagaaaaagtggtgatgaggtcaaagatgctttcaatggtgcatgcagggcttacaatgcggatgattttgaaaaatatatgaatgatttggatggaattgatgatcgcattcgagcttatttgcgtgatgaagttggttacgaaaactggacaagagtattcatcaacaacacacgatattcaacaatgacctccaacattgtcgagtttatagatgcttccattgaagaagtacaagagttgacaattgccacattgctagagtgtctaagatgtttggttcaaaattggtattcagaaaacaagaacaagtctttatcaacacatacacacctagctaagaaggctgaagatgtcttgtgctataaaagggaaaaatcattaaaaatgaaggtaatattattcaacaattatcagtattttttttaattgacaatatattagtacatattaattttttttaatcccaaatgcaggttgaaacattaagtgaactcacttttatagtgaaagacggtaatagatcatatacagtggatttggagaaaagaacatgtacttgtaagtgctttcagtacgatgaaatgccttgttcacatgcaatgactgctatatcaaacaaatccttgaattgttatgatttttgctcatactactacacgaaagaagcttacgtggcaacatacgaagaatctatttccccgttaggtgatccacatgtttgggatattccggaacaaatccaaagaacagtagttttgcctccccaaactaaacgtccgattggtcgaccaccgaagaaaagatataagggctgtcatggaaaaactaccaaaaataaatgtctacgatgccacgaaagggggcacaacgtaagaacttgtaagaatgagcaaatagaaaaggcctcaaacgacctttaaatgccaactttatcagttttgtaattgacactctttttttcgttaatgtgttagaaatattttatactctgtagtctgtacattacttttaggttgccattttcttaaaatagagattgttttatatgtaaaccatctcaaaataaaaactacctaatgacaaataaatcaatattaataataataataaaagagtactcttaacgactattagttttggttttacaaattagcttcatgcaatgaaaattgggaaatttacatattaaataatttactgttttatgtagaaagatatttttttttttacattttacagtgtttataaaaataatacaaacacaataaaaagactatataaaaataatagaaaaataacaactaaatgatataataaaataatatacaaataacaataaaataataagaatactatataaaaatagatttaaaaatta

SEQ ID NO: 119246 - DNA, 795 bp, Cannabis sativa
aaatttatgttgtgactaaaatattatcactaaaaataacagttatttttagtgtttgatagttacaaaacttttgtggaagtctagaaaatatttatatatactagtttgaatatgtagctttttcaggagggaaaatgtctaatatttataaggttaaaaatattattaattaataaattaatgtgacttatgaagtagaacattattagaaaataattgagttagagttgtagctataaatgtaacgccctaacaatagtaatgtcacgcacagtgacttaacataaattaattctaataaatcagaatctattagagctaagcgctgaaattaaacttttaaaaaaatgcaaattcaaactaataacttgtaataataaactttacaaacatccaaaagtacaaattttaattcgggatcccttaaacctttttcaaaatattacaagctatttaaacatgtcgacctaagcggcaaaagtggagaacacaacatttttcccctagtagacccaacccccgtggtctagcttggcctgacatgtacaatacactgcaaagccgtggatctcatggctgatcaacaatagatttaccctttcctgcacaatagagcacatgtgccaccgtactttatatcacactatcccatatataataatgtcactataactactgtctatatagtatagacccacgtgttacgctcacactgttgggaatattttaccaggatataaatttactaacaagtatgttgaattaacatctaaatatgaattctctaaaata

SEQ ID NO: 119247 - DNA, 1721 bp, Cannabis sativa
aaaaaaaaattaaaaaggtatattgtaagttttcagttttaccaagattttgttttaatgagcataataagatattttcttgtgaaaattaagaaaatgtagaattaatgctatatggaaaaagaacatttatttaggtggaccttactaaggattcaattcacatatggctcattatgttacgtgagagtttatcttgttagttcatatgacccactaatttaaattaaatatatgtatatataataataaaatataaaatttatatggacaaaatccaatatcctccaatccaacaaagttaaattttttattataaaaaaaaaattaaatttttaaagctatagagacaatcttgctgatgtttaacataattgattaattaatgttattatttttttaatttgagaacaaacatatatttgtttgttttgcaaattaattaaacattattatttgtaaagtaattttttttatattagatagacacttattatttgtttttctttaataaattagtaacttttatgaaccattaaaatcttccattataatgaattgtactttagtggaataattctccaattaaagtacacgacctgtataaaaacaagaattccttacaaaaaaattactttatttgcagatcgtttaataaaacacaaatcaatatgattgtaagacaaaagtaaagtacgaacatctttaactaaaaaaacaaattgagaaaacatagaaatattactttgaatagcttagacataaaccaaactgtcagtctcaataacaacttgcctccaagagtgtcgagtaacttaacttaaagcttctttaataccaataatctcagcaatttcaggttgaacacaaagtatactccaataattgagatagtcttaatatttgacagagacattttttttaaatattattttttaaaattattttttttaaaataaaataaaattaaacctcacgattattgtataaaatatttgctaattgataagtgttgttgtaatatttgctaaaattaattgtttttgtttataatttaattcctttttaattttttctttacatttatactctaattttataattatgttgtgttgattctttttctatttattcaattttaaatatcttaagaattacatgctggctatttgggacttataccttattcttacttaattgagtcattgataatgtactttaaggccttccactttccataccattaaaaataatactgacatagcaagataacagcgcaaacataataagcataacctttcttgtaacacaaattgtggtgggattcaaacccttaatctaaataaaaaaaaaattatgaaaaatatttttactattataccacacaacataaatatatttgggtgcattcttaatggttattactcatgaatatctaataatctctaaatttttgtttattatcgaatataattacatgtcctaatatttaataagttatttgcagctaaaccctcttaattattacttcacttgcacttaactatctaagcttaatttttgacggtaagactcttaaaactactgaattgcttgcaaatttactattttttacagttaattccaatatagactacttatgtgtacacttttgtacatgtattaaatttatattggtacatctaatattattattttaaaaatataaaaattatttcaaa

SEQ ID NO: 119248 - DNA, 1936 bp, Cannabis sativa
caccatatccttttgagtaagtaccttgccaagagagttcaaaccattagtgattgtagtaaagcaagtatacatgttagcaatgttttcatccgctttcatcttaaagctctcatattgagtggaatagatttgaattttagtttctttcatagcactagttccttgatgagtaactttgagcattttccacatatcaaaggcggtagaggcttattcaatatttttaaatggatctctatccaaaccacatataagagcatattttactctagcattcttagaaagtattttcttatcattctcatcataagcctcataagttttaataacttcgtcaccatttataacatgtttagcaatgtaaggaccattagacacaatattccacaaattataatccatagattgaaggtaatattctattctaattttctaataagaaaaatctccattgaagtatggtgctctatttgtgcgcaaaccttctaacatgttattttgtgaattacttggaaacgttatactctagattgtgaaatctaataaaataaatgagcccttgctctaataccaattgttaacccactttatatttacaagaggaggtgaattggaaatttaaaataatttcggtaaattaaaatttttaacacaaaactatacaattaatcaatttaatcgagtaaatacaaataatatggtaagaaattatatagagcaaataataaaacttgtaaagtaaagagttttaagggtaagaaattacaaactcttaatttttacaagttccggtagaactaagccacctacgtccttagtcttcaaagctttagacctagctttgagttccactatctagccaagttaatgagcttgactaacccttacaactgggaatttttcaccaatgtgtttccaaacctcttacaatagttttgcagtgccaagggattatcggcctctttctcagcttgttgtagtaacaatttcattctaaccgagttatttataatgccggtgccaacctcacttcaatcacaatttgaaaatgtgtttaaaattacaagcaaactgactctagaagtatgataaaaaaattgaaaatctagagtaattagcaagcacactttaaagaattaaacacaaattttggctcagtgtgtgaaaaatatttattggattttaaacttgggagcttattaaactaacttgaatagatttggtatatgaaataaatgctcactcaacttacatttttgggtgaaaatcaagtttatatagtgtttaaacaaaaactagctgtttatagccgttagaacgttttccaaaaagatcttgggaaaaatggtagaccaaaaatagggcagtggaaaaatcttatgttttttagctctaaaacgtgcataactctttactcaattatccaattttagaaatttcaaattttttcttctagctaaatgatatgtgattttaaaagtcagtttaaaaattttagatatcatttggtaaaatgaattgttgcacaagttagtatgccaaaattcataattaaaacctttttaagtatggacttaaaaagcactgtacaagactagagaatgtaaataaacattcatgaagtcttgtcttgagttccttgagtctttgagtccacttcggatcacttttaaaaaaattggtaaaataacaattttgccattggagttaattttgccttagaaaaatttattttatctttaattgtgctataaaatcaacaaatcattagtaacaaataataattcaatattcattgatcgtcaaaacaaggagacttttgagtcaacaattcaaaattatattttcaggccattaagaaaattttgcgataaattcagttacaatatttatagataagaactataatagttctagttgaagctagcatatc

SEQ ID NO: 119249 - DNA, 2091 bp, Cannabis sativa
agagagagagagagagagagcaccttcaaagatatcctcgtaagagggatcacaaactacaacaatttcagtcacttcaatcattttagaaaaagtgtagaagctgcagggaaacaactcagaattatcctcaagaacacaataacaaatgaataaaataaaaggagaaagaatgcgcgaacaactcaacaattgtctaaatggtataaacactataaaggtctcaactaagccactaggtttggtcttctggtgaggggagttgggtattaagcacaattgagatgagaccaaggtttgaaccttggatctcgtagtgttgagagattcctagtattaattaagcaccatgtgtgccaatgatctaaacacgtctcatctaggaccatggaatctagataaataccacaaagaattaagaaagttacttttacttccaacaagtcataaaaactcattacgttcacaacattagtgtgctggaccaaactcaaagctcaaatgatacattttgattcattattttaatgataaatatcaatgtgaaatcattacacaacaaaattgttgcatgttttatggtttggctgattttttttctcttgactatttcaaatccgaagttttaacttttaaaagttaaactaaagccaggattaccatacgaacacgacttcatttcgaaattcgtaaaaagaaagctgaagtatcatctactagtgcaaattgaaagtaaaattgagtttcagtgaatttacctatacagtgcaattggttgccctaaaagtggaagatactgctttggcatgttggcctattgtacaacataacaaaaccatacgatggtaggtgagaaatcaacagcctgcatgcaatagggacttacgagacatatgggaaataaccagaaatatataacaactatattacaagacatccttgctcaaaggaaactgcttttctacaatagcagtggagagttaagacaaatgtatgacccttctaattttgtgataaaatgtttcttaatctctcctgatacaataacaattttcaggaaatggaatgtaatagtaaattgaattgaactgagttaatacaataacacaggtctcaagtgaaatgggtcatagaggaaaacgagcaggacttacccccatccgtttacccttcccacctgccagaagaaccaccgaaacgcttttcttttccacaacaccaggcttctacattgttatatgtatattataatataaataatagaacctattacgacaaagagaatacatttttatatctgatagaacccaaatcattgtttcgaaaagaataaattttgataagtcatagaattcgtatgtctgaatcttacttggccaacatttgcagagcagcgagcgaaccttatcttggaaattctgcatttccccctgaatcccacctcatggactaaacacccaagaagataaaaaggaaaaaagagaagaaaaagtgatcgtaaatacacttccagacaaaaatgagagtgcaaaataagcgaagtttggtggcataataaaaacaacccaattcccaattcgtgttatgatgaaaacagtgatcatgtgaactgattttgcggggttggagaagaagcttgaaatacttgcctgggaatcgaacaatggattgagaggatgggcgaaaagaaggaaatagtagaggagcagcattgtaggaagaagaagaaagagaagcagaagagaaagtaaggtccattgcaagtaacgccatgttgcgtttttctctactgacttttttcttttcggaaatggagaaaagtgttataataaattaaggtatagaagttgggcagccacacacaagcatttaagggcctattgtctaccctattattgctgctctaagttttgcccccgcaaaggtttggtttcgattaggcattccattcaatttaatttttgaataattagtaattttgccttttaaatttgggtcttttttatttttacacatcaaaacaattttttttttttgtatttttacgaaattttacatagaaacccaattgcaactaacactgcaacttaa

SEQ ID NO: 119250 - DNA, 1020 bp, Cannabis sativa
  modified_base (986)..(989): a, c, t, g, unknown or other
tttagatctgtgatttatatatttcttaagtgttttataaaccctaacagtatctctactggtgccaccatttcgtggttatgtttggcattgaaacaagtgcacggccaagagtttgtccctactattttcctgacacgaattgctgcgttacaccccactcttatgattggattttactatttttcagcggtgcattttcagcatggttctcacatctcaagccttccttggagcacacccattttcgtacatgtggtgtagcccctagtttccgcttcacgtccagacatcttacaccaaacccaatggattgtgagtaggtcttgtagaattcgtgccaatcattttgtggtggtaacgccttcccaacgatgtcctcgatagtgatttcagccaggggtttgctaatttaaagtagttcgtgtatcatttcccaatctgttttggagaaattctgtgtgttatccatagtgtcttgtattttaaggaataagtgaatctttttagtgaaggataggtaacgctcaattaataaatgaattaatttaattcttataattaattagcttcactttttattgaaacaaccttccaaattttctaattgatttgattatataagtttttggttgtttaccaagttacataatcttcttgtgagttaataatgggaccgatcttaattctattaactatttttggcctatattattttttctatataatggaaaaaaatctattattttatggaaagaaaatgaagaaacagaactgcaaataataatttagttggctaaggatgattttttttatgttttaaaaaaaaattagtttttttggaactcaatgaatttaaatattgtgttaaggtgaggggtttttacactaggtaccaaatttaattacttttttacatttttaatgtttatcaatttattaaatatttttacaaaattacttttacttttttaaatctcaaaaannnntataattacaaaaatactacattcaccattt

SEQ ID NO: 119251 - DNA, 2319 bp, Cannabis sativa
ttatctcgtctgctggtggagaaagaagggcgaggcttgctcaaaggtttcaaactaagaagaagaggaggttcggttactcatttaatgttcgcagacgatatcgttctgtttggagaagccagcattcgtgaggcgagatcttatttggattgtttaaacaactactgcaactactcgggacaggcaataaacttctcaaaatcttcagtgtatttctccaagggggtttcaggtagaaaggctcaagaaatagctcaaactctagggatgagaaagatgaataagaaagcaacttatcttggcctcccactcttcagatcgaccaagagaacggaggatactaaatttttgattgaacgggtcttaaagagaatccaaggatggaaagttagactcctctctactgcggggaaaacttgcttgataaaatctgtggggtcaagtttatcaaattacgttgcctcctctgatgtaatcccattaaggacggcaaacaaaatagataaactcctacgggacttctggtggggggatactgaggccaaacgcaaactccatctggtggcatgggatcgtctctgtaaacccaaaagtgtgggaggtctgggattccgcaccactgagattatgaacaaagcattcctaatgaagtgggcctggaagatcctatctggggaagaaagtttatggagtagtataataaacgacaaatatatcaagcaccagagtttccttgacatggaagccaagccatctgactcaattttatggaaggcgattctacgtatgagacccgatcttcaaagaggtatatgccgaaagattggcgatgggaactccacctcaatttggtttgacccttgggtgccgggagacaatcgacaacctatcccatgtgttgatgatgcagcagggattagtatggtcagtaatttcatctccaatcagcagtggaatgtaaatctcatcaggaggtgttttcgggaggaggatgccaagcgtattcttaacataaccctccctgaatcgtgtctgaaggactcctggatatggctgccgaatccaaatggtgagtactctataaaatcagcatacaggcttttaaagaatgtcaactcaagtatggaaggggatatgaaatggaaagctatttggggggccaagatacataatcggctcaaaatgctttggtggcggatcctagccaattgcctgcccactagagttcagcttagcgcctttatccccatccctgataccttatgctccttttgttctaatgctgaggagaatagcttccacttgttttgggaatgtcattacgctagagccttatggtttggatgctactggaatctaagaatcagcgctacgagaattacaaactgggaggactggctgaagtggttctcgaatgctcataacagacctcctaatctcgatttccaccaatttttgggaggggctgcaatagtctttgagagcatctggagggaaaggaatggtcgctggcatgagggcaaagcaacacctgttgcaattactatgaactgcatcaatagcagaatcagggagttcactgctcttgaaccctcctccaattctcttcaatcggcttggcagccgccccctccagggtgggttgcctgcaactcggatgcatccattggaaaggatcaatcgacgggggctgtagtttttcgcgatgataagggaaccatcctcaatattctctcctgcagaataaatcattgcgaccctctccctgctgaaatcttcgcagtttgtgctggtgtagcagcagccaaggaatttggattcaaaaatgttgtgtttcaatgtgattctctaaatgcagttgcagctctaaactgcgcatcccatgaagtttgtaacctgcattacaacatccaggagcttgttctaaggttctctgaattggctacctctctaaatctatgggaaattatttggactcctagaacctgcaatcgtgtggcccatcttgtggctcaatgggcaaatcgtaacaacaaacttggggttatcgatttggccagttttggtgactccctgcaacttgttattgcagatggtcaagtggtagattagtctgttctttagtttttttcttttcttttttcctgttgtttgtttcctttgctttcctggggctggccttgtttagcctggtttagcttctctggtttttctttgtgtttggttttctctgtgtgtttcgggttgtggttcccttcttaaccactaatcaaaaaaaaaaaaaaaaaacttcaaatttttgaaataataaataaa

SEQ ID NO: 119252 - DNA, 804 bp, Cannabis sativa
ttataggatagaattggaaaatattgtattattgaaagaaaaataagtggttgaattaaagttgcaaaattgtaactagaaagtggttcattaaatggtgggccactctagtgttttttggaccaatattttattcttttttaatccatataattcaaaccaatataccgagctcaatgaaactcaagaaaatatctaccaggcacatgtacaggaggccgtttttagcgagccaagacttatgaaacattcaaggcgtaagaaggatccaactaagcggtgtgaatatcatggggatatttgtcataccacgaaagagtgtcgtcagccgaaagatgatatagaacgcctcatatcgcaaggacactttcaacaatatataaaggggtaggacgatgtctaagatcagctcgatctgcccaataactcgagcgacctgagattatagccctcctctgtaagaggaagagacatctcggttatctcaagaaggagcaagtcaccagaatacaaggggcaattactacggtaaagcaattttttttttaaaaaaaaaaatttgcgacatgagtagatatcgacccgttgtggttgccatatgaagctgccacgagggaagttggtcgtcacccagtagcagccaaagacaaaaccagcattacttcacccggaaccccgggatatgtcagggattgaacttggatatcgaacaattgagggagtatgtgagggaatgaccctgaacatcaaaactcgttttatcaaaactagatgctcctagaagattgataaaataaatgattg

SEQ ID NO: 119253 - DNA, 1657 bp, Cannabis sativa
gccctatctatacgaataattttgccccacgagctagaatcttatagtgggccttaaagctatgtattctatgtatttgctcataatagtggacttagtttgtaaaataatccaagtgggtcacgggtatgcccggatccagatcctagcctataaatacacttttataccttcatgaaagggggataagagaactctgagtatattttctttaaactttcttcttcacaaagtaagggaaaaatcaagagggaaatcaatatagccataaactagggttctttattttagatgaacccattgtaatacattcaaagcttttaggctaatagattggtttgtggactggggtttattaacacccgaaccacgtaagagtctccatctctattacttaaatacttatttagtttcttaaaactcttctttaatttagttttagaaaatctcgataaatatttggtactttcattgagagctgaagaaagatttaaagttgccttacatctgtaaaaaatggtggatacctcaaacactattgtcgagaaaccccctcctcaaggccaggatgtcatcatggacgacactaatctgctccatccaaggtacgcccatctgagcaatgtgacagagggagaagcgttcgaagctagcgactgaacatctgaaacatcgcaacatagggaacaaattgttgagaaaaacccataagacatggaagaggaggatgaagacaatagtgaaatcagagagggatattacaaagacaaatattattatgagcaagaccccgaggtggtttgagtatctggtgagttagttgaaactagacggaagctagcagaacaagaagctttctctcgacaaatggagaaaatgatggcacggtcgtaagacaaattcggcgatatagatgaaggctccaaggaagatgctctagagcagcctaataacagggaaaataaagcaaaccctgctgatgttggaacctcagcccctgcgaaggacaaggggatggcaaaggtaggcgaacctccatctaaaattgtctcatcacctcccaaaaataacatgaacacagccaaccggcccttgtggacaaagaaggccatcaatgcctctgggcttggatgcccttctgctctgcgaggccaagtttttggtaacgataggcttggtactcaggtgcaaaggcctaccgttaagggaaggaaaaactaccctagtgattttgttaaccaagatgatgggatagaagaaaaaattttcttgaagatagttggtctatagttcacctccatagatgccttgatgcgaagcatgaaaaaaccaaaggagaaaaagtgagacctcatgagaatgatctccataaccacatcaaagatagaatttgtgggtgtgagctttcagttagtgatgccatgagattggaagaataaattgtctctttgaaaaaaacatgtttgaaagtagagtggagccatttctgactcagatgaagaagatccagaactacgtgttaagcacatcattgacgctccactactaaaaaatttcaagatgccatagatggacttatactatggaaggacggaccctagagcccatatttctaaatacaatcatttgatgcaagtggcaagagttagtgatgatg

SEQ ID NO: 119254 - DNA, 676 bp, Cannabis sativa
  modified_base (625)..(636): a, c, t, g, unknown or other
aacaatctcaatagttcatggggtatttttcacgaccttaaaagtttagggacatcattttgtacatgtcaaaattcaagggacaaaaatattaattagccaatatatttatttatatatatatattttactttaagaaaataaaataaaaaaaaacagttgaactaacttgttcagctttgttcttacgtactagattctggtcttctagtcttattccgcaataacagccggcaaattgacagtggataaataaatatgctcaccgcttattattacataataataataattcaaatttatattcagcaaaataataattcaaatttatattcaaataaaataatagtagtaaccggatttaaagcatgaaattgcacagtcataactgtagagaaatgtattagtgaagatattccaaaatggatgattggtacatttctatcctaatttttcttttctcaactttgacatgtattaaatgatgtctcttaattttttaaattgttgtgcaattttctttaattttattaagactaattagcaattttcccctgccgaactttgacatatgccaaattatatcccttgaactttttatgccgttaaaaattctccctgaacnnnnnnnnnnnntaaatttaaggacttttatctaatttctttcaattttact

SEQ ID NO: 119255 - DNA, 2156 bp, Cannabis sativa
  modified_base (2107)..(2118): a, c, t, g, unknown or other
ggtcaaaattatcgttttacccttctaattatctcttgattctttatgtactattaatttaatgtgaacagttaatctataatctaattatagttttaaatccaacatgttagcactcccacaattaatactataagcaactaatattagatcctctcagaaagcttgtattcctttatatattcccaaccactcatgttattaagctcaaaaaatagaagttgtcagaaatattttctatgagaatctttaatgagtgaatcaaagaactctatgaacataaacaggagtttatgtataatcaggattaagactaatctactagtaatcatcgttatgataggaataactctttcatgacaaacatcatgtttatggaagatgttatttcatattagtccagtcatgtataatcaaattatacacagtacctttcccacatgtctatccatatattaatctgaatcaaaattacacacacaagattatagtgcatagtaaatcatacttagtaactctatattgaagatttcatacattaatacactaccaacttcttttcttcaagttatatgatcttaattctcttgtactaccttacaagatcatacctactctatatcaatatagatttttcatatatttattaattatacttctatagttaatgtattcatttatcttaaaattgtatacgcacctgctgacacctttcgaagcactttctagtgtgcgctttagtttttgaatgtgtggttcagcgttacgagtctactttctcatttcagtgctcgccttttgaatcttcaataggggcctttagtcttttttcatatattctattatatattatccattaaatacttaattttaggacataaaaccaaacaataagacctcatacaggataggcaattcaatcttctactccttgcagaagatgtaccatcccgctagaagcttatggctctatgggataaattgaaactgtataatacccacttcagctaagaaccaagcaaagtaatctcttaatggcgggtgagctcccactttgatatgtcccccaactgtaagctctaaagtcatctttgcaagagttgggcttcttgtgaagcaaacacagtctgtgccagactaagcagggagtgctcaggatcccgcatttgactccaagtcttccaacatgcaaaagttacgaaatttgttggtgagataatccatctcccaactcaaattattgacaactttagcgacaggattagtatcaccttattaatattattctgccatatcaacatatagaaggtgctttaggtcttagatttcctccgacatgacgagaacttgaaagggagaaaccaagtcgttagtacacaaacaaattgaaaagtataggcacatgagaattatccccaataactgctcagagaggttcccgctaaccccaagtctcagagttagttatgcgggaacacaaatcccagacaacaaataaagatcccaggaaaaataacaacagacataaaaacatattattatccaaaaccgtaaaggtccggaactgagtaagcatgaagcaaaaaagtccttagggacacactttttacatctatgagattgaccgtaaaagaaaaatagtaatagggatagctttttcgtaaagcatggcaatgtcttgatgttaaaaaatttcgtaccatttacatgtcagaactaccaaaaaaattctagaaaaataacccacgaaaaaccccaaaaatcatggcactaccttatacaacacactacccagagcaaagtcataccagaaaatcattacagaggttgagaagaaaagcacttatgtgttgtattcggaggtggtgcttacggattatgagcaaacatgagatgccttgactaaaaatcatgcagcttcctttcaagttcactgaaagtcttttggaggtcggacggagccgatattgacacggggatgagtgggggtgcatctggtaaaagcattaataagagaagaaggagtttatggtggagttcgcagtagatatcaaactgttagaaatattttaccaggatataattttactaacaagtatgtttcatnnnnnnnnnnnnatgaattctaaaacaatgtaataaacacataagagttt

SEQ ID NO: 119256 - DNA, 729 bp, Cannabis sativa
  modified_base (385)..(386): a, c, t, g, unknown or other
  modified_base (661)..(670): a, c, t, g, unknown or other
tattacatatatataactcccaattatattatattatatattatattcataataatatatataatatatcacaattttaatcttaaatattatattatttaataaataatataacattttttatacactttttgcaaaaatatgcttcttttttctcttttttaaaaataatattttatgagaaaagttaaaaaatataagaaaaataatataaggtaacgggctaccctgaggatgtaattgcttacgatggttatccaaaacttctcataaaatatttttttttcgaaaaaatcacatttttgtaaaatttgctaaaaacccataaaaataaaaactccatatacatttttagggacacgattttgtcccgtgatgtactttnncggaatgtattccgtgatgtacggtagtcgttagatggagagagttattgatctgagggctggagttgatttagggtaattagggttaaaaaatggtaacgtatcctgagacccatctaatgtaccctgagacccatctaatgtactacggaatacatattccgtaaaagtacatcatgcgacaaaatcatttccctacatttatatatgtatagctaattcataggggtgttcgcggtgcgggttgtgcggtttttaaccattttttcaaaccnnnnnnnnnntgcggtttttctaattttccaaaccgcacccgcaccgcgatattaaaaaaccgcaaaaa

SEQ ID NO: 119257 - DNA, 1608 bp, Cannabis sativa
attatttatatatgataatgtaattaataaaattagttaaaattgtgacactatgataatgtgagaagtcgatttcttctgacttttagaaacacctataggatcgttgtctttactttatccaagaataaaaataaataaaaaaaacagtaaaaattaagagcaaaaggcaaatgatgatgaaaaagaaaatcaaaatatgtaataattaattaacaaaaaagaagaaaatattggtggaaatagctaatcgcaattggtttagtacgtattatacttcaaattgtctagtgcttccaccttaataaattaatgtcaaaaagagaaaaaaataaaaacgttgatataatattaacattagaatatataaaaagtagctaaattaaggcttttatttaattaattattagttttgataaaaaaaaaaaatataagataagagcgacaatctcaactacaaaagaatgatacgtagtaatgacatgtatatggtgtaaatatatttatattatttatatttatgttattatattaaagtgtggttatataagtgttttttttaaaaaaaaatattacaatttaaatttaaatttattatacatattttttgtcttttattttattttatattaaatgtggttatatttaatattacaattaaatttaaacttattacactaatttaaaaatttttctattattatttaccaaaaaaaaaaatagaaaaattgtataatattaaaattattatagttaaatctaaattataattaacaataaattttaaaaaatatgttatcatgatgttttttttttataaatagtactagaattacatattctttattaaaaataatataatttatagaataacatccaaaataaaataaattatataattaaaataaaaataataaaaatgtaagttaatataatattaacttataaattacgtacgtcataatttttttttctaaattaattagataataattataaattaagaaaaagaaagtagggcatgcaattaaggataaagttagtcagtgtttggtacgtaagtggataagaaaattggaaccaatacgtgggaatgataagacttgctatgaaaaaggtctaattctctatataaagatattcaatattttcatccctttttcttttctttctttttaattttttttttatattttaataataagggtcacacacacacactcgaaaaacacaaatatatatagccaccaatttttacataaatatatatgtagagaaattaagaacattcatgtttatttccatggggacccacaaattcatttttatgtgtattgttttgttacagtcaaataaagtttctagctaattatattttacatcacatgcataataataataatataatatatatatttgtaattgtaatgaataatgtttggccacatggtaagaaaataagagctagggctgcagttataattcatctcttattcatgaccatcttaaaccatatgaatatatatatatactaggtgaatgtacgtgccgagccacgtattgctagttttatttaagattttggtatttttaagattttgaatgtat

SEQ ID NO: 119258 - DNA, 867 bp, Cannabis sativa
attcattgattttgatatgggaaagctcctcttttttttcgtgctttcttgtatctgtagaagatagttaaatcataaaacattaatgaaccattttataaccaatctatcacatatgattaccaaaattaaaatacaccatttttatatctctaaaaccaatcgaaaattattttacagtatatgaatagttaaccttgccgttaaaaaccagatgaatacaaataaaacacactcaatgaaacacattactgccccttggagactcaatgccttgaagcttcaaatatgttctccgacaccgaaatcgaacttggcaaacgtgttcaggcctcatcagagtgagggacgccatttcggtgagagttgaggagcagagcgattcaatagttgtggataatctcgacatggagtgtatcgaccatggtaactccttctcctcaagcgacgacaagcctttggtttacatttacaagatgcccaaatttagctcaagaaccctaataattcctctgtgtgtttctatatttaccccaaaaacccaaaccgttacctaacaaaattgaaattaagggtttcaggaaaaataaccttggagggggaaaatggcgagcgaagatcagcgtgcaggagtgaagatcgtcagcgacccgaaggagttctattgtagatcgattgagcctcttaaataattaaggtttccgaagggggtttcaccgttgtaggatctagaagagtatggaagagtgaaaaagactaatttagtgtgcccagacaatacaaagaagatgaagagaataacatggttcttgcaaaaaaacaaagaaaaaaaaaagaaaaagatgaagaagaagaagacaaagaaga

SEQ ID NO: 119259 - DNA, 1425 bp, Cannabis sativa
tgggcaacttttttttttttttttaatttaagcgtttatatattacatcaacataacctgggattcgaacccaggacctccaatacacacgcaccacctatggccacttgagctagcctcaagtggtttaatgggcaactttagttattagggacttttacattttggaagtgttaattataatctcttaaatattttttttttgtttttctataaaacatagcatattataacctattcattatagttaaaatattatttttgtaaatttttaaattttcacaatattaaaaataaaatttttggtattctagtttattccgtgtgtttaaaatttttttaatttatttttgatattgtaaattatttaaaattattcaaaaatttatagaataatattgtaaatataacaaatattttttctaacttttatttttgcaaatgcaatgaatgatcccatggacgattgagggtctagtgaccagtgaccactcaccttttcttcccaccaaaatttctgtctcactcactcaaagttcaaagctttctttaatcaaatatattttctcaagtccaatctagctattccatttccattccacacttctcaaagataaatttacagactactcaagtcatatatccttattcagttttcatactcaaattccaaaacatatattataggaatcaaaatgataaaaatagagatatgaatggaacctaataaaatattccatctaaatggcaaggagtagaaaagtcactaataaagtagaactaaaatgaaaaaccgattttctttccttttccttttgccataattaaattataagatacattatgatgaggtttaattagaaaaaacaatatagaagaatttaattagtttatagaaattggacaaataaagaatataataaggaaattaataagttgttggattattatggttggaggtgaaattggtgcataaagatgaagcatgcacattcaagcttgcagaagtagaaattggtaagataaaatgttgaattgagacaattgaaagagcaccccaaaacagattggtttggtgtgattaggcatatcatcacaaagcaactcatcaaaagatgatgatgatgatgatgatgatgttggctcaatcacactgctactatcccaaacaccaaacacaccatcaagtaccaccattcttctcctcatcacacctcttttcttcttcttcttcttctttacaagttctaataacttctgtatatatagggagagggaattaattaactaattatgagcatggtttgatgggacaagttgcttctatattatagggaaacttacaaaaatactggaatttgagttaacttttacaaaaatactgtcacacgaaaatctttataaaaatactgtatttttataaaa

SEQ ID NO: 119260 - DNA, 773 bp, Cannabis sativa
cctattttatatatactaattggttttgattaaatttcatttccacataagcccattcatttgaattgtttattagggtgacattggtggggagggatcataggtttatgggcaatgaaaagggaaggctgtctctctctcattggtgcataaatcatgtatgtatatatttatattattctccactaatattataaataaagatcaaaagtagctttcaagctttaaattttggttcccaatacataacaaattgacatgaaatgatatataggattagatatatgttaccctactacttctactattagatcttctttattaatttacactcaacatgtttaagatttgtaaaactagttcacactcactcacacacaaaatctagctgtgaaagacaaatcttgatttgattaataacaagaaaaaaaaatgtgtgtaaaaagtgatttgtgtttttgttttaatccaaaaatgattgtgttcatcttgtaagaaacaaactgttggaagtataaaattagtaatagtgactataattaatttatcttaggacccgcttaagggtaggacagcagaggtccacgcctatagctcccactcaagtacaaaaaatcctttaacgaaaaaatctcaaatttaatatttaaaaatattttttattattatcttaaaaaatataattatttttttataatctatttatttttataatttttaaatatttataataatttttttaaaatttttattttattttttaattttttaaa

SEQ ID NO: 119261 - DNA, 2087 bp, Cannabis sativa
ctagtaaaataattccaacagttacatcttgggtatgcatttgtatattgtggtatagtaggcaatatgcctatagtcgttagcactttggggattctcattgttgggaatgaaggatttgggagactcccattttaaaaaaaccctaggaccgctctagatatatcatctcttatttcatcccacatagctttggaaaagccaacaccaaacccatctgagattaggctcttcgaagaatgcataccgaataatgctttcttcgcatacatcttgttaaaaggctgagatatttgtacttgctgtatcaggttcagtttgttcccattattaaggcaatcaacctccattctccttgtagttgagctatgcttccccataaagctacgaaaatgattgaggaaatgctctacaactttagtataatcatcctccacaattccacctacactataggaacaaatcttattctcaagtcttcttttgttcatgaagcgtggaagtagctagtgttttcatccccaaatctcagccaataaatctttgagttatggtgaaggtagctggcataatgttttttggcatctaagaactttaaatgtagagttttttcttccttcgctgcagcatcacataacggatttttggccaggttctcttgaggattactgtacttttctcttgttgttctataattgctggtaatattttaatgcttagaaacataacagctctttaaaacatgtttaattctaaacaactactcatttagactctttagatcaattactttcattcccttacatgccttgaggagaacatctttatacccccatctttgagcatccagtagttataaaatctaaaaggtttagtaccacaataactcaccttaatgtgtttaataagacagtagtgattagagagaacccccatctaaaacttgcttctgtattcgaaaagttgtctagctaactctcattagtaaataccttgtcaaacttcaagtgaattgtgcttccctcctcatgtttattagaccaagtaaagaacaaacccaaagttttgagcttttcaacatgaccctgggccaacaaatcttagctatcttggatctcagtgtccttaatcttcctaccacagcacctatccttataagcgaacatggcattgaagtcacctagaattatccaaggttccttcaactgaccaatacctgctaatttacactagagctcttttcgttcatttaacgagttactaccatacacaaccgtgaggtagaacttttctttgaacccaaccattttaagcttgcaatggacatattgcttatcctccaagagtacttccaccttaactagattttcgatccaaatcaacaagattctatacgatatcaccagattgaatagattttctagttcggattattcaaaaccaaactagaagccttatcatggttaattttagtctcaaaacgaatccccaaaccaactttattgatcttacagctttcaaaaaactcaagctgcttctcttttttattcagtcctctaacattcgatgccatataattaatgttatccattaatttgagttttcaaacttgtaaccaacaccccctcagtcttattcaaagcatcataaccattactaattttcactttctattgagttctaataatattctcgaagcctttcctccttggagtaatctaactcctagcctcattatcattgtttgggggaaaaatatgaacaaaaaataaaagcccaataaaataaaataaaagcgttaaaaagcccaactagagtgaatacccaaaaacccgagatccaaatacattaaaaagaaaggcccaacactgtgcggcccaacaaaaaacctagagcgtagctataaacaaaagcactaatgacaaggaagaaaaataaacgccgacggaaactaggaaaaagagagatggaaggtcggaaccaaagcttacagacagaggaagggctagggtgtaacaccctaatctataggtacaccacgtgtgtgattttataaactagtttaatactagtagaataattaatta

SEQ ID NO: 119262 - DNA, 2082 bp, Cannabis sativa
ctaattaaatactatattaattttcggaatattacacttgttgtatgtgtgacattttcatggtattcacacattttatttggatctattttgtttttacctcccttatacactagaggtggcttcttgtaatgagatgtgttgctcctagctcggcagacattctcgaatgtgtctactagattagtatatttagaatacagggatttatatccttaccttactttctttaaagttccactccagctttgactctttttacttctcttactttgggactgggtaacgcctcactctagaactcttgtttgttggtttgtctgtatctgcctgggagtgacactgcatccagtctgtgccactccaaaattggagaatttttttgtgaaggcacataccttgaggtagtgggtctataacagttagggttttgtactgggttttaagaggtataatatacgaaatcatgagcactgcagaattactgacattgattgaaggtgccagagctaccccaaaggcttgagtgtaagcatcctccatattgataaaaccttgggacctttttaagaagtttgacaaagtttaagaccattgcctttgcaattcattccaatataaggatcctactgaaatccctaactgcaaggccactagcttcatgtcattattgacttttgtcttggcgactgcctttctcacccgttgggtataggccttgagcctctccccagattgttgcttgatgttggtaagtgagttgacctctatatcgaagtccttagcaactataaattgcttctagaacatggattgtaaatccttccaatttcggatagagtcagatgataaccttttccactagtcttctacaaatttggaaaatatcgaagagaagcacaaacaattcttgttatcacttacttgtgccacttgcattaaccttattttacttggacagataggccctggggtccgtcttgccttcatatgactccatttgtggtagccaattttttttggcaactgtgcctcaatgattctttttccacatggctctgattctcatctttcgagtcaaatacaactccactttattttagggccaactggtccgtgagttttgttaaagcgactatttggtcctctagctgcctggtgtgatcatttgggaggtcatgtccctagatcctatcattgatgtaatttcttaaattgcctccactaggccttgctttctcacccttcactttttctcatttcgcatccacacgatccctgaggtctgttgttgacatgctatcttctaggtctagatgtggcccatcatttcacatgactctgccttgtggattgatctgttgggctagccctgggccttgattgtccctttctttctacttggtttggtcaacttctcttctgttattctgtggaacattgtgtgtgggttttctcggagggtcgcccattacaccttttactttgtcatttaatggagcaaacgacctagctccaagatagttaaaatttttagcatgagggttttcttcagggagattatcctgtggttatagctgtgcaagggcttcttggatttgtctccaaaccacttcttgatcttctaacctctttttgagatgctaacatcttttgggtatcttcaagctcttattgtagtcatagtacttcaaggtcttgcttgtagtactcttcttcataatcctcgttgtgatttttattgtggccatcctcagggtcatccttatgaccttgctacatcatcatccatgagttccctgcagtgttggtcttctcagcttgggcggctacccacttcaaacgcttccctgtcccccgtgacacctgcctaagcgtttttttgggggatctggttctcatcgacattggctggattatccctacaatctcgagcaaggtggtttgaccactacttttcgagttgcaaccattgttgtagatgaaaactatggcaaaactttctccaagctctcaatgaaagcactaaaatatttaccaagatttttggaaactgattataaaataaataagcttaagaaa

SEQ ID NO: 119263 - DNA, 898 bp, Cannabis sativa
gaactaaagttctattttttatttccatatccaacaatagctacacaattacatatttataggctttcacactctttacaaattactaataagcctctatagcattttcatagtctaacatccctccaataaataaatgacatatgtttttatttttcctatcaattaagagcatttttaatggtagcatcctttaaggatgctaaaaatatttacattatccaaaaatataagggttgagatgtaaaatgaccgtaaatttagaaactaaattaataaatgtctattttttaaaaaaaattaagaaaatggccaaatgtaataaattagctaataaaaattttaaaaatatatttactactgttatctgcattttcgtaaacatgacacgtggacttcaatcaaaaaaggctacggagtcattagccggatcaactttctcaattgatgctctgggaaggtaaaggcaccaatttcgcgggaaggggttccatgaagaggagttccctaactagctacatgataggtacccgtgaaacaaagtctccctcacttccaggaacgaacaccatgcactatcgcgaaaaagtagggattttcctagaaaggccaagacattttgagactgccttagtcccagatacgccttcggcttgcgcgggctttatccacgcatgttaggctacgaacctagtgaccagactttttcatgtacgatgtcagagattgtcatgacacaccatcgtgcaaagcatgcatgtcctcgtgtacctgcccaaacaatccaatggctaaggataaggaaaattcaaataagaaaagccctgaagtgacacgcatccaaggcccagcctgtttaatcagtacgatctgacacctttaaatgccatatgggaaa

SEQ ID NO: 119264 - DNA, 1064 bp, Cannabis sativa
attgatgttgaataaaatagattacattgagatggagttttatttagagcataaaacccaacacatatatcatatatgtagtaatttgaatctatgtcagaattttgtaatggttctcctataatgtgctaattatgaggataaaagtgaatgttgaacctttgcttgattataataagtcaatactagacttttgttttttttcaatattaaactatgtattgttttgaagtgttgaaatagtttgtaattgtattgctatccaaattacttaaggctttatgtacacataaaatttcaccaaaaatgttcaaactgatgcataactaatcaagtgtagatgatcatgacatgttttaattaatttacctgcattttctttagacatgaaataacttctacataatgttacaaagtctggctggcatgcagatttggcctatgaatttctttacaaagagaaattaaggaagcttatctctttaaccaattaagtgtgaatgtctaccacatgctccaaacaaataataaaaagaaaaaaaaatagcaaagcaaacaacactgactagctttctcttttggtttgttacacattaatatgttgtggtaattggttacaagtaactagtgtcttgttcaaggcttggtaatgcagaatgtcaagacagttaatgtcgttattggctggtttactatatatggttcaattttataaacttgagagaagctttgttcctaaagtcttgcaactcgattgtgttccagggacaattttctctataatttctttgtaatccagttattactagttattactagaatgcagatttggcctatgaatttctctgcaaagagaaattaaagagaacttattgaagtatgttaccattaatagtcattttcaaaaaaaaaaaaaaattaagtattaaaaaaattctctctgcatgctctctcctctctcttcttcttgaaaattgtgcccatgctaacgaggggttccatggcccttctggccatggaaggcaccagaaccccactggttttgggaagaaacaaggccatta

SEQ ID NO: 119265 - DNA, 865 bp, Cannabis sativa
  modified_base (61)..(71): a, c, t, g, unknown or other
  modified_base (823)..(838): a, c, t, g, unknown or other
catgcaacataaaaatgttatttttgatatttattgttaagtaaatctgattatattgaannnnnnnnnnnttagggcacaaaacccaacatcacatcggttcatcaatcgacacctaggacacgtgtcacccatctggacaagactgttgatcgagtgaagtccacgtgcgaccacaaaggtcttgcccagacttaggggccaaatgttatcaagtttttttcacattgatgtgggaagaggaccaagcgacacgtgtctcacatatctggcacttgggctgaggtaaatgtcctgaatagcctctacataatacatcaacatttataattgtcgattactcgaccagagtagaagacaaagaatccaaccaggtagaagtctggcttgccgagctacttacaagaagttaattacttcaaactggtcttgtaatgcatagacacgaagacaatccctacaatcgtgggattaaatcagagaaatatggcaacatgttctagtttcccattttatgtattataattgtgtaatcaatgtaatttcctattttacgcattgtacgcaaaagggaaaccatccctcatacattaagtccctataaatagtggcttagcctcactaggaaggggatcgaaagaattgctttagagagagattctagagaaaaaatagtgatctcagagaattacttagagatcaattgtaacagctttcagagaggaaaacattttgttctttctctcaagttaatacaatataagtggagtaggctattgttggaaattattttaccacgatctcagatctactcacaagtatnnnnnnnnnnnnnnnnaatatgaacttctaaaacgataatgaa

SEQ ID NO: 119266 - DNA, 903 bp, Cannabis sativa
taatgggcgcgacccttttggtgcccactgctatggctgataactttcaacaattcatgtgggcactacacctatcgtgccatttgttttggctgttagcacgatatcatttgtggtgccagttgtcacatattggcacgaacctattgtgtcccgaccaaaaaggcacgacacgtcgtgcctatcaacaaatgggcactaaaaaatgagtttattggcacaaatttaatcgtgtcaatactcatttttttcttgtagttataagccaaagttgttcttgcctatgaatctttccaaatcaaactacacatttcctatcttccattggatcaattcttcgagcaggtagagatcttcgatcttcctttatccttcaatcgatcttctctaatccttcaagatcttcgatcttcctttatccttcaatcgatcttctctaatccttcaatctaatccaagctctgataccaactatataatgttcactaactagtaagaataatatgtaaattttttttaaaaaaattaaataatttattgtgtcaaaaatataataaaaacaaattgtttcacatatgtagcaaattatttgaaattattaaaaccaaaagaaaaagtttattctaattatttacaatgtagaagaaaaaacaaattaggtacacatcgaatttctcaatatttaattgtttaattagtaaaagttccatgaagactttctttgatcacaataattaggttatttttaaggagttttaatcaaacaataatatttctatgtgggcgacacaaaatgtgacacatacaatatcattttattttatacattttatttgggaaatttgagtttctatgcattttttatacctaaattaattatttaaactaatacttataactctt

SEQ ID NO: 119267 - DNA, 2927 bp, Cannabis sativa
caaaatgaaaatttttggagttttaccgccatttactcttaaatttgctaataatttagtagtttagaggattttattttcaaaatttaaatttaaaaaattaagtgcaaataaaataataattgagaatgtttaaccgtcataaccataccaaataataaaaagaacgaggaaaagatgattgaagaatgttgaaaactcttaaaattagctctctaaatatatttacttattttataggtgttttggttgttccttagcccttaaatgcattctaagtcaaagtattactttcaatttgggagaagaatatgtgaaaagaggatttttcttatgtaagtgacacaagaggactgcattgccaacaaagtaaagaataggtgtatcaccatagacaggcttaatatgtttttctttttgttttgatcatcttcaataaatgagacaatttaaaatgttaacaaaataaagagatttacaactttgtacttcacaaattctttgaaaaaagtataagaacgtagtcaaacattgacttaataatctcactaaataacaaaattttcattttaagtatcttgcacatttaaccagttccaaaaaaaaaaaaataataacattgaatccttttaagatagcacatttaacaaaattttcattttattattggtgtagtgaagaattgttaaagtattatagagtactaagaacatctttaatataaatgtaaattggtgatctattactaaaatatagtttattttataaaaaatttgctcaaatagtgagttaaaagtcgatctaaatttattacataataaaaattgatctaaatttagatcataatatgatattatgtaaaatttacatcacaataaatgcactatttacttttattttatttttatatttcattattaaattcaattattggattaaattataatttttttacattttttattgtttatacgataaaataataataaaattaatgatagattttttttttatgctcttaagaaaattattaaatttttcatcaagtttgtatttgtgcattggagcacaatgctataaattaatataaatatatcataaaattattttttaagtcaaatataatacaatgtttacacctctattaaacataatcttaactagtaagcaacctaatgagaattagctaatacttacaaaaaggctgttaagagaacaactaaacaataaaatacaacagaaacaacaacgattaactcactaaaccagtattaacaaacatttttaactaactctaacaaatccaaactaaaacttgttatatcaaacctaaataaaccaaacaattaacgactttgatgacatggcatgtttcaagacaattcgggttagatattttagagttagttaattcggttagcaataagttgttaattttattagaaacggaagcctttattcattaattgtaaaataatagaaaataattagagagagaactgagagaactattaatgtatggcgagatttaattgtaacttgtagcaagaatgttaaagatgaagatagatgaacaaaattgagaaatcaaagggaagaagagatcttcaaggaagttttctaagtgttcaagctttaattggatgttgctcaaaggagaagatgatcattgtaacaatttaagttatctgaaaccaaaatttgtaatttgacattatcatagtaaaaggaggattttttggaaggaattcaaagggaataggctttctacaaattgtagaggaacgttcgaacccctttaaatttgcttgtcgcttacttttctattcttaatttcctttcattgcattatcttattttaatttttggttttgtaatattaaagcttgattgattcaaactgaggttgttatgtttataacacaactcaaagaaaacgagagtaaaaaatgataaatgagttcataaaatacctaaataaactcaatgtgatgttatttaatgtttttgaatttagaaagtgagcgatgatctgtgagaagagtgaatgaaaggattttggtgattttgaatgtaataggtatttttattatgttttagttagggatgtcaaaaagatccatttagttggaataggtcagagttccgatctgacagatcacttatgactcaaaacattcggatacttattggatctcggatcagattcgctccgtctcgcttaatttttttccgaatcggatctaattcgattcgattttaatatattaaaaaaactttattcaagactcagacctcgaacctgtccaagatccaaacttggacacgagaccaaactcaaacccggacccgaacttaggacccagacccgggatccggacccgatccgaacgtagacccagactagacccgaactcggacctagactggagacctaacccgagacttggactcggaccgaaacccaagacccaaaccgagactcgggatccaagacccgaacccggacctgaacttggactcgaacccagactcagacacgggacccagactctgacccagatccaaacccagacctaggacccgagttccggacccaagacttgggacctagatcgagacccggacccggacatggacacgagacccggatctggacttagacccggacccggacccagacccagacccagtcccagacccaaacccagacccaaactcaaaataattaataaaatatatttaaagcaattaataatattctataaatgtaaagcatgaatagtaaactttaaaaaaaatgtacattttacataaaataaaacttattaaagtaaggtatccatataaatttttggaatgaaaataaaataaagtaagatgtgtgtttagtctagaagaaagaaagattttattattattattat

SEQ ID NO: 119268 - DNA, 888 bp, Cannabis sativa
  modified_base (314)..(316): a, c, t, g, unknown or other
tatgctagttagggtgttacaatcgccacccctgaaggagctctggtgagcatttcagcccgtcgttgttcttagtgttctgggcttctctttagtgtaattgtttgagtttgataatcgtgtgtaattgtttgaaaaatattgtaaacatatataataatttaaatttacgttatatgattgtaattttttttatttttgtttatatttttaaaaaatttatttacattattattgtaactatataataaattagcttaaatgtattttattgaatctacataatacttttcccaacagttataaacagtcannnaaaaagatttttcccaacagttgtaaactgtcatttaaagtaactttcccaatagttataaaccgtcatttaaagttccgcatttttatgacacccttatagccaacggttttaggaaccgttgggaaatagtatgaaagacagttataaaccattagaaaaagttaattttatagtagtgttgggataatcgatactcgtgtctgataaataattagcataccttggcatggaaattatttaagtgcataaactaagaatcaatcattgattttctttttattcttattaaggtaataataaaataaagaaatagttactgattaaaataaaatagataaaatttgatacttaattatactaatggcaacatactacctcattttaattagagaaagttatctcaccatacatactttttaaatatttaagaaaatatgctttaatattttaaagaaaatttgaatttttatgcatatttaaaagttaaattggttagaaaaattaaaggtataagtaattgttagaataggcacacttttcctaaaacccaaaattacccctctcaaata

SEQ ID NO: 119269 - DNA, 1407 bp, Cannabis sativa
atggttattgagtctgatatttatatggagagtaaaaaaaatctttgtactctttctttctttagtgcatacattttactttattttatttcactcaacattttattttattttgaaatcgcaatacattttatttgagtgtattgtttttttttaaaaaaaaaaaaattcaatattattattaattaacagtcaattacaataatagagaaaataggataagaaatttctgctatccaagaaacatcttcatccaactctagagcgtactttgctaagccatggacagcttagttagaggataaaagacaacgtacataatcaattagatcattaaaacaagataagtctctttgaaagagttcaaagcagaggatactcttaaggcttgtgtttccacattagcaattgataattggtgttgtgcagcccagtttaaactgtgaaaaagcgcatttgcttccatttcatcacttttgaaacatccttggactagcctttaaaacgcagcaattacttctcctttaaaattgtgaacgaatgcgccaattcctaaaatcttatccttgaaattggcagtagcatcaacattcatttttagcatatttacatcaagaggtttccatgctatttcatcaacaagaattcagatgttgacagtggtagctgatgttgaatggattttttggtgcatcaaagtaatgatgggcagctgttgttaattggtttgattcctgtcgagtatgacattgatgtgatgagacaatttgctgaaagttgccttgacaacctgctattggtattgatgctcgttcgtgcatcaaattctggggttgactaatttgattatggccattaacaacctgctgcaactgtaactggtgttgacttatcacattattacatcccattgaacctgttggctgtggaggaggctgctacaattttttgcaacaaaatcctttggcacttcggtagttctcaatatagttcaaagcataagctggaagagaggagggatctctgtttgaaccaccatgtaggaccttatttctatcattctagatactctacataacacatattaatgcttcaacatcaactttatccattgtagtggccaagtgaattagataatcgccatttagcataccatgagcttggtggaaatcaattgtgaattttgtgtttttccaaaccaccttggcatgcttgcatgtgaacagggcatgtccaattgactcccaagcatttttacaccttgaacataaggccgaatctatgactttccttttatgtaatgcagaggcaaccagtagggcatgctgaatgactttccaagaaaatattttaactttgggaggtaattgtaaggcccaaaaggacttccaccaacatttgtaattg

SEQ ID NO: 119270 - DNA, 1096 bp, Cannabis sativa
tcttatagactcaactaattaattaataggtcaattagaatttgaaaatagactatgtcttatttgagaatttttaccaattttgggcaattttgagaagaaaagataaatatgggtttgtttgttaattagaatactttgtgggtctaattaataaatatatttaaaatgtattatatttgataattatttataattattaaataaaattagtatttatacaattagatgagataaatggtcaaattagaaacgacatttaaaatctaactctaaagctaagtggaatttggccctagagtttaatttcagtccaattgtgtttattttagtccatctcatttaaacctaaccaagtgaatgcttatataaagaaatggatgagaagagagaactaacctaattcaatgtctcatctttctcttctctttatattttcgaaaattacatagtaaaggtgtttgagtatcaactcacactattcaaggtgatactcaggcttttgtagaagatgtgatgaacacaatcgaaggaggagaagatccaagtttagatcttgattaaactctaccacagacaggaatcaagggttagaaatctgaacagaatgagacaatttattccgctgcacccaatataagattttcttaatcacttgtgtgtttaattcattgttttaggaaatttaatatttaggatgtttaattagtcataatctaatatacatgagtggcaaattaagatcttggtaaaagatttttcaacatttatgtgttatgctttcaagctaatttatctgtgcttacgtgtcgtgcttttgagtttgtcgtgtcgtgtctaagctcatatttttttcgtgtaatgtcgtgtcgcgcctaaacacatatttttttgtatcgggtcgtactcgtatctcttggactcgtgtgttgtgtcaaaagcccgggccatatttatttgacatgataataataaataaatcactcttgtagaactaaaaactcccatgcataaataaatcactccaaattaggggtgttcatccgatccaatctgcacttttttggtcaaacaacatccaatccgcactaagtgc

SEQ ID NO: 119271 - DNA, 2799 bp, Cannabis sativa
atttaacttaggtttctaggctagggttaaggcctttatataggaggcctaaaccctagattacagttcgaaaccctagatacttgcatagtttgttagataattataaaagattaaattgcctttgaatctagatattattctgccattctgttggacttttagggcccactttgcagctcatgagttgttgtccacgtgtagaagagcgtaggaaaccctgcagaggtattggggtctccgtttgcttaggtactgacttggccttcttattggtgcattgtacagccacatgacactgattttgtccacgtaaacatgccacatcaggagaaccaaaattgggataacaacaattattgttgagtgaaaaataaaattaatttataaatttgaaattaaaaaataattgattgaaatttataaatattcatcaagtaaataagtaagaaaaacaattaattaaaaattatgaatagtcatcaggtaaattaatatatgagttacgttaaaaaaaatatgattttcttttggtggtgcaagcactccctgggtctaacgtgggggacaaacccctgacatggtgcagccccgtgccaaatttgaaattaattaagtataaatagaaaaagaaaaataattgtaccatacactaattagagtcttttacctattagcattactaaaagctactacatatgagtttaatcaacaatgatttctaaaccaattggatcgttttgatagtttaactcaacacatataatcttatttataatgcaactattgatcttttaagatacctagagtgacaatttgattattgaatttgtttgaaaatatcatactattcaaagttttataaactattacatttagatgatatattaatgcctaatcttacatcttatttagttgttcacaacaattgtaaaattcgagaaaaaatatttcatatatgaattgttccatgataacaagatcaattaatatactatcataaagaattaaaattgtttaattaattaaaattaatctcaaataaaaaataaattataaagactgtgacttgtgggatcctaaactaatttagtgggcttgaattgagcatgtcattgtcggagttgtgggaaccaaagaaataagttctcgttgagctatttaccttgttaaaatatatatactggtaaaacatataccaatccttcaatataagtattcaacaagtttctttatcaggttgttgtctcctactgaccaggcgacatatcgcccttaggttgagatcaacagtaatcgagatcattcagattttttctagaacaaattttttatctatttaatatgcatatttttctttgacaaagagcaataattttttatttggatattatttattagtagacgtgttactttattcttcactattatactttatgtaatacaaccatcaatatatatataataacaacaaaaaaatgtaagatttcccaccacgataattttaaatttttatagtataagaattgttccatatattattattttaaaaaaataaataaattatcaatttaatttattagttaaattaaaaataaataaaataaaataaatcatgtccttacaaggggagcaattcgatcgtttagtacgtttaaagtacctcataattatctaaagttttcatacactatcaaatttagatgagactattaataaaaatttttaatgtaaaatttttcgtctatttataatgtatttttattttttttgacaaaatttactattcaattttatataattataagtttttattttttttttattattgcatgtgttattttattgttcacaattataatatatgtaataaaatcgtcaatattaaaagagaaaaattgaagacttcacaccacaataattataaacttaaaattattataatataaaattcttctatattaataataaaaaaatattgaagaaatttaaattattgtttagaaagacaatattaaattaatttataagcttaaattaaaaaaaaatatatgtcttaacaaaggattgaacttatgacattgtagttgatgtaagagaattttaccacttacaccatgattatattgttgattatgtgaatattttaagattaaaattataaaaacttataagataaataagtaagaaaaattatgggttaggaattaactttggagtattgttaatatttaaaattaattataaataaaaaaatttattaattatagtgtagtttttaagagttaatttaaactatttgattaaatcaatgactataaatttttatatcaggtaaaaaataaaatacaatacatatttattcaaatatatatatttttataaaaaagtaattataaaaaaattagttagtatattattagtatcattggtaactaaaaagtttactgtgaaataccaaaaaaaaaaataaaaattcagaaattgagactttttcaaattttttatattcggatatatttaagtttggattaagtatatatatgctgatgtgtcttgctattttttaatatttaattttttttgagatatttttgttattattttgaatttgatgtacatttatgcaaattttccaatttatcgtatttattttgtgaaaaattttatttacaccttaaaaatacctggaaacacctaattttaagaatttttatttcatataaaatttagggaaattctataatgcactcccttaaaagaggtatatcgatacatctctatctgttttagtatccg

SEQ ID NO: 119272 - DNA, 3833 bp, Cannabis sativa
aaaaaaaaaactgttttgaagtttaaaaataaaaaaaccccaacatattattggataatctatttaattaaaaaaataatattaaaataaaaagatttaactaatttctattaatcaattatattatattatatctgaatttaaattatgaatttgaattaaattaaatattattttttattttacataattaaataaagggtttgtttataatcttatatatatatatgatatatatcagtataacaaacaacataagaaaataagtgaattgagcgatacttttagagagaaaattaaaaaataagatttatttttcactctctctttctctctcctctcactcgcacgctcactctccctccctctctttcttcatctcacacaccacacacacaatggtgtgctgtgagatttgtattcttccctatctcatcacagtatctcatgagttgagaatatactacgattacaaaattatacccatctaattgaatctaatagcccactctattcctgagtgttgagttggcttggaatatcgtggtgtgaactcttcagcaagttcttggattggatgttcgataataatacaaaaagatagcgaggatcccatgataggctacaagatgtattttttctctttttattagtctacgtttaatctatatatatattttgctgagatccttgggattatggtttatattggattaaattaatttttaatcaaattagcttatgattttctaactctgatatggaccataaaatccaacaacaatacaagaacatttggtattgaatgaaggtgagatttttttgatgagatggtggatgtaacaatcacacttaaaagtgatttcaacaagatttatataaaggtgttgttcttggagtaaccagcttcaactgagaaattacaaccttctattctacaagctcctagaattgaattgaagacactttcaaagcatcttaaatatgtttacttggaggataacgagactttaccggttaataattgctagagatttcaaccaagtgcaagaggaaaagttgataagagtgttttgggattacaaaatgactattgggtggtccattacttacattaagggaattagcccttctacgtgcatccacaattctcattgaagaaggatttaaactaacatacaacaaaggctaaatcccttatgatgaaagtagtaaaaaatgagatattgaagcttcttggtgtggacattatttacccaatttcagacagtcaatgggtgagtccagttcaagtgttgccaaagaaatttggtattacagtggcgaagaattaagataatgagttagtatcaagaagaatgcaaaccgggtggcgagtttgtgtagattattgcaagctgaatgcggccacacgtaaagatcacttcccattgccatttattggatgctggaaaggttagtaagtcatccttatcatttctttcttgatggatatttgggatgtaattaaattggtattgctcctaaagatcaagagaagacaacctttacatgcccttttggtacgctttccgacgtatctcatttgggttatgcaatgctcctatagcttctcagcaatgtatgatgagcatatttactgaatacattgagaacatcattaaagtcttcacggatgattttagtgtttatggtgacttttttgacaagtgtcttcacaatctcactttgatccttcagcggtgtataattttgggccatgtgatcaattgagaaaaatgtcattttatggtaaatcaaagatatagttttgggccatgtgatctcatccaaggggatagaagtagataaggatatgttgacgcggaaaagtggccaacaccagctcgctagattggcgagataaataaagaatgtaagtaaataatttagagatacacaaaaaattcatagtagtttactccccatatcacgatgataatggagatacgtctacattgaattttaatgtctcacaagaattacagaaaagattaagtgtttaagctatagtttctagagagagaaactagagagagatgctctgaccttgtgggtagttttttgaatgtgaaaaatgagcttatggagctctccttttataggtgaaggagccacaaaaatagaggaaaaatacaaataagatatttttgacggttgatgatatggtgaaaattagctcttggtggtgatagccattttttggagcccggcgagtcccgctgtgggtaactcggagcttattttcgtaattcctttgggggtgaaattcgatgacgataccttcagaattgagattgaggtgtgatacatgatcttatagagaattgaattagcttcgaaacacaaatttaattgcataaatcagattaatattgagtgagctatggcaattttactgaaggtagttcataacccaacacacaagttaacatccaatgcctagattgacatcccagcgcttaggttgacgtatgacgtcaacctagacacaaggtaagtgaaaaatcatccaagggatgtactttaaggtgtctaagtgatattttaacttcacttagcctatttttgtgttctggcaaagttggtcaccagttcttggagatattgttgctctacgaaaatgagagactcaaaactcttcatttttaagtgagttggaaataaaaaataaaaagttgtgaatttgaattttctgacttcatggatacggatggtcgaaatggcatccgaatcaaataagcagatgccatcgcactaggcatttgtcaacctaggcactgggtacttacttctaagctcccaagatcttatttttgatacttccaaggcttttgaacttgaggaagaggtctcctaacccattttttaccattttgaatttattggtcaaatcagatttcaattttgagcaattaaaggcagtgtcccaagttgattatcaacttgggcgttgggcccaacaccaggtcaacctgggtgctgtgccctatttctaggggctcgagtttgtggttttttccttgagtttgcttgaatcttcattattttttatgatggaaaaaattcccaaacagtttttgatgaaattgatcggaaatagtcgaagatgacaatatgtcaacctgggcattgggcccagccccaggtgtcaacttgggcactgggtcctagttctgccccttcgaaaattctatttggtattcgaaaatagtttaatatcaatattttatgaaaaatagagaagatgctcgaatgaaatctcgaaaaacaccatcaaaaatggtccatgctgataaaatgtcaacctgggcgcagggccagccccaggtgtaaacctaggcgctgggccctacttttggcaactagaaaatgttgtttcttctttcaaaggacatatttccccgttttttatgaagatgaaaaattcagatctccgatctgatacttggaaggcactcagattgacagattatcaacctgggtgttgggtgctcgggaccctgagtgcttaaaaagaacttgctccaattctgattcggatgcctcaaatatttccatggtatgtctagttgatgtttcaatgcatgttttgatccttttgcactaagacagtcctgtaaattgaaaccctagtttgatatgtcaacttgggcgccgggtgaaactctaggtgcccaagttggcatccgagttgcaagttcatgtaataccagctctagaggtttggattaggtgttgggttttatgccctaaataaaactcattttaaaataatcagatttacttattaa

SEQ ID NO: 119273 - DNA, 3120 bp, Cannabis sativa
  modified_base (3064)..(3092): a, c, t, g, unknown or other
tttgtattaaatatgtggaattattagttgttttgtggttttatgttagttggctcgcaacagatataactgttgcattacagttttatcacagtttccttgaagatgacttcttctttctcttctggccgtcgaagtagaaatttttttcaagcaaagacacattcgacttcttcttcactgaaagacgacgacctttagccacatgagagcaaaattggagttaatattacaaaaaaattccagccgatcaaataaacaaatatacaactcaaataaaaaaaaaaaattaaataaatacctcttacacacaccttcaacccacgatctatgtttcctgagattaaaattttcgtctgatgcaacctacgggcaaccacccagtaacccaaaacaactgaaacaaaatccaaccagaaagagaacaatcattaattctgacgacttcacttgagaagacgaccggaatcaatcaaaacaggggctgttttgaattcatgaaaaaaaaagttaataggtggtatgcacagtaagtgatagtgattgtgtgtgtaagtgatagtgtaagaggtacactttgataattaaaagcacataaaaggtataaatgttgtccataccttatggaggtatttttgtaaataaagtgtcagtttgtattcatgaaataattccaaaaaagaactaaagaaaatataagaaataaaatgtgagaaattaataaaataaaataataataatttctcaggtatctattctatataaaatgtagctatgtaacataattttttgtttaaaggtgtttttaagttttctacattaactttaacagaataccccaattacttaatagaatatttttttattaattttataatattattatatatatttaataataaaaattatgcagatattttatataaaaaaataaatttattatatataaaaattatatttatatataatcacatctatatataaaatatatatatatatatttaaaccttaattttacgacaaaccttttgtttaaaaataattaatgatattgttccaaaaaaaattaattaatgttacatatatttaataatttgtacacttcattctaaccacactttcctaacaacaaattataagaatgtatctatcactatcattatttttttaaaatatatgtttggacataatacttaaaatgtattttgaaagtacttaattctctaattattttctaatcaaactcaaattttatcaaaatattttctaatacaatctttatatatatatagatattaacgcagatcttcgttaactaataataagtatttttcgtaataaatttaacacaaaaattataagaaattaataaagtataataagtattataataataacaccaaatattttacgtgattttgcagttaaatctgcatactccacgagtctaccttattcaagatatttttgagtatttaatacaatatacaattgatagtatttctgtatttctctcaaagattttccgtccctttttctgtagaatctgcctctatttataggaatataggttgacagttatttacattttaaattcaaattataaccgctccatgaaacgtggaaattgatcacgtttcatttaaacacgtgtagataacaattggtaaccacataactgcttattattcttatcttcaaagatagtagatgttgatttggacaatagcacctcgcttaactcgtagatggtcaaatgttgagttggacaatcatatgtcttccagcaatgtcatgagcactagtgtactgagcaaacttaagaactgctctttgactataaggcatcacaggctggataatcatgtcttgcatatttcaaatttgttaaacacttaacgtatttttcacattataattgtctagtctgatgtcccatccaacaacaaccgatccgatgcgattggagttttaaaatttacacccgatctgatccaatcatgattggatatccgattctattagatcgattgggattagatcagttgggatcatttggttgtaattagattggatgactttctgcacactcctagttcatggacataaagctaaaccagccaaggaactttccacttttgcagcaaactatatgcacaacttccactttgcccaagctatatattgcctagaaaacagagcaaccacacaactttctccttcggctgctgaaccagtttcgtgggcacctccaagggttaggagcctcaagctaaacgttgatgcagacgtcaatatcgacaataaaattactggtgttggggctatagttcgagactcctctagcaatgttactgctgctctttctaagcaaatcattagtaacttcaaatctcaagaaatggaggcgctagcaatgtttcatagcttaaattgggctcttcaacatcaattacctatagctcaagttgaaacaaatgttctacgggtctcgaatgctttgtgtaaactttcatcttcaatttcttcctttcatgatttaattatggatatttctagtcttttgtcatttttctctaatgtgaatgtatctcatgtcaagcgtacaactaatatggatgttcacaggttgtcaaaatttactttaggggtggatgaagtttgcttttggtcgtattgtattcctccacctatgaactctgttatacatgaattatccttttaatttgtactgtagtcaattagagtactaatatgaattaaacactacatatttttttaaaagaaaaaaaatcttattaaagttctatagttgatcctattatacacgaccatttttaaaataagcaaaacaagattatgaaaaaggagctcaccaataatttcaaacatcttaagactatcaatattctcaaaatacttaaagtctatacagctaatattttgatattcttcaaggctaagatccacaagtgataaatttgactattaaaatattattttacttaatgttattccttttagttttataacttaggggtcgtttggtaacacttttgttttnnnnnnnnnnnnnnnnnnnnnnnnnnnnnaatttttgtttttaaaaattttgttttt

SEQ ID NO: 119274 - DNA, 1322 bp, Cannabis sativa
tttctatgtagaattttgtagaattttgtaaaaaaaaaaaagaaaaaaaaaattatttttaagtgtaaaaataaaaaaaataataattttttcacttttagtaacaaattttattgtaaataaaaataatttttttttagtatacaacaaataagtcaatgatgtgagttcaaaggatagaaaagaaacctgaaaaataatctactacaacgtatccaaccgcattaaatatgcacatgcagcaatacccacttgatcagatcatatgagtcccactctaaaataaatctccaccggtgaggattttttctaattctccagagtagcaaaattctataaatttttatatatacatttatataatcaagaaaattgtagaagtttctcatcttttataatttacaaacttttttaaccggggaaaaatgttactaatcgaataatggaggtatattttattattaaatacttcggtatttataatacttaatttatgagaatcgttaaaaatattattagtgtttagtatattcgtttgtattgtgttgttattaatgtaattaagtagcagattgaattatataaaatttaagaaaataatttttaaagaataacgctaactaattataaagtatcacatataaaaatgttagccaccaccactaatatttaataacaatacttataaattaatatacatatcaataaatacatacactaaagtcagatacatttatagcaagagctaagttcataaacttgtaattttgttttttttcgagagcatataatatagattgtaagttatatatgttgagattgaacagaaataaaactataaaaatacaatttaaatgggagggtaaatttcatcatcttggcaaatttcataaaataaaccgtgaaactttattacgttcttacaattattaccagaaaaaaaaaatgcacattcatatcttcaattattggatgttcttattatctgacaggttatctaatttgagtcctcctattaattattgtcaaacataatatcaattattttttgacacttggatggtgttagagtccaaatatttcaaaacacgtttgtttattaattatagcctacctaatataagggattaggcgctaattaagatcaaattttataatctttttttttttgctaaaattgtagccttttattttctaactgctcagattttgctgttttgttctaagatattattaatgtgtttctgctgagattttttttttctaaataccgaaacagatagggtgtacacgacttgtaacgtccccgcttcaagcctcca

SEQ ID NO: 119275 - DNA, 2699 bp, Cannabis sativa
acaattctgctgcagctacagttactttttcccacagcgctaaactggccctaagagaatagtattatggcatattctttttctttgttaacattggaaattattgtattgggaaaaaagagacagcaaagactgaaaaaagacaagtgttttaagtacaaaactctcttcggagatatagttagaacatcaatgttaagaagaattttattccaatatattgagaacagaattgggaaaagagaaagacagaaacataactgagttttttaatttgatacattcgtcttttttgaaaaacagttcccattaatagcaatgaaaatcatcaaagcattcacatctcaccaaatatcaagtatcctgcaaaaaaggccagtccaccattattacagaggtaaatgtcgaaaatagcactgtaaaaaaaccaccatttaaagtgttatatgaaaaagcattcaacaagaacatttttatttcgcaaaagtaaatttagtgccccaaaacatgattaagacgaattagagaggaagtttacaatctcttcttctcttcccaaataaaatgctccgcctgaaccattaccatggaataattcaatagagtggacatagtttataacttattaataaatgcagcatttgtgaaccaaaatgtgatgataagaagttgaggcgagataaggtcacatgcaactatggttaattcctactttctgtgcgaataagggtgacatcacttaatggcaggggacatgcaatgcaacaaagagtacaagacgaaagagaacaaaaggaataaagaagataaagccatcacttagtaaaattagcaaagtaacttctaggacagaattgcaaaaagccaacactatcagcgtaaaagcaatagatagcatcaatcttaatcatacttgcacataatacaaacacaaaaaagatgaagatcatatagcatctacctatccttccaaagcaaatccagggtattcaactttcataagctaaagttcacgcaaatacttgtatgacggtaaaattagcagcacccaaaaatcaaaggaagatgattcacgtaatcaaagaaatgaagagcatttggacacaaaagaagtattcatggaccacaactattaaatggaacttacgactttccaatgtctatccgtcatggaagttaagccataaatcaaaatttaaatcgagagtttttcagtacatgccagtaataaaaacaatacttaatcatgagagaaacgaaaccaactagctttggttcaagaaaaattagagttacctacaggctcctaacacaacgtctcataaatttccatgcttctaaaacatttgattcagccctctcagctatccaattacatttaatagcaaaatttttgagaaacatgtagactcaaacttaaatttcttggcaaaattgggctcaatatcatagattgcaattttgaccaagatctcttgtttagttggtgacacgaacacaaaaatatccacaattagaaaaaataggataaaagatgaagatgctagacctaatttactatagttgttgaataggatggatccaaatatgtgaaggagaaggggtctctaatcccccatggtagcatgctgatcgtgtatcataacatgactttgtagtaagaggtgatactgttataatttcctatatcttctttacaatttacactgaaaaggcaccaaacaacaccagagagactacaacctctcttatcattttttcaacccgtgttgcatgtgtttcataagtaagcaatacctttaaataaatgtactcatttattcagctcatctaaaacctttgctaaggcctaaggtttgcatcttaatgactgaaaatctaccttaatacctaacaaagcctaattcctttgctagggttctatatcacaaagcataattaacaaatagaacttaaaacactataactattaacgtaaatactattcaattaacaaaagtgaatatggctggtatgtgcctttaattatgctgatattcaatgagcaatatgaatttacagacttatattgcatataacattgaatcagaaatgttgtctcattcttcataaaagtttagaagaacatcacaagataacatctttatgaagcctgaagttcgggaagaaagtaaaattggaatagatttattctaaagaaattcagcagctactaaatcaacacccaagaaaacctcactaaatagggacatcccaaaattgttttcgaaaacattcttagaacatgaatctacagttttaatacaccaatgacaaagtgctaatagagtactcgaaagatcagctcctatagtccacttaaatatacttagtgcagaatttataccaaatgggcataaatataaggatggaaattgtaaaactggaaaaaattagataagcattaatcggtagggtcatgataaataattattcctaaaagcaaacaactatacaaacaaatcaagcatcaagttatcaattttaacatgagaacgaggacaaaataaaataaatttaataaaatcttaattagagaaagaccacatatcaaagtatttgagtaaacttatcctcgtgtaatttgtaagaatatgatccaatgtaatgtatttaaagtaaataaatgaatcgagatttataaaaagcagccaattttc

SEQ ID NO: 119276 - DNA, 1149 bp, Cannabis sativa
  modified_base (1094)..(1110): a, c, t, g, unknown or other
ctaatataaatttataccataaaatatgaattataaaatctataaattaatagaaacaaaaaattaaataaaattaaatctataatctaacataataataattaaacgtgaaatttataagaaaatatcaaacctgaaaacaaaaacataaactaaaatcaaaatatcattaacaagattgaaaaaaaaatcttagaaaacacttgagagggtcgaactcttcatggagaagaccatcaattccatcttcttcaaagaagaccattgtttgaagttctctatctctgaccttgaccttcaattgatcccatcttctacgacgcctttgagtgaggataaatcttggattttgactgagattttttgggttgtaccatgttttgaaaagcaaagatgactttttttttcaggaaagatggagaggattccccaaattacggtaagaaaattctaaatgtaagaattatttatgggtattttttgtgttgtgtctgaaatgtgagtgagggttctgatatttttttggggtttgctgctggttttggaaatttttattattttggatttgttgtttgacaatgaaaggggtcagaggggatgggactcttttgcaattgaaaaattatggtttttttggcagtattgtgtgtgatgttgttggtttgtttgcagtgcttctctttatacacaaaaaagatattttttgggattttacacgacactatttgtgagaaggaattagaatcttcaaagtttataattgggtgttgttgtgttattattgtactgactttaagcatgtgcacctacaaataatggggtctattgtcgataaaattcttttgcaaataattttgtggatgaaaatttaagaggtactaatatgttacttacctatgatctattatttttgattcataattaaacaggtgatactctaaagtatttgacacttgcaatacatcatggtggaatgttcttcacaccttttggcaacagaaagtatgagggtggaaatgttagttttttttgattggattgataatagtaagatgagcagaatattcatagaaggatttgttgggttttatgcnnnnnnnnnnnnnnnnntcaatataatcagatttgtttattaatatagatcagaaa

SEQ ID NO: 119277 - DNA, 1538 bp, Cannabis sativa
tacaactcaccaacaagaaggccaagtcatctatttagcatttcaaccaacgagaattgattcatatatacaaaatatatattgagatacaaacaaatcatgaaaatagatatatttttttttttggaaaaatataattggaaataaagtaaattacttattgttggtataggaaaatgacaaaaagagagaataagtaatattaaatggtgtgtactatgttctctgtagtagcaataccagaagaaaaagagtagaggaagaggacgaaactcaatagtaaattttagaatggcaatagtttttttttattggagtttagaattacaatccttagttgtgggcagagagagaagcgcgtgacttacaagaagttgtggggtcttacaatatttaataaataaaaattattaatttaataatataaaagaaataacacatatgcaagtgacgtagggaggtactcgacatctctcccattttaactttttaccacttatttgcttctccattaggtttaagataaaaaaacacaatagcaaaaataataaatgatggagcagagagaaagagaaaagagttaaatgcgggtaggtaaggcgattcaattattgtttgaaataaagaaattgacattttcaaaaaacaaaaaaaaattgagtgaaaagaagagaagagattaaacattacaactgatgaatcaatagctagaaatgagagaagacaaacagatccacaccctacttacactacaagaaaaggactttttgccggcgcatttcgtcacatgcgccagcaaaagttgtcgacacaaagaaatttgtggactcccaattttattttgggtttacttttgccagcgcatatttacgccggcaaaacatagctataccggcgatgtcaaattaaatgcaccggtaaaacgtaacaccattaggcgcgagaaattgtcgcctttaattttatttttggggcgcatttccacttttaccggcgcatatgtacgctggtaaaaggaaaaaaaaaatggatggaaaattcccgcgtgggttttatgtggttggtggggccacttttaaatgaaacgctcgttttgccttaggtttagaattaattttttaaacacttttaccggcgcaattggatgcgccggtaaaagttttgatatgtatcaggggctacgaagccccctttcttccccccacttcattttctgcaacacacagccgccccctctcgttctctctcaaggcccctctccttctctcttgttttccctctcaatctctctaaatttctctcaaaacctctctttcccactcaatccctctttgtttatgtattttttcccaaaaaaaaaaaatccgatcaccactccggctgcaccaccgcaggctgcaccgcaccacctctgccgtccgctccaccgcaccgcccaacgcaccatctgaaggtatttttaatttttaatgtattgattaaatatttagatttgtatatatgtgtatgtgtatagtagatatgtatgtatatgtgta

SEQ ID NO: 119278 - DNA, 1090 bp, Cannabis sativa
gggggacgaaggggttcagtatattcaaaataatatatatatcattatttaattaatattttatatatatatatacatttgactcggtcaaaaaccgagtctttccataggtactctatcacggcggtcccctatgggcccgtcgagtgattggtctaaaaaaaaaaccctagccctagtttatctcgcgctactccattaaccaaatacaacaccccaatcatggcgggctcattaaggccctctgagattggtcactacagtttaaagtttttattaagccgcccaacctgtaattttttttcccaatctcttcttcttcccaaaatatttcccctttttctaaatttcatctaaaaatgcccaagattgatccaaaatctagttttcttgtctcttcatcactactacactacaaagaaaatgtaagtttgaatattttttactggtgtatatttttttatatttgtaccctaaattttaaacttttttttagtttaaaaagttgagtaaatttatgaaatgttggtttatatttggatgttataggttcaaattgggtaagcttcacacaacactaaggatgcttggaaatttcttagagcttaatttgcctaagattttaatatcttttgttctttttttgctgaaaatagtagtggtggcgatgttttgttattcttttctatatttttggattacatatagtgggtactcttcaaacaaccttataataacttaaaaaaattatttatatatatatttggggtaatttttgaattttttattttatttttggccagaaattcaataataataataataatatatagagtgtgtatttttttaaaatgttgttgaaatcatatatatatattatgaattatatttaatagatattttcttgagtaatgtaagatttttttttcatcacattcatttttttttctttctttataattttataattttaggtcaaaataataaattttgttttttgttatttgattaaaatattacttatatatatattttttaataaaaatcataagatctattaattaataaattcgttcaaaataatagaacg

SEQ ID NO: 119279 - DNA, 573 bp, Cannabis sativa
actacttttttgtcatggagattttaagtcaatttagttgatgcttcaagggctaaaaatgttttcggaaaccttaggtctaaaaatgtaggacaaattaattgggaaaggatcagtctaattctatttgcaatgattttgagataatcttatagaccacattctaaagagaaataaatcttaaatgggagacttttttcaaattgggcaccttatgaagaagaattcattcattgcgttgagttcctcatgtatcgatccaaacctaagaaaatctacaaatgcgtcacagaaatccaaaccaactgccagtaataagaagagtgtttgtctaattttatcatgccccgaaattttcatcatatcatttatgttgtttattacgtggggtattttttgatagtttcttgacaacctcatatgagtcatagtgggtccgatggtagtaagtgggcatgcgaaaacttatctcatacgtacgtaatgaggaattaattagttaaatagtttattcgttaaattttagggtttttttttttttaatttctacacctcaaagtatttttttttttt

SEQ ID NO: 119280 - DNA, 2813 bp, Cannabis sativa
atattttcttggtacattaacatggtactctcaaaaaattaaaaaaatatgaagaaaaaattatacaaagccacctatattgtgtgctttcctttatattaatatactaggaaacgtaaccgcgctttgcgcggtttataatataaaatttatataattttatatttatttacttaattataatttttaaaacatgtacataaatttgggtgagaaatttatacatcatgtaattctaatttttacttgtactttacatagtatttttatatatataaaaaaattaagctaactaattaaaaaaaattatgtttgtgcaaagatttacatttttttataaagagaaaatttacatattttgattaatgtattttaacctattatctatttggactacatatttaaaaaaaaaaaaattaaattatggtatgtatgtatgcttgtatgaggcttcacctactacaatgctttagcctgggtacattagcattacttctttctcatattgtttgcgcctggtgcaagtcattgattgtcatgagtctcagttaactgagtttggtattgtaatctttgatatctttcatatttggaatatttttatgctcatcactttaaatcattgtaaaatagtcaataatacaaaagctcatcctttagctaaaacatatataaaaggcgcctcacaaaattgtacgtacttaaattaaaaaaaaaataataagaagcaaaccttataagcttttttggatcatgaattcatgattcccaatttacaatcattcaaattaaattcataatatttttccattaaaatcttaccatgagactaaaagaagaataagagaaagagaagtcaaaaaaaaaaaaaaaaactcagcttcataagccaaaacaactaaattatagctaaagatagagtttcctaaaaataaaattacaaccataaaaagaaatagtatcataccttcatatgaggagggaggttattttacacatgctagaaacatattcatgttattatatttggttccaatgagtcataataaaagaaaaatatttttataaaggcaatagatcattgtcatatcaagaatcactcttttatataaatagacaccaaaggttattgaaaatttggaggacctttttgcgtaagtatgttttacttgctttttcagttttaatttaaagctaagtatgtagttagtttgtaagttacatctatctatatacatattacactaatattaatagtgacataataataattgaggatgataaaatttaacttttttttatatacaacttttattcataataaagttttttgtagggtatgaccattctcattctttttatgcaattattatatcattagattactattgtattgcattgtatttataaaagtgtaaatgaaaaaactaaataataaaagtaataaataaattagaaaatctcataaactaaaaaattaagaataaaactcatatataatgccatgtcatcactattaccaaaaagtattatatagatatatagatttgtgtaagaaatgagtttgagataacgaccatacttgatcatatatagtctaaattataaaaaacttttacatgaatcaatcaaattatatatttttttttattaatccataatctaaaaagaaacaaaacaaattaaaaataaaattatcaaatgtttatataacaaataaaatataaattctaacaccccaaaacgttattatatattatatatatttttgtaagaaatgagattgagataaagaccatacttaatcatactcttaatcataaaaagcttttcacatgaatcaatcaaatcatatttttttattaatcataatctaaaaacgaacaaacaaaacaaattaataataaaattaacaaatatataataaataaaatataaattttaaacaccccaacacgattaaatattgaaattttgagtaagatatcaaaagtgctctatgaacacgtaccaaaaaagtcttccaagggatgagaaggttgtctggttccataaaatagcttaagtgtgttcttatgcgaccaacctgcaaaatagagagaactgagaggttaaaaaggttaaaataaagattaagaacttttatcatcaccttttataattaaatttgttgtaaagtattattattagaattaattatggtatgaataaatttatatttatagttactgtatttattaattaattatatttaattattaatttttattacttaaatttggcgtttcttttcaattcaaagagtaaatgaatggtcattattctttttgataagcaaatgaatgatcaataactattactcattaaaagaagagagtgaccacgtttaaagaaaataaattggatacatttttttgatgataaatattttacacattcatattaaaaaggtaaagaaaaaaatttacatcataaatctaaatatatataaattaaattagttatgggaaggggaatgattttttgttatagcattttgtaacattgtttaggaaaaaaaaagtaatagaacatttatcttctggaaaaaagattgtacacaaagagatattttaaaagggaaggggaacagttttttgttatagcattttgtattattattagctataaatgctaaataataatatgaaatggtacaaaattaataaaaaaatttaaataatagtgaaaaattaagagaacaaagaatatgaaacaaagctcatataagaagccatgtcatcttgattagcaagagaattatatagatatat

SEQ ID NO: 119281 - DNA, 2781 bp, Cannabis sativa
tcatactcatcaacctatatatatagctaccacacgtaattacaataagtatatatattaattagtatatgagagcaaaaatccaagataatacatgcatgcatgtgtgtgttacatatatatatatatataaatgtataaatatattgcaagatggcatataggggtttggaatcttatgaaacaaggtgacacgtgtgaaaggaaaccgtatgtaaattcacacgtgtcatgaggatgacatgcaagcatgtggtctccattaggaaatctatcctgtttgtgtgaattaccaattatacccctggttattatcagttaacgcggcttgatcacgtgactacgtatctacaatactacaactacgactatttatgtcctccaaatttatttatttatttatttattttttatttaagcgtttatatattacaacatgttttatataggactcgaactcaaaacctctaacacacctacctatggccacttgagctcaagtgattatgtcctccaatctccattactcttatctttgctctcaaattttggatattataatttataattaagctcacccaactctcctcttcaaccaaaattactgtactattaacgggtcagctttgagttgaaatgggatgtaaaataataagaattcttaattcatcttaacctaaaattagccccaaatactccatagattattataaaaaaaaattatttttagtcataataaaatttattactaaattaatgttgaaaaattgtgagtaagtataaattattattcttatattgtgactacaaaatttgtggctaaaaatattacaatgactaaatgtatttttagtcacaatacttgtcgtgatgatctaaaactaaattaataacaatttatatctaatactatatttttagtcacaagtaacatttcatattgagatttttttttttttttgaaatccatttcatattgagattaaaagtcacatttaatcacaaaaaatcatattgtcattaagaaattatcaccaaaaataaatatttttttagtgaaagttttttagaataaattagttttttttactttcatttgtaagttattaaaaaaaaaaactttaatatttgtagaaatttaccttctaaattagtatttttattaaaaatgttcttcaaattataaaaataattataaatttcaagtttcgatcatatttcgttaatttttaaaataatttattataatatagctacaagctatatgtataattatattatgaatttatttaattaatttaaactagttgtaactaagtataataattttaaatattcaaatattaactctaaattatcgcaaataatattagattagccttagatcaattatcattaagaaactgtcagaaaaaaataaacaaatgtaaccgaaaaagttctaattattttcaaagtttgaggagaattttaaaaaaaaaatttaagaggcaaaacttgtatagagggtaaaaattatatttatttatatttttaatcataataatatttataaattaacattcacaaaaatatgatctattcaaaatatattattagtttaaataaattataatttaaagtaatattaataaaaataatttattattttgattaaatgtattttagttaatactgagtaaaataaaaatattaattaattatgagtattttttttgttgtggtaaaataatattcaattaatcacattaaaaggaaagaaaaaaaaagttataaggtgtagagtgtagactctttttatgttttggtaaatatagaaaagggtattaaacttaaataattatttagttttaaaatataaatatattgtatttgattaatagtgatgaaatgatgaaattttccgtaatggtatggtgatgttgggacatagattctaaatggtacaaaatataatgatagcatgtatatatgtaggtccttaaaagagacctatgattttttttggtcaatctttgaatcaaatttgaaaaaggatatttcatttcagtacatgtcatgtccattcccgctaaatatatatacaattttttttatttttgtttagagattatattatgagctagtttttattacaaaaatcacactaagtaagtagttttgtgatctctaataaaaaatattaggtaattaattgtgtgaagtatttatacaattaaaacctataatgaatagtttggtactaattatatcaataaaatgaattttgttttgatttgaggtaattttaggataaataagcttctgagaaatttttccgaaagtactttataattaagtgtgtttgacttaaaataatttcagaatgagtaatctcctgaaattttttaaaaaaatgtgtgagtgagacaaagctaatgaaaacttgaggtgggaatgttacataaagaacaacaaattatatataagttgccttaattaaatattttatgtttaattaatgagagtgaaaatggagaaaggaaaagaaattggggcctgggcctaatgactatggatgatgatttgattggtcaaagctagtcaaaatgtcaaatataagaaaaagaaaagaaaagaagaaaaaggacacgcggcacacacgtacgggccaaatgacataattacttttaatttaccattacctttattagctgttctaaggtatgggacgacttcattaagctaaaattaacttttggagtttttatgaattttgtcttttttattattattattatt

SEQ ID NO: 119282 - DNA, 3423 bp, Cannabis sativa
acaaataagaaggatttgctctatcgttaactaaacacaatttataataatttaccctaaatttctttcattcatttcaaatgtacctagtttttcttttctttcaataattgcctgttgcatgcatggcttgatctcaattgtaataattaaaattttaaatttttcttaattagcgaacaaatttttatttaaattataagtaaatccttcttatttttaatttgggatgttctaagataaaaaaaattactctatattttcacaatgtttttgttgactttaatagtcaaaaggctcgtattcatcccatcgatgatcaatattgagggcggtctcatagtttattgttaccttgacatagaatattttgatcacctagctaaatccacatcattacccaaaatgttttaagatcgaagactggattaattgtgaatgattacaaattattagtttaagaaatttattataaaatattataatactaataaaacattaattatttaattatatgaattactaaatttataaccaaatatactttacatgtataaaagaaagattgcccctaataacgattatacctatattaatagcctatttactaataaaatgtgaatcaatgggttatatttttttttttagaacaatgaactaaaattcattgaaaagaatcagcgttcagtacatcgataaggaaagaaggaaaatcctccatccaaactagctcaccatccaccctaagtgcgtgcacaactaattcatgagcagccatattggccgaccgacggacatgaatcaaagacacctcaggaaaattggatagtagactagaaatatcatctaaaagagaaccaaggtcattacaaagagaagatcttttaggaaaagcagaaatcacagctaggcaatcagactcgataggatggagagggagaccaattccaagcgaccaatccaacgccaccataatagctattgccttagcttgaataactgtaaaatttcctacaaaaccaacatagaaacataataagcttcaccccaagataataaactaaaataataataataataaaagctaataaaatataaaataaattaaataacgagtttattatggacagaagggaaaactcccttcatccttacaatccacataaacattaaacccaaacctcatcataccttaattggaagcattaaacagcataaaaatgtgcatttacttattttgggtgcatttagtaacactttttttttttaattttttaatcacaaaactaaaagtaaaatttgtgtctttaaaaaaaaatgtggtttctaactacttttgttttttgattttaaaaggagaaacaaaagtgtgtttgaaattttgaaaacaacacagttttctccttcaagtattgtacgcttgtagtggttgattgtccaacaacttacaatgtcattctaggacgaccttttctaattggctttggggtaataacatccattcgccatttgtgtttaatttccatgcgatactagaagtgttggaacaattagagacaactaaaagagtgcaagaagctgctacaatgttttaactagaattgtcctcatacggtccatgaaggaaatataacggtaagtcgaaacatcttctcaaccagcattgggggtggtccgagaagaggatgaactagatccacgggtaggcgtagaacgaataatcgaacctatggaagaggtagaagaagtgtgcatcagtgataaagatgccatctaggtgggaaaaaatctgcctttagttgtttaagaaggaatagtctccacagtcaagaagaacaatgatgtattagcttggagtcattctgacatgactgtaattattccttatgtaatttgtcacgcactgaacgtagataccaaggcatattcattccgacaaagcaaagacctttagatccaatgagagcggaagcagcaaaaacaaaagtagacaagctacctaacatccacttcctaagagaagctttatatcccatatggctagccaatccgtttttggtcctaaaacctaattattcatggagaatgtgtatagattttacagatctaagcaaagtttgtcgaaaagcctgtttttcacttccacaaattgatcagatggtcgacgtaacttcaagctacaaacttttaagcttcatggatgcatactctagctacaatcagatcaaaatgaatgtagctgactaagaacacacaagctttcagactgacaaaagcatttgctgctacaagttcatgccttttgaattaaagaacattagagcaacttcttaaaaattggtcaacaaaatgttcaaaaatatattagagaataacatgaaaatttatattgatatcatgttaagtaaagttaaaaatttgggtaaataccatttggaccttgtgtttcgcaaaaatttctcattagactaactgttttgttaaatgacaaaatgaaacttgtattttctaaaatattacaaataggaacctgaactgattttttgtcaagataaaacttaataataatctgatctagagatgttatgacaaaactgatcatattttctatatctgttaacaattaaggtcctatgtttactattttagaatatatatatatataaggtccattttgtcatttaacaatactaggggtgagcaaaaaatccaagaaaccgaccaaaccgagtaaaccagacctaattatactttttcaaaatagagaatccagtatttataccctaaaaacttctaagtcataaagttattgggtggttccgttggcccactttttttcttcttctttttttcgtcaaaatttacaatttgcaaaatatattacacttaaatgccaactgttgttaattctgtcccttccctacatcgtttatatgttagttaatatcaatactagctaggatgatatttttttcattcgagaaaaggagtttcacaatctgtttattgtaaagtagacttccctgtaattttgatcaagtctcttgatttgtgtgtcagtggccatgctaatcttttttactttcgtgttccaatttgatgggacatgctctctaaggaggctttgattatcaagtctttgctaaaggaaaattataagatcaagtccagagttggccttgaattttagtggactaggaaaaaaagtttggcccttattttattgagaaagatatattgtattttcaaatttaataaataaattatgtgtatatatatttaatatttttaaaagaattttttttgggccgactcagctgagaaaacactattagcaacacttttttaatagtaaagaaaattaaaaggcaacacttgtaaaagtgttgtctcctaaactgttgccaaaagtattaagaaaaa

SEQ ID NO: 119283 - DNA, 1802 bp, Cannabis sativa
caacaacaaattaattttttatgcacagattccgaagaagacatcatattcttaaaatcttcttttaaaataataaattcagcagcgaatatgtttcctgctttgtagagaaatatctgtcaatctcctatgaaactctacaaatttaataaatgaactattttcatccacagaaccttgactaccaacatcatcaatctccaaagatttttctttcccaatttcatctagattcttatccacaaagaatccatccaaatgtaagctcaacgattcctcctcaattggaaacaaattcttcactttaagttaccacaaaaataaaacaggtaaacaacttcaaacacacataaggagtattatcattagaccaattcacaattctaagaatatgatcatacaatttagtacaatgaatgccatcaatatcaaacaacattcattgaaccaaacttaaaaaatataggccaaacctctcaatctatacaaacctattttttctccattatcacctttattaattttaataagattctttgcaatcgcatttctaaccgaatcaagaaataaacaataagactttttgcctcaagcatattcattgaacttcacactatcaataatatccaactctaattcaaatactttcttagtgtccaaatcacttaacacaaaacagtgaacaaagtagagaatagaaactttcaaggtaagctcatcatcatcgccaaacattttcccaacaaaagctttctccacagccttcttgtttatttctttaaaaccaacaaaaatcttctccttcaacaaattttgttcttgtttataccttaacttgtcacattgacccgaataatcaagccgtgaatccaaagaaaattcctcaatactaaaccttagaatctcaccagcaatattaaaccacatctcattattattcggctagaccacatccttcaacaacaaactgtggaacaactggtgttgcaaaatattagaaggaattcttaaaaagcatccaaatacagtttgtctaaacatttccttctattcattggaccaaagagaattgagagtctcaataattttataagaacaaatagaaataacctgggtagtatgaaaattttcattactaaatttattatcccataactaaaaaacaaaatagtaaaattaataaaacagtaaaataacaacaactataaaatatacataaaaaaattaatacataatcaaacaatgacaagaacaaaaataaacaaaatctaaacataaaaaactctaaatagcaaaaatatataaagaaccaaataaaattagagtatatacgaatacatttgtaaaattaaaaatgaaacctacaacatcaaataaacaaagaataaacaaaatataaataaaaactctaaagataaacaaataagaaaataaatagaaaatcaataaagaataacaaatttatatgtaaacaaattcattgttgtataaattgacaaaaagcctaaatagaaataaaaattttaaaaaaaatatggagaaaatgaattatataaaattgtaagttaaaaagaggactaaacccgtaataatatataaacaaaaaatcaacaaaataaatataaaatagaacctaggattgtattgttatgaacaaaaatataaataaacaaaatataaccttaataataaacccaaaatagaaaaaatatgcaaataaggaagaaaaaaaaactgagaatatacaaatatatttgtaaaatgaaaattaaaactcccaacatcaaatcaataaagaaaaa

SEQ ID NO: 119284 - DNA, 984 bp, Cannabis sativa
cattaatattacattattacattccaccaaaccaaacatcacctaagtgaaacactacaactctagaaatcaaagtagcttcctttctatgaaaatttcgtatccactctctttcttctcaatattgaattcaaccctatagtgaatgagttttttcccacataaatcaaggttgtacttagaccagtgtcgaaagattgtgtggaaaaggtgtttgtctattcaaatgagaatacaagtttattacttgttattactctgcaacagaaagttataagggttggaatactgaacgggatgagtcatattatttccgctgcaatcagtgtaaggtttcttgaaattttacacgtttaattatcgttttacagtttttatatttaggatgttagattataatatttataatcaacatacatgattagtaaattaataagttcctggtaaaataagttttaacaaaaactttgtcctagaagtcattttctccctcacatgaacacttggggaaactctaaaaatgcttctaaggattttcaagtctcatatgcttagcctagtgtctaaggatgaacatatcctcacaaggttctaaccatacaactagtggtttcaacaatttttatcacaagtgatcaatatgacctttatttatagagttttcactctcatttgaacataaatgaccatcgtatataaatcccttggctattaccaattttaaattggacgtttgtagacttaaatgggtggtttggaggttatagaaggtgttagaaccgaacaccactacaaaaaattttacttttagtcacaaacaaaacttgtgactaaaagtaaaaaagttgtgattaattataaatcatcatttctatattgtgcctaaaaagctcgtggctaaatgtatattagtcacaaaaattacaatttgttgtgactaaatgcatgtgtttttagtcacaatacttgttgtgactaaaacta

SEQ ID NO: 119285 - DNA, 572 bp, Cannabis sativa
  modified_base (512)..(522): a, c, t, g, unknown or other
ttgtctttatcttaaatggttttaaacggactagctagtgttacgtctcgggaaatcggggcgttacagagcatgtgatccacgtagagcaataagaacacgactacaggttgctccagattcttaaaatataagcagatcgaatgcagatcgtttgaacccgatttgatgcatgtatgtatcgaatattttattccattatcgaatatgtatctattaagcttgcaaactaattcaactcctttgcctttcacttgaaaaccaggtggttgcttcatataaatctcttcatctaagaatccattaaaaaaagtagtcttaacatcatgttgtttagcttcaaactctaagtgtgctgccaaggaaaacatcaaccttataatcctgtattttaccacaagtgagaagattttaggtctatacattctatctaagtaaaaccattagcctagtaccttactttaaacctcactggtgttgggttgtctgtcctaaataaaactcatttcaannnnnnnnnnnttactaattaataaaagatcagaaatcatttaatgttgcatggttcatat

SEQ ID NO: 119286 - DNA, 1155 bp, Cannabis sativa
caccgacaagagaatgcgagttggacaatttcaaagatatgcctcatatatcttcaagcttgtaagacatgacaatatccataatttcatgagatagatacgtagtatcaataaagaaagaaaacctacttaagttatattttttcttattgtaattatagaaagtaaatagtttctcattttatttcttattagtttttagaaacactacaagaaaaaaatatttacgataacactaaaaaaaaaatgtaattaaatgcattttataatattttagtaattgttatgacaactcatgtaattaaaagtattgacatttaattacatttttcacatattattaaatggtatattataacattattttactgttatttctaaattgttaagtattaatttaatgttatggttcattttgttacatttattaataacatttttaaaatgtaattgtataggttttaattacattattattatgataatactgaaaaaaaaaatgtaactaaatacattttataatattttaacaactgttaagacagctcatataactaaaagtattgatatttaattacatttttcacatgttattaaatgatatattataacattattttagtgttatacattctaaatagttaacattaatttaatgttatggttcattatgttacatttattaagaatattttttaattacattattagtatgttatatataaagaaccattacattttaatgttgttatatatacttattaataactattttttattgttattatttcttttatatgttatattcatttaataatatttttaaaacataatcgtataacttattattacattattattatgatatattaaaaatattatatttaatattgttataatttcttaataataacatttgctactgttatttttttgtgtttttttatagtgaaattattaaattttgtaatgcctattctttgttgaaataacgtaattacaatttaataaatctaatatattttgtatattatcaaaatatacaattattaattaaaaatataattatgtgacctttgcaatctttattaacctgtgcgtgtttccatcaagttatttcaagtcctcatttgctcaatttttcatttaccttta

SEQ ID NO: 119287 - DNA, 642 bp, Cannabis sativa
tagaagaggctttaaatggaaaatacaaggagtggtcttaggctgtggattatgaattaagcttgcttagaaagaacaagacatgggtattggttcgaagacttgaggacaagaagggggtctcaagcaaatggattttaaagattaaagaaggtgtaacagaggatgagtcagtaagattcaatgcaagattagttgccaaaggtttcactcaggtggaagggatagattacactgaggtgttctcacctgtagtaaagtataagaccattagacttatgttgtcaatggcaactcaacaagatctagaagtggagcagcttgatgttaaaactacgtttctacatggttatctagaaaaagagatatacatggagaaaccatctggaattcaggtggaacaagatggaaaagtgatggtttgtaagttggaaaagtctctatacggccttaagcaatcaatacgaaaatggaacaaaaaattacaaaccaataaatggagggctaatcatcgaaattgattatatcaataggcactgtagtaaaactcagtaaatataattctataattcctaagagttcaattctatatttttagtggagtaatcatagaattagtaaacaagattatttggttgatga

SEQ ID NO: 119288 - DNA, 985 bp, Cannabis sativa
  modified_base (911)..(913): a, c, t, g, unknown or other
caaaagaaccgagagacagccaggtacaaaaactgtctcagcagcaactaaggcgcccaagtgatctctaattatcacccctaacccacaccccggttgcccatcaatgagagaagcatctgagttaataagaaaagaacctgggagtggaggagaccagctagcaggagccttaagttgcttctgatttggactcataagatcagttgcaagatggacttccaacatctccatggcctaaggaatccatatattatctgcaatatccttgttctgaaaaatacatttattcctacggtaccaaattagccaagttaaaccaataaagaaaagaaactcttccttagagagcttttccttcatggtcattaaaaaatttggggctttccacaatgaggaaggaaagaggtgaaaataaccgaaatgcttccaaaccttatgtaaagtggggcaagtccataaagcatgacaaacgtcttctttatgacttttacaccgattacaagtatcatccatggacatacctcgcttatttaattcggttttgactggaatccagttgtgaaacacacgccaagtgaagttcttcattttaggagtgagtcgagacccccaaactcccttccaccaagcttttattggacaattatcagagcattctgctatgttagagtcactaaatcttagcttgtagccactagcaacagtatagtgaccactcggagtaagactccaaccgattacatcttctctctcccgtgaggcattaatccccaacacccaaggaatgtcatccttatgaaaccagctagcaatctcttcagttttctagtccccttcctcggttataagtgtctgaatgttcacttcagcaggaacttgaacctttatgctgttgggttttatgcccnnnataaaactctttacaatctgattggttatcaatataaggaatttgaagcgattgatgtttgcatgaatttta

SEQ ID NO: 119289 - DNA, 1148 bp, Cannabis sativa
gatcaccaatagaatccatttcgtgaatagaaacatcaaggtgaggttcaatttcaccagacaaggatgaaacgaacatttctgagggagagcccctacattttttgagtgtttgccttaaatttggtccatccgaatgccttttgctgaaacgatttggtgatatgttttctttctcattttgctgaattgcataaggtgtgacaattggcattggtataattattctttacttcattgtgtttgggactattttaacccaactagaggatgaggatgggttgaaatagtcccacgtggattatttttttttttttcatttcttctaatgattttaaaaaataataatatatatgtattatattgatttaaaataataagatttttaatatttaaaattataaatgaaaatttttgtatttattcttttatttgttgttttttacaatatgaattttaaattttagaataataaattatataatttttagaaatattatttttttaaaaataaaaattattcagtttatttattttaagaattatttaacattattttcataataatctatatttttaataatattttatttttgaaaattattttatttagttttcataatattacttaatagtgtttgacacgattttttatcaacttaatcttaaaagataattaattggataataaattcaagaaatgaagaggtaaaataataaatgaacactaaatatttttacgtaattttatagttaaatctatatagtccaccagtcaatattatttatgagttttggttgtgtttacaattggacatagtttctctaaattaaaactgtatctcctatttcttttgagtgaacccctatgtataggaatatgatggtggttactcaattttatcttagtaaaaatttgtaagtgatgggtggttaatgcatatgtttcacatatagctgaacaattggataagcataaataaatatttatatttaaaatacaaatagaagtggtctttgacttggttagaccatgttgtttgtgagcagatgcatagttgagtgtatagtacgaggaggtacatcattgaacatgtactgcgaggaggtacatcattgaatatgtattacgaggagatacattgttg

SEQ ID NO: 119290 - DNA, 970 bp, Cannabis sativa
aacataatttctcaaataatatcctaaccaaaacaatctcaaataccctgaactactttttcttagaaaatcctattttcccgtctttttcctattctgtcctaaccaccatagccacctcgtctctacgttctcctcacctgaaccacgaccaccccaaccaccatctacctctccacctccattcaccagaaaccccattattagaccccaatcccatttctcctctcttcttttccaccatcaccaaacccaaaaatcgatatgagcctagaaaaccctccgcccaccttcactcccatctcatcatcatcctcgacttctcttcacctgaaccacgacctcatcaccatcttcacatgagcccaattgcactaatcctgatcccgccttgtttatcatctcattaaagtttgcaaaaaataagataatatcgtgtatcttctttttctaccatcaccaaatccaaaaattgacctgagccaagaaaaccctccgacccaccttcaatctcatctcatcatcatcctcaacttctcttcacttgaaccacgacctcatcaccatcttcgcatgagcccagttgcactagtctcgacccgtctcattcatcatctcattaaaaaataatgataatattatgtatcattttagaaaaaaaaaatcagatcatggctaacaagtaggggagttaaagttaaataaataataatcctatatgtgctaccttatgataactaaataaattacaatattgccatcagattaaaaattaaaacttttacaggtgagaacaaaagtaatgctttcacttaagaaaaattctctatatatatatataaaaagagttatttgcggcataacctcctaaagtggcccggtttttgtaactaacccccaattctaaaattttggtggtaaaacttcctaaacccaagttctgttggcagttagccctttccatccattt

SEQ ID NO: 119291 - DNA, 2574 bp, Cannabis sativa
ttttttttcccaaaataaattcatctctttatttctacaatttattattttttttattatttttcaaacatttagtttccaaaaatatcagtaaacaataatcataataaattacaaaattaatatacatcaattttagtattattgatgtgtttacacaattgaaaatattttattttttatttttattattaatagttattttcaattattatcaaatctaagcatactttttggaatattagcggagtaacttttttctaagtttgctaatatactaccatgttagcattctgttgaagataatcttaagtattttcatttaaaagtaaaaggaatatttataaaagtatgggaaaataaataaaaattttgatatatatggcatgtaaagttaatctcattaaaaatgtcattttataataaaattaactaaatatatgagtataaaaatagaaaattccatagaaaaacattaaaaaagttaatcaatttttcaaaatataatcacactctctccagttacacaagatttttttctttcttctgtgattcaaattgcttagtttttcatgctgatcaaaatcaatcaccaaaaacagaaagaaaaacacaagaatttatcctggttcaaatctcaaatttgagtcctactccagctctcccccaaggagatttctccactatgaatcagtaattacaagctccatttacagtacaatgcactcaagaacaatcacagtcagatttgactctacaacactcaacactagagcaatcttatccaactctgaacttgatcttctaagagcattctaactcagcctctctctgtttctctctttctttcttgccttaaattgaatacaatgaagaggcctttttatattgttagtagctgacatgtccagcacttaacaactcatgacaagtcggttattaactaattaaccgacttcctaaaacaaggaagtttgcaactgaaaataacagcttgacaaactatatttggagaaaaaacaagtttagtttaaaatggattatcttccacaaattctaccttaatccatttaaaatgaatcttaataaaacttactacacttgtgggagtgaccctgtttcattaatcaggacctatgttgagtaaatccaaacaatgttggaatttactcactggcaacactttggttcctgcatcagcagggttttcatcacttggtactttgtcgagattaatttcaccatcttgtatcttttttcttatttaaaatcttctaatgtcgatgtgtttagatctctcatgatacacaggattcttgcttagatgaattgaagattgactgtctgaaaacacaatgactttgccctttatcatctggagttctcctaggattcctttgatccaaacagcatccttaaatgtctctattgttgccatgaactctgcttctgtagtggagagagctacaacaggttgcaattgagatttccagcttatccaacatgagtttaactgaaaacagtaacttgttagagatttccttgtatctctatttgatgcataatctccatcaacaaaaccttcaagttccaccttgatccctgccttcttaaatttcagaccatagtgagtagttgtctttagatatcttagtaaccacttgactcctttccagtgttcttcactagggttagacatgtatctactgagtgtaataacagcatatgctatgtcaggtctggtactaatcatagcatacatcacacttccaattgcttcagcatatggtacttctgccatttgtttcctttctttgtcatccttgggagattgacttgttgaaaacacaaaatgtccagcaagtgggacttttgcttctttagaatcattcatcttaaatttccttaagacagcttcaatgtactttccttgagtcaatgtcattttgttgtttttcatgtttctctgtatttcaatccccaaaatcttcttagccactcctaagtctttcatctcgaattcactattgagaacatacttgagcttgttaatttgattttggtcctttcccatgattaacatatcatcaacatatactagtagaaatgtagcagcttgtgtttttagctttgtgaaatagaggcatgtgtcatattttgatcttgagtaaccaaccttagtcaatactgagttgaatttcttgtaccattgtcgaggtgactgcttcaaaccatatagagatctcttcagtaagcacaccagttcaccattcttggattccaccttgaatccatcaggctatttcatatagatagtttcttcaagccttccatttaggaatgcagtcttcacatacatttgctcgatattccaatcaaattgcactgtaagagccaacatcattctgatggttttcattttaactactggggaaaatatctctgagtaatcaacaccttccacttgagtaaaaccttgagctaccagccttgatttgtataatataggttcatcatcagtcaatccttctttatgtctaaaaatccatttacaaccaattaccttttgtcctt

SEQ ID NO: 119292 - DNA, 1713 bp, Cannabis sativa
  modified_base (1651)..(1652): a, c, t, g, unknown or other
tgaacttctgggtttgggaattctatttttaaatgaaatcccttctttttgtctttaatcttgccttgtcggcatataaaatctatttttcatcttttgatccgtctaactctaactttcttgtctcccatctttttgtagatgaatcctggtgatttctagggaggcaagcaccatatcgaccaagactttctccaactcttgtacaaagatcatcctcaactccgtgcaagttcatcttcatctagtgataaccttttaaattctagctttgaatattgggaagtgagtagtgtgtacacactgtctccagagcccgaggtgcaacatcactagtacccagaccaaatacgtggagaagggtatgagcaattcatctgggagttaaagaaaggttgaaggtgttatctgcttgcttcttggatgcacagggtccagcccgcggttgctgacactctacccgaagcccgcccagatctatctactaagggaactactgttactaaattttccataactactgctaggcatacaactaaattgaacttggataagtgttgtgaaaattactctatgcaagtgcacacaattgtcaacaagtaataaagtgataagttgagtatcgtctccatagggattgaaaattagaaattagtttataaaactaattactcacaaattggtttcaacaaaataataaagtgatgagaatatgtaaaaattaacaaacacaaactatgagaagaaaacaagctagatttattaaattagactaaaaatacaatgttgataaaatggtgtaaatgagtattattgtaaattgataatgtcaattaggaatttaaaatgtcataattattttttcaaagtgtttatgttatgattctataaattaactaacatattcttacgcccatgtaattttaataatactaatttaagcacaattctttcaagtcatacaaggtaaataacatattcttatgtcatttacaaaccacatttttttaaagtgatattcatgcatcattcaagtaattttactaaccctattttttccaaaatcaagatcagcttgcaacttactaacgatgatcaagtaaaaataagctattacacaataagcactcttaaattaacaaaatcatttcactaaacatagcaacaaatatcaaatcacaatttctagtcagtaaaataattttagcaagaaaaaaaaattaactcataatagattgtgcaaaaattacaaaatttaaaagaaaaaagatatagaaatcaaaactcattttagagttgtcacaagactattttttttctccaaatttctccttttcttcctcttgattttgccaatcccaaaattaaaatgcaaaactaaaatcctaaataacactcaaatattcattcattatttgagtatttaagtatttgagtgttatcacacatattatcaaaaaaaataaataaataaataacactcaaataaactttttcttcttcttttttttttattttgatctctgtttctcaaggtttgagtagcagctgccccttctctccaagtcacgccttcctttcctaaaatcttagcatgcgttttttctccaaattcattaaaaaatgttccatatatatatctattctatannaagtgtgcctatataactaaaatttttggtttttgagaaatttatgggtgacttttaattt

SEQ ID NO: 119293 - DNA, 761 bp, Cannabis sativa
tatgttactacagggtcattggatagtgaagctggtatatatgctgctcaatacgatcttaccggtacaaggcttgttacttgtgaagccgacaagacaatcaaaatgtggaaagaagatgaaaatgccaccccagagactcatcctctcaacttcaagcccccaaaagatctccgacgattctagggttttccctttagctctttggttttatttttggaatgttttgtacttataacaatagctccctgttgttagtcccaaaaagaagatagttttgttgatttctgctaatgtaagattaattatcattaaagaaaaaaaaaaggtgggggaacataatggtcacacatgggttaaagagacttggtcgagcaatatgcatggttttctacttccaatgctacatggtgtagtgaagtctactcccccccaaaaaatggtgtagcctttacctttttaacttgatataattatatgagagttttgtgttagtaacactttttcccggtttcttttacactcttgaaaaagtagagtacaaagtaaagtgtaaaagagtattctcaaactcaatataaaaatctatagttatttttgttaagagtagtgttgaagaattctttcgtgtaaaaatgcactaataaaatttaattgaatgagatgtagatcatgtattgcaaaaaaaaaacttcctttttcacttatattttaattgagtaatgttacgagtcttgtcctagattttttttttttttttt

SEQ ID NO: 119294 - DNA, 846 bp, Cannabis sativa
tttagtctatataaatgtccaacatatattttatgtttttcttactaagtttgtcgactcacatatatactttcatgtgtaggtaaatgctaggactgaacaacagtgagtattggagttcggtaaagattgtacatatctagatggtcagacctggagtgttcagatcttcaggacaataagggttcaaaattgttagtcgttaggcgacattttttttatgttcacattcaaaaaatagattttaggatctcaaattttgtaaacattttacatttacaattttatctatgaaagtatttaattcttataaagttttaattaaacatgattttatatgcagctaaccttgattagcaaaggtcagcacaataattaaaaaaatcacagtagcgtgtctaaactattagggcattacaagaacgatctttttttcattacaaaataaaatagttattctaacaaaatggtgcaaaaatcattccattccattacatgtaacacaaataaaatggtggaatgacatttcaatactttaaaatgtaactaaacaaagaaatagaataaaagttatttcatttctattttattacctctaaccaaataccaccttaattaaaaaaaaaattacataattgactaataatttttaaaaaaaattacaaaaataggtcaacgcaatatattttttatttttacaatttgaattttattatttacaaaaatacttattcagtaaaaataatagaccattttttttattgttctatagtttattaatagttgttatgatattgtttctctagctatttttttattgttttagagtttatttatagttgtcgc

SEQ ID NO: 119295 - DNA, 875 bp, Cannabis sativa
aaacccagtaacctttacccaatgacttctcaatctttctgaaacctttgccggaatgaatcttttgaatgctgtgtttgcagtttgattatgatgattggctcgcagttcattctggctgtacattgtctgaggaatggcggaaacaaatgtattctgcagtttcgaagagaaagcgtgctcagccagagacataccgagatgagtgggacgatgaggatttgataatacaagccaaccaatacttcttaaaatacttcccaaaggaagtcaataatgaataaaaagtttcctttcttttctaaggatcagtaaccatattctcttctcataagattgggaaattacaaaaatgaatcagcacacaccaattcttttcaaggtgataatggatatcataaatattttgactattgagaacattttatgagatcattttggttgtaagtacttttactgtgatggttaataaagcaaaagcaaattgtatttttcgttttcccatttctacattggaaatcattttcttgctttttaggagaattttattagtaataataatatcattaaaaagatgcgaacaatagtgtcatttacctgcattgttctgggtctgtttggcatgactttggaagagctcttgaagtctcaaagctacttttagatatgtttgtataaaatatgagaagactttttttaatttaaaatagttttgcttttaaaaaaaataagggaagctatttttttagtttaatgaatcttttataatatctaatttaccattttttttttttaaaaaataataattaaatcacattcttgattgttatattacgacagattatttaatattcttctcataatgaaaacctaat

SEQ ID NO: 119296 - DNA, 1624 bp, Cannabis sativa
ataccatgtccagctttgtcgaaccaacccataacttataaaataagctactcaatgaacttattttggcgactcttcattgtcgagcacatcgagctttggtgagcttatgtcgggctcaactttcattcccttctttttggtgccccattgagccctttttgagctcttgtcgagatcaacttcttttctatgtttttggtactccatcaagccccttctcgagttataaaagaagatacatttcatttgaatttaaaataaaactatttttagttatatgatgaaaaaaaaaaacgggtatatttcaacttaccccttgcacctagagtccactaacctatgaagcacaatttttttttacatatatatttttttgaaaaacatatttttagtacttttcaaaaaacatttaataaaaatgaattctcactaaataacaaataccaaataccaaaaagaagagcaaaaactcaaatactacatttttttattattattttatagttctcacatacattttattttaataaataatataaaaaattacaaaaactaattataaaatataatatcgaatgatattaggcattttaaaatatcaaataataatgattatatctttaaattttttatttgataagttaatagagactagagagagagattctgattatgtcattattgtaataattctttctaaaatctttgtcgtaattaattcctgatttgaatcattaatattttttttttacttagttcaactgagaagtaataattaactaaaattaatttatatgagttgctcaaaaatttcataaaactttaagaaattcgtactgtttgtgttttgttctttggcttttaatttttattctgttcttgtttctttcatgtgtttttcattattaatggccaaatcaaattatttgttgttggaataagatttcaatttccaacaataacttccatatataaataaaatatatataatcaattaattaataaagccatatccctctgtcacacgtacgagaattaatttgcgccctaatttaatattaattatcctaattaataaaactatgtttttttttatatgaaaaataattatttctttaatagttatacaaaatttacatctcttttatatcaaatatatgattatacaatgaaaattgttattttaatattttttttaaaaaaatttcgttatattaattacagttaaaactaatacggtaaaattttaatttttttttgaaaaataattttaaatatctaaatttaatttatttaataaattataacttaaataattatagtttgggagtgctatggtgttgctctgctagtttttaagtggattgctatatatgtagattttagttgcaaagggtactctattagttgctatgtgagttgctattagatttccgtaaaaatataaataaactattttgaagtataaaaataaaaaacacaaaaaaataaataattattttttaaatagttataccctatgcatgcatatatatatatatatatatatatactagtatactgttacgtgcgatgcacgtatgttatgttttatattaagtattatattatgagttcggaa

SEQ ID NO: 119297 - DNA, 1556 bp, Cannabis sativa
tacatgtcaaagttcgaggagaaaaaaatcataattagccttttatttatattaattagatttactgtctttgtttgacttgtctacattttttttgtattttttttattttaatgacttattttatatgtattttaatgggattacgtgcctttatttaagttgcgcaaatattatattgactttttcttttaatgacatttttatttattgttgacttctctcactctggaggaattgtgtagaatttctcatataagtttttttttattattattaaagtataatttgtgtatttttctttgtaatattagtttattttattattaattttgtaataataaaatgtacttgttatattttgacaagggtggattttttggactgagaattagttggtctccaagtaatcaaagataagtttatttttaaataaaattagttttatctttatcattttcaattttgtgtgttttctcatttttacattagtttttttgtggttgtaggttttttttttttttttttgttttaattattattttaatacaactatcaataaaggaatggtgatttttaatgagttgggggtactgtttgaggatgttatagctttattgtctaaatttttggggacagttttgtcccatgttgctcgcgataagaattttacagcccatagtttgacaaaacatgcccttcggttaaacgatgagctattctagttcgaggaggtaccgctgcggattgtggattgctgcatcattattcatttgtgattttgatcaccacgttaaaaaaaaattgtcaaactaatcaatcacatagcacattcttacgtgtcaatatcgttattgatccaactaaatatcgtgtttcatatagattaatagaataacttttagggagtatagctagccaatcgcaagacgatacatcttgatgatgctagacaccactagtacccaatagcaatgctcttgattagcatacctttggaggaaaaaatctttatatatagattaaagagtaatgatagagacacctttattttacaccatacttttacgaaaagatctaaaaggcactactggtgcttagcattctcctcggtatcatatcactattggtgtaattaaatatcatgtcttatatcacttaagaaaataacttataaagaatatcgctagccaattgcaaccacctatagaagatgcttagcaccactaatacttaataacaatactctatttttacacatatacacgtagcatgtcatgtcatcatattttaaaaatttctattaatactaattttactttttatttatttgtatttatataaaaatatctcacttttctaactgtttcatatttttcttttctttcctttttttcttaaccgtattaatgggaaaagaaattgagtaccataacttataaataatttatataattaacataatttattaatatatatagggataggatttggtcccgttatgccaaaataggaaatacaatccctgattgtactgtagccgttggattgaattg

SEQ ID NO: 119298 - DNA, 683 bp, Cannabis sativa
catataggggtgcatcaatatatccattttaaaggggtgcattatagaattttccttaattattttacttacaggtgttaacatcaactaatgatgtatatttcatatactaccaccttttacaattttttgttacttttttttattatttttttaaatttgtatttctttatttacttatttactttaaatttatttcctaatcatagacaatttactcaactcatctttttattttgctctttcttttttttatctcttttatttttaattttaaaaagaatttctagccacattattattcagttgagttaaaaaaatatattattataatctaaaatttttaaaatgtgagaatatatatattttactatttctagaataaaaaaaaaaactataaaattactcatggtatcaatcatatattaattagttattattttttattttttttaatcttagttaatatttattttaaaattttattaattaaattatatcataaattaattacattcagacacgtcaattgtattttatttatgtaaataacgttaactttttaaataatgatgttgtcgagtgaatttcgcaacaccaaattatattattttataaatatgaaatagaattttaagggaaatgacaagtgcgagtattcaacctagaatggcgtgtactcg

SEQ ID NO: 119299 - DNA, 2739 bp, Cannabis sativa
attcttcaaacataaaaatgtaatatatagatattcttttattcaaacaataacaataattaacaacataagaatgagataaaaaaaatacataaacaaaataaactaatccatggatatcctattgatcatattattacagagttgtagtaagatctaaaccattgtagattttgatcatttttaaaaaaaaaaaaaaatacttcacaataagataaataatgatagaataaaaatatccatgaatgtattatatatatatatatatagagcattgctattaggcaccagtagtgtctagtaccaggatgttaggcaccacaggtgccctttaacatttctaatatatttatattatgggtgtatgcacatcccaaaagaaggtccataataataacaaatcaaaggaggacaacaataccctcccacactttcgtcgcaatataaactttcctgatcttcacaatcgttttgtagtagttttcgtcccatcataagcatgccatgatgatcggaaaccactctggataccatgcccggggaggctatggcaaatgaaacattattaatcacaaataatgttataagtaatagtacaaccaaaaatcttacttgcttatgcttcttaataatactccccatcttcaaattttgctttaactaactaaatatgattgtgtaattaagaagttgtgggattcatctttttatatagtatactccctgtcaattaaattattgtatgactttggatctaataattgatgtgaacaaatattaaaatatgactcaaataattaatatttaattaaatgattaatcatcaattagatccataatccatgctaccacacgtagtgaaattaaatgtgttgtgtgattcaaattagtgaaatttatttttcatcattattagttgatttaattaattttttcataatcggaggttaaaaatatcacaatgattttagttagtaatcttagtgagattgttgagataagttggttttagaattactgtgatatagagtgatgtcttttgacatagtcagttctgtttctctgtgatttttcaattgtcctgcccccagcccctctctaccaatcgtctttctctctaattttattctttatcattatggcttcttcaagtcgtacaccccatgagatagaggacatatgtgccaatctcagtctcgaagaagaagaagaagatgtcataacccttggacaacacctcaaaacagttgaagaaggagtcgataccagatggtgtttagttggtactttcgcccaggatcaccaaatggattttgacaccatacagcaccaacttgcatcattatggaaaccaggtatgggtatgttctgcaaagaattaggcctaaacagatacttattccaattttaccatgacgttgatataaacagagttatcgatggcagtccatggacttgtcttagaaagcttcttatcatcaatcgtattacccaaaaagatgatcctcgcactatccctctcaacaagcttgatatttggattcaaatatttgatatgcaacctggttatatgtctgaaagagttgttaaagatgtgggaaacaggattggggtcttcattgaatctgatcccaataatttcaaaggattttggcgaaactacctccgcattcgtgtcaccctcaacatcgaaaagcctctcagaaggaaaatgaagatcagtcccgaaggtgatgaaagtttctgggtctatttcaaatatgaacgtgcccccacattctgttttatttgtggaatcatcggacataccgaaaggttctgtgctaagttgtttcaaacccctcttgaccaaattgctaagccatacggaacttggatgaaagcaacaccgatccaacaaagtaagtatattggttcgaaatggcttcgtaatgtcggatggaatccggagcttgcccctgctggatcatctcttcgccgtgctgctagtgctacgcacatggccaccgattcagatgctgagctggatgagatcaggaatgtatcaggagttaattccaatcccattaatcatggagccaatcacaacaatgacaaagatgtcaatattaactatcctgttcttgaccctactcttactcaatctccagctgcccaactaaatgccaacggcatgaaaaaaggtctcattattacagatgttaagcgtagacgcaccgaggatatgactgatatcgaacaagaagacttctctaatgatgattctgtgggccaggaaactcttgtggatcaggttgatgggctaattcaaaaccagtttgacaatgggctttcaaaaaatggtatgttggcgagtttcacagatggaactcgccatacaccatgagtatcttaagttggaactgccgggggcttgggaaccaacggaccaaacagttcattattgagattaatgctcaaaagaggcccaatttcatctttctctgtgaaactctttgtaataaaaataaaattgaagagttaaaaattgctattggttttgagggggccttttctgtcgaggcccaaggccacagtggtggtcttgcattcttatggaaattttctgaagaagcttgtattcatgggtactctaacaatcacattgactgcactatctctatcaattcctaccctgagtatagactcactggcctctatggtgagcctaatagatctttaagaagaaatacttggcaa

SEQ ID NO: 119300 - DNA, 1360 bp, Cannabis sativa
gttagttagggtgttacagggacattgttggtttacaagtgtatttcattcttcatttattcacctagtagtgtggatgagtgacttggtcctatgggacttggactccttgtcctgtgcctatggatgcttgtccctaattccaactattgggggctttgtcgcatgatataccttagggttttacattctcatactggattttcctattgagtcatgcatgaggcatgtttcacaaatggtttctcaatatcagtgttgcatctacttccctccaagatggtgcgaacaacgacatatcttttgactagtattctttgttcttttttcatctccaagatggtcctcatctctatataaaatcttgtggttggatgtatgaaatgagaaaattctcttaccttctctttgcttgggctatcaactgtaataatctagcatcagcttagtgtgggttgattgttattactaaaaatatcctctacaacttgtcgaagtttaaggaccgttagtatatgggtatcgttcatgaattcctcttccgtcgatttccacgctcaactctcaaaagtgggtgttttttagacactaattatagggtatcgctggttgaatgtataaacatctttccatcacttgggatgtcatcctcttttgtcctctcaccattggtcattgtgcttatcataacatcatctttgttccctatattcaacttaatgcctctcatatgcttgtccatcgcttctggtctccttcttctctgtcgatgttcattcattttctcacaataacagatattatgattcatttattccctggtctcaaactaaagatcctgactttaacctttttaaattgatcaaaatgaacaatgtgagagggctcatggggtccctatgtttcctcttggcgagagtcaaatgaaactcttgtcttcttcctttcactatggcacgatggagaggagtgaggcccctcgtcttactaaggggcaagagtggagtggtggtagagctacatgtgtggatgtgggcatgaggtgcaggtgcatggagctgggtgtggtgcggggagcacgatacaacacgatgtgagcaagcatgacgcagggtgcaaaaagtgcaggtgtaatgcggggcgcgcatgtgtgacaatgtgcggtctatgccagtctttggtcttctcctcactttaaatattaagatctctttaggcttagtaaactttttggttgaattgtgttgtggtaatttacacatgaaagtgtacgtatcgtaacaagtaatagactcactaggagtgaggtcgatcccacaaggattgtaattaagtatttaaaattaaatcttttcttcta

SEQ ID NO: 119301 - DNA, 627 bp, Cannabis sativa
tctctctctctctctcgtctgaaactgtctctcgcctgaacagcccacatgcgacggcacatacaggcaacatcctccaagactccatcgagtgcagccagattattttctcgaccaagacccgacgtcgacagctccaccgtgactgactggtattcttcttttcttattaattcttaagctttattttgcatttgggtaatgagttttcacttttatttctttataattactttttacttttgcttttttctatttcgatccataatgcaaaagtaaaaaaatagttggttttttgctctggctttgtttgtttgtttgtttccaacagagatatggtcctccactttacatcttttcttttgaaaaacatccgggttcaaaaggaatgcatgtaagatttgcatcgtttgtatttttttataccatttgatggtacctttccagagatataggtgaaactgtgatttttggacatcgtttgtcttttgttttcatgttagtttttgttagtgctcccaaaatctaatttggtatacaattttttaaatatacagtagaacctctattcaagaatacacttggaccaagtaaattatattctaattgggaggttataactaaaaa

SEQ ID NO: 119302 - DNA, 648 bp, Cannabis sativa
  modified_base (551)..(560): a, c, t, g, unknown or other
atttctcaatttcggagattttatcaaactctatatgtattatttgtgttacatgtgaattatgttatttttatgaattttgctcaacgacgagggaaactgcgatggatagccatttgagtcacatgggtaagtctacaaccttttcctaggtgggattaatattaggaataaatagaataccgattttgagtgggtttatcgtttttgaccattttacccctaggcttcaattagcttaactgtaagcaccatggacattttggtaatttggcaagggagggttaggttgctggtgggttgagtgacgcctagccaattctttttcagcctaagatttacattaaattaattagagaaaaatgaattagttatataaaatcaacaaattctctctcttttgccttctttctcttcgaaccaagcatgaaccaaggaggattgctggtgaattcttcatttcagaaggattcaaggacctctttcaaggtgtaaggcaacttcaatagctttactcccatcaataaagtttgtgttgggttttatgcccnnnnnnnnnntccatttcaatgtaatctttatcttttaaatatcaatgaagaaacaaaagtattttcatcacttatttgtgtcatttggttcatgtta

SEQ ID NO: 119303 - DNA, 1299 bp, Cannabis sativa
  modified_base (36)..(47): a, c, t, g, unknown or other
cctattcccattcccattcctattcctattcctatnnnnnnnnnnnncccaaccaaacgcctcctaaaattaataaatgtgggaccgccaccgtggaaaggttacgttcgccgtattatagtcctccaatcacacacctacgtacaactccaaatatattattttcttttatttttttagacaaaacatttttattttttattataaagaaagaaatatcaaatatattttacttattagcaagtcttgtataataatttggataaactctaatcttaaaatgttgagttgtattgtaaggtatcagatgtgtcacattttaaccacacaatataatatataatataatatatgatacttctagtcttctagagacactagtttttattttattttattgtttaaaaaatgtacttgtttttattaataaatataaatacacatttattttgtattttttttattatattttattttgctgtaaatcaagacatttgttttgtctatttggcaataataattgagtaaatagcgtcataagtacccaaaattttaagtttataaacggcataaactctatgtttatttttagcggcataagtacccaatatttgtaaactgtaatttttttttaattcgtcactacaaactctgttattttcttgaacagaccacatataaaatctagattcttgatcattgggtctagacagaaacatgtagtatcatttacttccaaatgtttatttaataaattcaaaacggagtctgtactgacaaaactagaagaaaattacagttttacaaatatttgatacttatgccactaaaaataaacattgggtttatgccacttacaaacttaaaactttagatatttatgccgctatttacccataataatttaaaagccttcaaaatatcttcttaaattttttagtaaaacaacctaagtttccattgccaaaagaaaaaacacaacctaagttattaaatttaatataatagttgctccaaaataaaattattgtatgggataaaaaaaaatgtcaagatctattttttatttcttttttgaaatatattgtaactagatttataaaagttaaaagtacaagttactataaaatgttttggaatagtaccattccaaacaacctcatgctcttgtcataatgttctttttgctatgagatagaaaattatagcaaataatcttaaattacagtatttgttgcgatattttgcacacgcaacgtatcgtttcaagtaataaactcaccaggagtgaggtcgatc

SEQ ID NO: 119304 - DNA, 616 bp, Cannabis sativa
taattcataaaatcaaaagataagaaaatataattttgttttaaactaattaattattttttaattaatatctctaattatttatgagggaaatatatatattaaaagaatattagagataaggttaatatctttaactatttataagggatatatgttaataatatatgcttttttttttaaaaaaaaaaaagaaggattatatgtttttacaaagaggaaaaaaaagagagtggatattttaatgtttttttaagggatctatgctaatgttaataaaggatactattttagttgataactataaaaatatatcactattgaatactggttcagttgtactaaaatgataattaactttttatatttaacttatttgtaaaaaatattaaaaaaaaaaagagagaaaataaataaatatcgaatgatattatattgaaatttaagcttaaattcaaaccatatttttccaatctaaaataattagaatgagtataataaaattagaattataatttagtgatatatgatgacaaaaatatacgttgatgacaacagatgagatacagtaattaagatacagtgagataatgaccggaatataaaaataatgcat

SEQ ID NO: 119305 - DNA, 1027 bp, Cannabis sativa
agacactagaaagttattcaaactgaaaaagttctttacttgttttatctctctctctctctctctctcctattttggcttcaaggagaatcaggggtacagctagaaattctatggtttctttgaagattcaactaagttttgaagtaatttgattgaaggtaagatcctaaaaaccctattcatgatattcttaaggttttgattagtttatggttgtaatttgagaattttggttatgtttagatgaatcttgaccattagggatttttttttttttttagatttcaattaatgttttaggttagattgagttgttgttgctggttggttttgagattgggcaagttggagttcctagcatgttgagatgttgcgcttttttcctactattaaggcttaaaaactgttctggaatgatattacatgtattctggagagtatggttaaatttgggaaaagatttggttgagttttgaaatttttggatttttctagtaaaaaccggttaaccgattcccaggcaggacccctaaaaaattagatttgtcagcttgtgttatttttagagttctagtctggtgtttccccgatatttagggtaatgctatgttgtttattattaaggttacccttggttatacgtttaggtttccgagaaagtttatccaagttatttaaatgtgaaataggacctctatttagctcgtgaattttccattcaagtcgtccgacatgcttgaatctggaaataaagtaagataacatagtatatgtatatgtatgtatgtgaatgtatgctagttatgttattatacactaccaatactaatgtaactgtgaaacatagtgtataaaacttaaaggtatgtcacggtgttaccaacaccggtacgaggtgagtacgtggtgcatgtggtacaacacctagtggtaccgagagtatggttcaaccctaccaacactagtacgggagcagtactttagtgtatgtggtataaaggtcatacttctgttaagaacgttc

SEQ ID NO: 119306 - DNA, 2215 bp, Cannabis sativa
  modified_base (2164)..(2168): a, c, t, g, unknown or other
gtaaaataaattccaacagttgttcctcctgcgaaagaaaagactccaatcaacaagtcgacctcgctcgaaaaaccacttgagtaaagttgtgttcccacctttggtaggctgaactagtgactgcataaatgtggcagcaagaaccacaatcttcaatttggctccggaaccccaatttaaaacacaaaaggcatttgagtttgccaaatttgacttcactccattgtacctagcggctgccaatctttcatgtacaacaatcaagcaagtcacttggatctccacttctatctctccatgaaaaagagaaacaatcaagcttgccgccaaatcaacttcgttgggggtcgaccacggaataaatcctcgggaaatgattattttgcccttgtaaaaaacccatggaaatagcatactctgtctgaattaggtgaaacatgacaaattccgacaccgaatggacgttagtgctttccatggcccgattttgtttcaatagttgttgttctttgggtctccctttataaaaaatcatcctaagatattttctcacaatttgataccatttttttaattcccaaccagcaacaaacaaagagtgacaagaggaaaaattccttatgtgcttcctttggacaccttcaatggaaatttgttggtatccttgcctttgataaacaattggtgaaatactagaggaaacttctttctctggccataagttcacaacaacaaaccctcctccatttgcccagtaagctcggaataccaaataacaagagcaaaaatttccataaatggaaattaaaaattgattctactgccattgtatatcattgctcattaatagataatcccatgtatcgtaacccaaattttcaagccaaaaggaaaacaagaacatagcatgagatgtggccttagtccttccgaaataccttggtaaccatatggtgttgtgcacacttggccatgcaagatacttttgaaaagtaacttttctccctctgtcaaaaatccaacgagtagttggtgtatttcctttctctgtgaacaccagatttgaacacgaagccacgttgtcaaaatggaaaccttcccaaattttcttctctctcattaacacctctgtcaaaatgggatgagattgaaatagttgttgtagcaatttcattgctgccatcagatttgaagtccaaaaaaacacctggaaaatattcgtccgccatggatggaccgaaaaagaaatgatgaaattcaagaagcatggtcgtgtataggaagagattacgtgagggttctcattaagtaatacttgcttttcttttgtactgtccagccccaaaataatagataaatgggtttctcctaggcccatatcaccagcccattacttgggtattctttgcttaagtgggcccaatcaataatgtaattaaataaatttgggcttgtttatctgatatgcttttatttctctagtggaagaaggaaacaataaaggcattgtgttacgggtattcttatgggccagatttaaaaagttacccaatggattgggcctaacctaatagggttggaaggtacgatttgataatcttgaattctcaaatcatcttctacagtccgccgtcatgaaacagctcgcaccaggtacgggttccttggtgatcagcgagctagactcctttttgaccatcgctggccaacaaaagttatcctgtatagtgtgtcttctccggcaccggtgggcagcacaactcccatgagcttgacgtcgatagttgaccacgctgctcctccacctttaagcagcgtcgtgtctcacccatccaactaagaatctccgaccaacataatccgacatcggcgattgcttcatttttaacagcgtcgattgctagctggtcgtgctttccacgatcaaagagcttgtgagcctccattgacaataacagaggattgctttctaaccacgttgccttcccttgccgagcttgatgaatttcgggtggaaaattcaagctcgacttctctctgtacaacaccggtatcacctccagcaccgatgtcgtctccaaccctggtagctcaaccttcatctccggcaatgcaagcttcgtcgctagaataaattgattgttggaatatattttaccannnnntagatttactaccacgtatgttatttaacatcctacatatgaatttc

SEQ ID NO: 119307 - DNA, 923 bp, Cannabis sativa
  modified_base (887)..(894): a, c, t, g, unknown or other
atggtgatatgtattagtttaggaataaaatattaggtatatgtaagtatagaaaatcaaatttccctttctattccttttcttttttagccatcattcttaacgacggacccacatagaggcaagatagagtaatggtatgaaatttagttaatcacgatatatatttgtaataaaaaataatatttataaatataatattaactttagtgtaatatttaaattagattacatatgaaatttatataataaatagaagaaatgatcggtttaaaatagaaaataatcagaaacaatattttattatgctgtttactaaattatctggaaagaaaaacagaatcatattattttttttacataacttgaaatggaggaatgctttaatttaacaaaattatcattactagaacatgtaattattttttgtttataaatttttaaaagacatatttgtcttttttattttaattattaaaattgaaataaaaataaaataagttaggaaagggaaaggtaatccttgtaaaaaaaaaaataagggagagcttttcccttcattttctctctaatttgtgtggaccctatactttttcctttccaaaatttagtaaataactgtatgggaatcaataccatactattaattcacattctctttaagtaaacatgtcaatatggtagaagtcaataattcaatttccatcaagaatattttttttctttttaaatttacttttaccgtcttagtcatacaaaacaaaattatccctcctcactttaaatcagggatccacaattcattctcatctatcttcattggatcacatccaatgtttttatgcctatccagatccgatccaatcatatattggatgttagatttnnnnnnnngatccgatccaattaatttcgtcatccaa

SEQ ID NO: 119308 - DNA, 887 bp, Cannabis sativa
aaaaaaaatcataaaaactcattaaaataataaacataagtggaatagtgtgtattgtaaatggagttagtaaatacaaaattggtaattgaaaataaatggttgtgtcatttattaaagcagttaagtgtgattattaatatgcatcaccgtaggtattttcatgaaaactgaaatatcttattactataatcaataaaaagcctaaagcatgaagttattttgattgtagtagttataattttaaaacttaaatatatacatataccatatcggggtgggtattcattctcccaccctgtcccgtttttgactcgggtataaacattgaaacccatacctacccccgcaatggggtgcgtacctgaacccgcaggtataattaccatccctaatatgcggtttggtttgaaaaaatagctacaactcgcaccacccgcaccgcaaacacccctaatttacggcaatactacttaaaatatacaatacaatacttaaccccacaagttaaattttaggtaaaaccctccaaatttacattatattttgatattctaattttttttttaaagatgccctaagttggataaaatctcatggatggtcaaatgtgttggtggaaactgactgtgtcaatgtggtgcatgctatcaagagtaaagttcgtatgtattctctatacgacattgtaatccacgaatcaaaactcatttttattagaattgtttaatgttccagttcattttgtagagcgatttgcgaataaaatggcccacttcttagctagggacttttattctaaagctgattacatgattagtaaggagtctgttcgtgctaatttattgtccttacttttgaaagacctttaattaatggaagcaact

SEQ ID NO: 119309 - DNA, 853 bp, Cannabis sativa
gggttcgagtctaggtcttggtcccaatcatggtctaggttcaggttcgggtccttgtcagggtttggatcctggtctgggtcgtgggtctcaggttccagcgagggtttagaaccaggtcgagtttaggtcccggtctaggttcgggtcccaggtctaaggtccctgtcctaatcaaggtccctgtactagtcaaggtctctgtccaagttcttatctcaatttgggttatggtttgggttcggttctgctctcagctatgggttctagtcatagttccaattctgattccgggtctgggtttggttctgggtccgggtctaggtccaggttgtggtctcggtctgagtcatagtttgagtccgtgtgacgggtttttcacattcgtgtctcgagtcagggtctgcgtctggtggtccagcacctgtgttttgatccttgtctaggtctgagtcggtattcccgtccgggtctggattcgtgtcaatgtcctggtttgaatcccagttgaggttaggggcatggtctaggtccaggatcgagtcccgagttcgagttcgagttcaagttcaagtctcaatcatagtctgggtccgggactgagttcgagcacgagtttcagggctgggttctggtctttttttaggtccctgtcttgctctagatcctggtcttgatcatgttccaaggtcttgataacgttttggttcaggtttcggttttgggtcctaggtttgggtctgggtccaggtcctgcttgagcttcgggtccttctttgagtccccgatcaagacaccgactatgggtattgtccaagccccggttcctagatcccaggacaagatctggatc

SEQ ID NO: 119310 - DNA, 500 bp, Cannabis sativa
  modified_base (447)..(447): a, c, t, g, unknown or other
acttagttgacgagttctcattgttaataatttggcgccgtttgtgataacgacaaactttggaaaagtggtttctctacacataacaatttcaaaatccctagacactcacactgcctctgctcacactgcctctgagatgttgagatttgccttgacggtaatcagttggatgccgtaggaaaagatccacctccccccgtcactagagaggaaggtgttgataatcacatgcttcagtcactagaagaggatgtgaacatccatgagcctccggcagaacaagaaagtcgccgccctgtggaagctctaactggcgatcaacgtgacggagcaacaactttgataaccattgtaggagaagacatgttatagaggcaaagaatcccttcaccgatcagacatccaccaccgctgacaccgaaagtgttggaaatttattttacnaggatcttacatctactcacaagtatgtttattaacatcctaaataagaactt

SEQ ID NO: 119311 - DNA, 1288 bp, Cannabis sativa
  modified_base (620)..(620): a, c, t, g, unknown or other
tatttttgaaaaaaaaagttttgtctttccttttttgtttattttttcatactaagataaaaatgtaaattttggatctaaaaagcctattaaggaaaatatcccataataatattaccccacaagggcacaacccatccaattattaattataaataataatgttttattattttaataaattattatatttttaaaataatttttatatatatatggtacaaaacaaacaactaacacctcccccattgaattatgggtgtccaaccttgttttgacgtttcttgcctttttttaaaaaaattaagagtccatcgtttcattttataattaaaataaaatatttcaaatttgtaatatttaaatcatatgtatattaaaaaaaaaaaagtaaataccatgttagatcccgtattttgtaaaagttaccgattggactctatgttttgttaaataataaaatagactatatattttctaaaatagtaaaaatagaaccataagtttaattttcgataactttttttttaataaccaacttaaagacaattcctaacataaacagatacaaaaaatataaatagttttatcataacacttttagatcggattattattanattttattttaacaaaaaatcaatacttcaaggtcctatttgtgccattttaaaaaatacagagttcaattagtaacttttacaaaacacatagtccaaaataacaccctttaaaaacttatgaaagaccttcattcattaattaggtgcatttagaaaatggcttgtcttgcctaacggcttaactatatcacaagaaggtaaaatcctaatctaattagcactcatttaatttgttgacactaaaaaaaaattaaattaaatatttttgttcacactaacaaatttaataattttttgttagtttgattattaatgagttctctaagtatttttctttttaaattacaaatagtctaagaaaaatgttaaaggacatttataatacgagtactatggtgctaatattcagagtcgtccctagtattgatgagtccaataattttttttgttttatctaaagtgaagtttaagagtaactccaaggagattgcaaattagtagtatggtgtgtatatatgttctaaggaggttgcatatcatatcattttataattttatctacagtgcactgtagtcacgacatcctttttttttaattgtttttataatttaattaatatttatatatatttatattattgttgtaaaattaagaattatttttt

SEQ ID NO: 119312 - DNA, 854 bp, Cannabis sativa
aaaaaaatacaagtacccttttaccttaaaactatatgaaagtatgatttttttttacaaaacaaataataataataattgaaatcattcatactatccctatagttttcatttttcctatagaaagattgctactaagtaaagtttacatttttaatgatcaaatttggcttgattctttgttcaccttgagaaaattggggaatgaaaatgaaaacccaacacaaatttatatacatttatataaatatatatataataaaaagagaaatgaaatgttacctatgaagagatgaaaagtagagaagccttgccggagaagagaatatgaagagacaaagctctgtgttttttagtaactgaacaaagatttataggagaaaaaaatgtttgagaacgtgtcttatttaaattatatttctaataggttattttacaatgcaacttttattttcgatattttaaaagaaaattagtttgattttttttttttaacacatcctacaaaattttaagaaatttataaaaaattaacacgcttaaaatatggtttaaagaatttgttgcacgtgagacttttttattttataccagtgtgaaatagacgatttgaacattgaattttttataattgtaaattattctgaatttcttaaaattttctaaaatatcttcaagatgccgaaatagttagagttgcatcagtacatctattttagtgtgatgtgcattatatttttttatgtcaaaaacaaataatttccaaattttaaggattttactactcactaagcaattattatcattaggctaattagtaatttttcctcccgaactttgacatttactaaatc

SEQ ID NO: 119313 - DNA, 906 bp, Cannabis sativa
  modified_base (449)..(452): a, c, t, g, unknown or other
ttgcagttaactctgcatagtccacgagcctatcttatttaaatatgtttgaatacaagattagggtttttacaattagtatactcccttttctctctaatatttttcctcccttttttctgtaaaatctacccctatttatagtaacataggttggcagttaattacattcaaattcgaatcccataaaaatattcctcaaaattatgggcttttagctccatttaagtacgtgtatataatattagaaaatcacacaactatgatttaaaccttcttgaaggcggtcaacgctgacatagatagaaactcccttccagagatatctcgctagaggtatctcgcctcgtacatgtatgacttggtttattcataagccttccggcaatggcatgagcactagtgtactaagcaaacttaaggactactctttgaccataaggccttgnnnnctggacaatcatgtccttcaagttattacacttagttattataatatgtactatacactaagtgttctaataaatgactcgcctcgtcaatgccttcttatacgtagcgagatctatctcactatgcgttatctatggcccctacaggatttttccttttgagacaacatggtttctcgtcaatatagaaattgaaagtttgtacatccttgtctctcttaagactgtgcagtcagtgagttataaatatactctatttattctatatttaatgagttattgcattttgcatttaatgatatgattaccattatatttgttgattcatattccacgagattgacgtgtgtcacctcctgaagtacagttgaattttgggtataacatatatttatatatgttctggacttagtagaatttatacattaagtataatcatgaaatagatcatgtg

SEQ ID NO: 119314 - DNA, 752 bp, Cannabis sativa
  modified_base (684)..(707): a, c, t, g, unknown or other
aattaatcacaaccatttaataataatcaaatggcttaaaaaaatgtaaccatgatggttacaatacaaatgtaaccattaaaacttcttccatatatgtatatatctttctacattatatatttaatttgaatctccaaatgatatattagtcttgtttagcttctataagttctttttcagcttttaaaattaaaaaaaaaaattctacatgtatttggataaataataaaataaaaaaaattaatttagaagtcattttagaagaaattatgatttttagcttctcttttagatttttgagaaactattttaaaaattaaaataatttatataattcttaattttctacaaaagattttttttaatgatatctaaaaattttgaaaaatattttttattgaaaaaatatcttcatataataattatttacagtagaaataagacaaaacttatacttctaactataaacaaaagtaaaaatttaaccaaacatgactaatatttggaagtttaaaatatatcaattatctttgagattatccaactactatagttttgtcaagaatgttggaagttttaagttttcaaagagttaattcatgaaataataaatgtgacagaagaaaaattataaatgtatatacaagagggaaatattatatgtatatataaatatatatnnnnnnnnnnnnnnnnnnnnnnnnaagaatacacttgggactaagaaaataatattctaattgagaggt

SEQ ID NO: 119315 - DNA, 1991 bp, Cannabis sativa
tctctctctctctctcacccactactgctcttctcatatttgagatttgctaactctgattcctacatcgtaacctttagagagctacttcagatcccatctataatcatctcagtagtattaactctcggtatctatacaactaaaagagagtaggtcattacctgctaactaagggggctaaatctctataaaatttggtattcagctactttatttttcttgttatgtaacatgtgacaagcatcaacataaaatatgactccattgtcagttggccaaatctgagatcaacaagtaccacatctttaaactaatgtttaattttaaatttgaatataatatttttaaattaatatatatttaaattctatttgaataatttagtgaaatatataaacatcttatataaattaatctaaaaaaataaaaatatatatacatagatatttttagggaaatttttataaatatacattttatatacattaataatataaaaaaaaacgttatataaaaacaatgacgtaatataccgtgccacgtcagcttccatactatgaccacccattaatttagaaccagaagcaatgaaagagacgcgcccacaactccacttttttcagccttccctacgcgtggttttcaagattaaaatagaaagctatatatatatcatagaaatataataaatgaattcaaaaaacaaaaactaaaatagattgaacgagaaaactccattgacggagaactcgatagatataaaaaatggagaagaggatacaacacagatttgttgctgtatacaacaagcaaatcatcatctctctaaatcgataaataattcaatcgatcaataaacgtatcagctgatcataaaaaaaaatagaggacgttgcttcgaggaaagagaacaataatttcaacttcgacatcaaaaattggatctcaaaattacttaaaaaggtaaaatataaaaataatcatgaattgtattccatatatacgactacttcaaaatcatattttgacattgtgcaattcagaaactataacacattatacaattcgattactaaaaatagttaaaaatgcatcatattaatataaaatcactttctgcaatcatgtatacttttttaatgattttttaactaaataaatatgatgtttattaattttgttaaacacgattattttaggcttaacaaattaactaatcagtactaagtacatttacattaataataaactataaacctttataattgtaattgttcccctattatagttcaaatgtatgctggtcacttgaattgctgaatatcaaccttatagtatatggtaaattttagtttattcgtactacacctattcacgtcacatacggataaattgttactgtatacagaacataacatgagtaaattaaaaatttacaaaaaaaaaaaaatcacgcaagaatatggatgttagagtagtgattttttttttttacaatggaacttagattgacagaacaacatacgttgactatgaagttgaatgtatactaatgccattagattgttcatattatgaactttctcacataatataccaagctttgaagttggacaaaaccaagtatgagattgatctccaatttcaagtaagagaaggcatacctccaatttcaagtatgaactactttcttttcatttttcagtgccaaaaaatgtgagtttgttaagttatggtttatatgttatttcaaaatacataatcatgaaatctttatggataaacaattggaaaataaaaagagattattttataacaaggtacaaataatgaaaaacattttatatgaaaatgggccatattctcaaggaatttaatgtgaattaatttcataccatctatatatttatataatgctgttgtttggacagatgacgtggcggcatatatgaactctctttatatttttttattttcttatattttct

SEQ ID NO: 119316 - DNA, 1852 bp, Cannabis sativa
ttttttttttttttttgaaactttctcatcttttcattatttaatttctctgtttttttcataactgaaaattttctcactaaccaaacagacctcttcccatatatgaatttttttacgttacgttctctttaaagtttaaactttatcaaaactaactaaaaatttattactttgctctgttttcccataactgaaaaatttctcatcttttctttatttaataactactctgtatttttcgcactaaccaaacagaccaattccccatattgcatttcaagttgttcaactttatgttcaatcaactaacaaattttctcactttttctttcctcagctccaaaacttcccatttttccaaacagatcttcatctcatcacaaaacttattaatttagaaagtttctctatcttttctttgtttcttatttactctgttttttcccactaaccaaacagacccaattcccacatatgagtatttcacattaaattaaccaaacagagcatttcatataaaacaaacttattacttttctgttattcataactgaaaattttctcacattttctcacatttcctttctcagattccagaatccacgtggcaagcatcggagtcggaataaactacggccaaatagcaaacaacctcccatcaccgtcacgagtctcaacccttctccgatcactaaacataaccagagttaaactctacgacgccgatccaaacgtactcaaagctttctcaaacacccaaacagatttcacaatcggactcggcaacgaaaatctccaatccatagccaataacccaatcaaagctcaacaatggatccaaacacacctctcaccttacttaccccaaacacaaatcacctcaatcgtagtcggaaacgaagtcttcaacctaaacgacactcaattaatgtcgtctttgtaccctgcgatgaaaacaatgtacgatacattagtcaatttggggctaaattctagggttagcataacaacagctcattcattaacaattttatcaaattcatacccaccttcaaatggtttattcagatcagatctagctcaatacctaaatccaatcctcaatttccattcacaaactaaatcaccattcttaatcaacgcttacccttacttcgcttacaaagataaccctaacgaagtatctttagattacgttctcttccgtccaaatcaaggaatgaccgatccaaatacgaatctccactacgataacatgttgtacgctcagatcgacgctgtttacgccgcgatcaaagccttgggacactccggagtcgaagtgagaatctccgaaactggttggccttcgaaaggtgacgaaaacgaagctggagctacaccggaaaatgctgaggtctataacagtaatcttcttagaagaatcgaacagaatcaaggtactccggcgaatccgacggtaccggtggatatttacgtttttgccctttttaatgagaatatgaaacctggtccggcatcggagaggaattatggactgtactatcccgatggtactccggtgtataacatcggattacaagggtatctgccggagctggcattggatacttcgtcgtcgtcatcgtcttcttcatcgttctttggttcagtttcttcttctgttattattcatgtaagaaaattggccttttttaatttattttctttttttatttttctattttttgtttattttgaataaatgataattttgattcaagtaagatattttatttaatttaactcaatttttgtttgtattatttataaattttaataatatttttagttagtttttttttttttt

SEQ ID NO: 119317 - DNA, 860 bp, Cannabis sativa
aaattgaatcgaaaactttacagtaataggcgagccagtgttgagaactttctgtcctctaacaagaccttcagtaccatccatagcaatagtccgaaccatattctcacccaagtgctgagcaacctcaagcaccaaacggatcgagaagccctgaacctcaagagcagtcaagatcggaggcaatccttcgtcaaatctaacatcaacaacagcaccaataacctggcaaacttgaccgatcgaaccagcaccagtaaactcatcagtaatcttaccacccttgacagcatccttagcagctggtggagccggagccgaagccgctggagccgcagcagcagatgtggcgtattcggctacgcgattgagaaggtaaccgtgtggagaagcagcgcgagcggtggttggggaaatccttggagttccgatcggtgatctgcgtacggcggaggatttgagaagcgaggataagatccttcgcgaagccattttttgaaaagagggcttcttcttcttcttcttcaatggaggaaagagaaagagaaaagggactagggtttgtggactgagtttcgaagggttatatatatgtactgatgcgataatctgcgaattttgttgggagttaaacggtgtcgtttatatctgcgaattttgttgggaattaaacggtgtcgttttgtgtttcgttttagcagcaagtacatagatccaatagagcattgttattggtgcttagtatcttttatagatgtggtcttatattagtaactagtaaacaaagccgcgattcgcgcggttttaaagcataatttaaatatatatatttaatatcatatttatttaattaattataa

SEQ ID NO: 119318 - DNA, 2482 bp, Cannabis sativa
ctatctaaaccatataggtactctcgtcctatatcgaaattcaattctattctactatagcagtaaaaatgcttcaaacacgattaaaactaaattcagaatatactaaaattaatctaaaattaatactaaaaataacctaacagtggtgcagtcctaccaacaatagtacgggactagtatttagtgcatgtggtacaagggtcgtacttctgtaagaacgttcttgattcatctaaagccttataaataggtgtatgtgcgcttagatacaagtcggtaatatgttatatgttttgtacttttcttattgagtctgtcgactcacagatgttgtttacatgtgtaggtaaatgaaaggcgaaggctgagcaatagttagtccagagcttgaggatgattgtacatatcaagatggttaggcctggagtgtccagtctcaggatgacttgggcctttaatttgtagtcgcggagcgacacttttataaaatgtatcttgaatattattgtaaacttttacgataggatcccgacttttatgtacggttatatatttataaaaagtttaaagtttaattaaaagtttaaatttgatatgcgattttaagaaaatcaatgtagtggtcctcaacaagtagggcggtacaataatgttcttctctagtagaattagaggctcacaacaacatcaagattaacaatcttggatcaacaatacaatcaccatctcaaaagatgggtacataaagaaaaagtttgggtcttaccaaatgggtattgtaaaaaaataccttaaagatgacaatcgcctaatcggaactgatagattggtagagcaacttgcaagaattcattgcctaaaatttgaactaaaatgaataagaatcaaccacttgatcttcaatggaaaatggcgaaacccactttctctctctagctttcttctcttatttcccttttttttttctttttttttttcttggttgctatttcttgttcttcacgatcagctacttctctctcttttttttttttttttattgtttcttgagactcttataaaatactggaatttgagttaaattttataaaaatattgtcacatgatttttttttttcaaaaatattgtatttttgtaaaacaacaatggaacacaaaacagaacaactaaaaacaatagtggaacaactaaaaaacaatcgtagaacaacagtaaaaacttaacacttgcctcactataaaaaagtaaaaatattgaaaatttcagtatatggtgtaaataacccttatttctttaaatgtgttagtgtccttatttggtacaaggcccatcaaaaggggcggacccaacagttttaatatagttttaatataaatacgtgtgataaaatagaaaaatgtaatttttataaactatctatatatataaagtagaagtatcaggcgatgatatggcggtctaaaattcttataaacacatatatctattttcttaatttatctaattttttattcataattttttaaaactattaattaataataataaaaatttaaaaatttataacttttaaaataaaaatacattcgctaaaagaaaaaatctaaaagaaaaaaaaatctaaaacaacttataaatctatctatgttattattattttattttaatataagcaaagtaataataatctaaacctaaaatatatttgcatcttctttagtggctctttatttttttttttactctctttttcctgatcgtttatctttctcatgcactcataaatatattttttgataataattttaattatgtatacaatgatattagagtgatacataaaaaatcgtatgattttattttataacatatgctcaatatgccaacatgcatactttcacgtttgctcttaattaatttttttttttttttgtagatagcgtgatttctttgctttattatatttgtaacatattattatgttatgtattatcataagttaattttttttttgagaaaattataaattaatctcttatttttattattatctaatattttgtgataaatttcttataaaattttctttttgtgagttttctaaaaaatttcaatttttaatctttccatctctaatctctatactatttgattatatctcttaattattttgcctagaaaattataactagcattttattatatttatactattttattgcttaaaaattatatctaagcattcttgaataaagatttatcagttctttaatttttttttttaaattttttaatattttcatcatttttttttttctatagactagatctaacatctcccttttctctagataattaaaaataaataaactatataacatgtatgataactaatgattcacttaggtggcgtttggtaacacttttattttttaattttaaaaacagaaaaataaaagtagattttttgtttttaaa

SEQ ID NO: 119319 - DNA, 1724 bp, Cannabis sativa
  modified_base (1512)..(1513): a, c, t, g, unknown or other
aaattaacaatattggaggtcaattttcttcttttggtacaaggatcctattggatgcaagaggtggacttaatccaatttgaagcagtattgaggcaaaaccccttctgatgggggttcgggtaagtcattctcaccttgaatattatgtcacattagagacaatgcgaatctttagtttggggggaaggatttaagagtttttatgttttcactatctttgtttttagtgggttaattagtttagttcaattttagtttttgagttttcatgggttgataatggagctaatgataatatattaattgaactgttgttgtttatgtgtgcaatttcttagaatttaaaccgtgtgcttaattcataaactctttggattgaattggatgccttgtgaaaattttttgttctatagatgtaaattattgatttttggatggtatcacttttgttctaattgggtttgtggaatgtttgcttgacatggaatgttctgctgttaacctcgcttttagccaatgacaatgaattaaattaaaacaattaagaataattaaatataaaatatgaataagattacgtaaagaaaatatcataattatagaggtttggccccttgatgatggtgaggtaaagaccgagaagtccttgatctcccttgaaagctcttacaatgatctatgagtttttacactcttaaatgtataacactttcttgtgattctctcgtgtgttttctctatgaattttgtgtccctgaatggtgagatgattccactacttatagggatgaattacatcaattagtttcctaaaactaataagaaataaaaagaaactatttactttccataattacaataaccaaaatgggtgacaggtgtttggtttttactcttgatctgacttgactgattaagcgtttcttcgatatctagagcatttaatgccttatcttggaggctgaacctcgagacatgtaatgaattttgaatgacaccgcacgcttgacatttgccttttttaatgaatactaacgttcctttaggggaaaaaactcaaaaatttgaattttaaattactttcagcctttaaccacctatataaaggatggaaattggttttacactcttatagccatttttatgcttgcataaccagagcaaaaacctttatttttctcttaactcttcaaagaactttccttgaaatttcaattgctgaagttgttcgagcacactcaagtaggggtgcacatgggctgggtttgctgggttataggtattttaataggccaacctaataattgcagtttggataagctataaaccattcaatttttttattgtataacccaaccttacttagtataataatatagggggtgggttgggttgggttcattgggttgagatgaatattttaaattttaatatttatgttacaaataggataaaattattcaatctagtgcatacacaaaaaaattatgtgtgtgtgtgtgtgtgtgnntgtgtgtgtgtgtgtgtgtaatatagtgcttttaaaaaaaaaactaagatggtagcggtatcattgtgtgggtagcaaagttaataatagtgatcgattcccacattagacttattggtggaagtagtagggtaactatagactacatgttagtgatgtgttttggttaattcacgttctaaggttatcacaatataatttatttatgtat

SEQ ID NO: 119320 - DNA, 2222 bp, Cannabis sativa
caaatgtttcctctggctctaatacggttctgtacatttttcttatttcgtttaaaccagtatgggcttgatactactgagtttacatacaatccaaatgactcgagtagattcccgcaagctaccaatcaaccaacagaagaaagaagccgttgcgccatcatgtgagagagcttaagattttaaccgaaccgaaagtttaatctaaagttggtgtctgaagactgatcaacgcgaccatggtttgtaacctcgagcatctcagaattcccttcatcgagtttgtgtagaacagaaaacagtcgagtccttttactgtattggtgtgtgtataattgtgttgttactttggtggagtcaatttgagtatatagcttgttattcaagtggattccactttgagcataatatgaaatttaaggtgcatttatgagacataaaattgattttagaaggtgtttaattgaacatcattttatttttcttttttatttgtatttttctaagttttcagtgttgcagttttacagggcagaattacatttttttgggttgatgtctgttgattttccatcttgaagtgcgcatcagtaattgtaatgaattggctcaaccgcaatgctatttttgtcttctttgttatgaaaaagagtaatttggggtataaatatgggtaaatttaattttttacagtaataatatttaaattatattcttgaaatttttgtaggtacgtaatcgttaagttcataagttgttattacgtgtcatttttttattggtatatttattttaacgtttaaataaaaaataaaaatttaatgatctagaccaattataaattgtcacttgataatttacttgacacttaacggttaggtgtttacaaaagctttaaaattataacttaggtattattacttttaaaaattaaatttaggtatttatttgtaattgatagttaaatttaaatatttatgccgtaaattactctatgaaatattgatcttctagttgggtaggccaatttggttggtatatttatccaatctaatcttattttatttatattgtattcgattcataccattttggattagatgagttacatttgtaatattacattatttaatatttattaatttattttacttataataaaataaattattattgttttatgtttttaacaacaaattaaaaagtatttcccctccaaaaaaaaaaaaacaaattaaataaataatacaattatttttttttggaataaagtataatattttattaataacaagataaaataatagcctccaatctaatcaggacatctccccgttgtaaacacgagcatgattaaaattagaaaaacgagtcaaatattcaattgcctaattctaagatcgtttgacaaaaaaactaaaaataaaattagatgaaaagattgtagaccttgataacacttatattctatttcatctaccgcttagaagagataatagttgaaactgttgcagcaggttcattcaacatcatagcttgagtactcaactattgtgtaaggtatgtaactgcactaccttcagtcgcagagaaatgttattcctaactactaataacgatttgatagcgagccatcgaataataaaaaagaatcaacaatgaaacagaacaaaactatgtcatagagacaagactaaaacacttgaaattatgtcacaagattaaaacactcaaaaccatatcacaaaaacaaaactaattgcaatagcaaaaatcgaattagtagcaaaacacaatcccaaccaagccgcacctaagcccaaagaaggtggtaagcttgatcgaacaaaaaagacgacctctgatagctatagatttaagaacaagaaactctaattttctcccacaaaataagaaatattaatgattcctctttaaattaaacaattgttagaaaatgttatatgtaaaaataaatatttaattttaattttactatataaaaatatatacatttgttatattaaattttaaaatgtatttatattatatatattagatttttaaattattatttttttactttaaaattttaattataaatataatttcttaaatatatacataggtgttagttggattttttttttttgacgcggtgatccagatcacacatgattaacaaagcagcaatccataatcggcggcggcacctcctcgaa

SEQ ID NO: 119321 - DNA, 1886 bp, Cannabis sativa
  modified_base (843)..(846): a, c, t, g, unknown or other
tctctctctctctctctctctctcgtcgccatcaccagccaccaccgcacaggcaacccatttccaccaccgcaccaccaccttcctcgctaatcttcttcttcttaatttctccctctaaattttttctctctctctctctgtctctgttttttcccatcgacaccaccactatctgagcaacccctttccaccactgcatcaatttatagtagttcactccctatatcacgatactaatggagctatgtcgacttcgaatttttatttctcaggagatggtaattacaacaatagactaattgtcagaagctccaaattaattctagagggagaaaatctagagagagaagctctaaccttatgggtagttttctgaatgtgaaaaatgagctgaggaaactctccttttgtaggtgaaagaggccaaaaaaaatagtgggaacatacaaataatatgtttttgactattgatgatgatctaatagtgaaaattatctcttggtggtgatggctatttttttggagcccgagggatcccgctgcgggtaaccgagagcttatttttgtaacttctttgggattaattttgacaatgatagcttcagaattaagactaaagtgtgacacacgacttgatagatcatcaaattagcttcaaaatgaaatttgaaccgcatcaatcagattaaaattgagtgaggtatgactattttactgaaggtagttcatgacccaacgcccaggttgacatcccagtgcctaggttgacatatgacatcaacctagatgttgggtaagtgtaaaaacatccaaggaatgtactttaagatgcctaagtgnnnntttgacatcacttagtctatttatgtattttggcgaagctggtcaccgattttaagagatgttactgttttgcgaaaatgaaagactcgaaacttttatttatgggtgagctagaaatgagaaatgcaaagttttgaatttgatttatcagactttatggattattttcattgtggaaaactagacagacggttaaaacgacattagattttgataagtagaacccagcgcaccaggtcttttatcaacctaggcattgggaacatactctcgagctctagggattttgttttgaatacttccaaggcttcttaactttaggatgaggtctcgtctctagtttttgaccatttcgagtttaatggtcgcatcaattttggcatttgagcaattgaaggcagcatcctaggttgattgtcaacttgggcgatgggccctatttttagggactcaggattattgttttctctccaagtttgcttgaatcttcgttatttctaatgatggaaaaaattcccgtaacaatttctactgaacttgatcagagacagctcaggttgacaatatgacaacctgggcgctgggtcccccttttgccccatcaaaatttattttggtccctagaaatagttgaatctcaatattttctgaaaactgagaagatgctcgaaagaattcttgaaaaaatccatttgaaatggcctatgttgtcaaaatgtcaacctgggcgttgggctctattttttgtacggaggaattattgtttttccttcgaaagggcctatttccccatttttaatgaagactaagaagatgtaaaagtcaaatctctgatttgatacttggaaggtgcccagattgacagattatcaacctgggcgctaagtattagggcccccagggcccccggtgctcataacttaacttgctctgattttgattctaatgcctcgaatatgtctgtggtatgtctagttgatgtcccaatgcaacttttgacccttttgcactaagatggtcctgaaaactgaaaccctagt

SEQ ID NO: 119322 - DNA, 673 bp, Cannabis sativa
  modified_base (27)..(30): a, c, t, g, unknown or other
atcagattatattgaaatgggttttannnngggcataaaatcccaacaagtttacagtgcgattgttaattttatgattggtcatttggttattttcttttattctagatagaataatagggttgttattacccaattattattagaaaatttttggttgatagtcattgatagttgtgatttatcatatattcattttgattgaagatctagctttcttcacggttctttgatgcttcaatactgacaacttattggtcttttagttgaaaatattttcattcttatttttgtaaatgacatggtgtgccaaaaactttcatatctcatcaccacttttttctcattgtagtaaacacatttaactctgtatatatgatttggaagttgtacttggtaggttttggaggagcagatatcaaacaagtggaaaaacatatttgtgcaataaactccgtcaatcccacatgcacttagctacctgtaataacacacatagactaaattttaatgtaaatgggtgcatttatttaaagataatttttttaataaatataattataataatatacctatagttatcacatgattcaaagtttatataagtagccatgtgttggaaatattttaccaagtctagatttactaccaagtatgtttgattaacatccta

SEQ ID NO: 119323 - DNA, 802 bp, Cannabis sativa
atatatttaatttttctaaggaaaacattgaattaaatatattaatattactttccaagacaaaaaatcttaattttaatgaaccatatttgagacatgtaatctcttcttgatatttatttatttagaatatattctttatgagttgtgtgaagaactgaaatttaagtttgttactcactgataatttggatttatatgataggatattatttttgagcttaatttgaaaattcaacatctctttttctttttcatctacatggggatgaaattttacaaatgatttggttgaagggcaactctcttaatttgattttaatttgtttgctatgtatatatttggacgaaaagatttatttttctatgctaatcgagctgcacattttttgtacgataatctcagtggtatgcgtgtcatatatttagaaaaagagatgtgttttgtgaactttattttattctttcaagcaactaattctaatttaatgaaaatgaactttattgaaacaaaaaatctactactttaaattttgtgtacttttatactttcaattatgtgtgttatcttaactctctctttttatcaattaagaatttcagtagaaattatacaaaagatagacaatagaattttatattaatcttattctagttgataattctgaataacaaatcaaaaagagtattaaagcaatcctaccattaataactactaattagtaatttttattgggcttttacactacatattgaaatttgggctattttaaaaaatatgggaaaaattattaaggttatg

SEQ ID NO: 119324 - DNA, 1007 bp, Cannabis sativa
aatggtatttaccctttttttaatataactatcttgaacataatttctagcacgaacagatacagaaaatataactaattttgtcataacacctctgatcagggtactatttagtactattttaaaaaatacagagtctaatttatcatttaacaaaatagaggatccaaacagtaaattttgcaaaacagaagatctagaataatatttaattttgtgcctgaagtaaaatgtagtagttgtctattattataaaggttttttttttgaagaaaaaaaaaacaatttttataatattttattatgacactatgtatcatatgtattatgtaatatattgtagcttatgaaagtgctcatataacttcaaaagaaagaagaagaagaactaaggagacaaaatgaatgatttttcaaatctgaaaatatggtaagaaatttccaacattgaatgaaaaccaaataaaagtactactttgaattatatgaaccaaaagctcccaacaaatatgatgaacatcaaataaaacaataaaaatattggaactttagttggattaacatgatgagataataatgagaaaatgaataaaatgatgaagaagaaaagagtataaagattgtatacatacctattagatcaaattcaagcctttgttttgcataaaagagagctttttgtttaaattggtttggctaagctgactatatatatatacaattagtacatatacatgaggttagtcacacaatacttcttttttatcattattatcattattattattttattttatttatgatcaagtttatgaatttaaacgtgaaaaatatattattacaaaagctacatcaacacttcacatcaccatatatatctacaatatcttattttcttacactacatgataactctaagatttagagttatttttatatctttaagcttgaattttaatgtaaattgtggagcaattaatgtctatattatgtaattgtgtttagtt

SEQ ID NO: 119325 - DNA, 1737 bp, Cannabis sativa
gatcagttactttttgaggtcaaacaacatccaatccgcagaagtgcggattttagatttttcaatccaattaatccaatccgcgcaagtgtggatatccgtattttgcggatttgattggattgaattgtgcggattaaattggattagatacttaatgaacactcctacttgttatggattgttgtaaataacttgagcttataagggaatttattgaacacgttggatgtaacaatggtgtttaatcactcttgtttgttgtaacatttgattttttggccctttttgttgaggtttgcaatgcttctctttataaaacatgatttcccgctatttggtcatctccttttaaccccttaaaatgaattccttctttaaaataataataataataaaatcactattactaagggggaatcaagttgctcgacattctataattgagtttgacattataattatacaatgtctcaaatctttccatatctcgaaataatattaaaaaaatcataattcacaaaggcaattggcactaactaaagtctcccaaatgttaaaacgtatcaatctaaaattgaacaaaaacattttttttctaagataaaacttaaaacaagaaaaagtgagtaaactttataattaattaattgccaatccaactttactacttttgacaaaattgaatcgccacacgcgtttaagaggttatgaccatagactagacaaaagcatcaatattatttaattaagctttaaactttttcacattgattattattattgaagtgttgacacattttactttgaggaaattacatcacaaagtaattttgaaaatatttatgataatggactcaaatattttaagattgacaaaacttaagcttcttttaataaattggtaaacgtgtactaaaagttaatttttttcttttgctagccaccacccagccatcgacagtcaaaatctttctattgttttttttttttcaaactcttagcttaattttttttaacaattgactttttgtgtatttatttattaactttttttttaatctttttgcctttttttttatgaattgaagagttctgattttatttttatttagaataatattcacgataatgaaggaattaattataaaattgatcgagtttttaagaatgaaatttgtatgtacgtaaagaatttagagttttggccatttaaaattttcaatatgtggatagagcaccgaaattttagacagacagtgttgaaaaattagcagtagcctactcgttttactaggctatttcatactatggtcaagttaaatagagtacgaaaggtgcttagaaagtttaataaaatgttgataggggatgttcaacaagtttatatttcagctaaagctcgttttcatgagcttcaactttgaattaaatgtaacatttattctgtggagctatttgatgaagaaaaagagattaaggtgactgtaacttcttgttctaaaatgatagaaagctacttaagacaaaaaagtaagattaactggttgcagtttggggataaaaatataacttactttcatgatagtattaaatagcgcaagcaaactaatcgtatagtctcttttgttgaccattatgcactacaagaaaaatgagcattactgaggacaaatttcgttggtaaaaacccctgttttcgtcagtattgcgcatcaatgaggatatttcgttggt

SEQ ID NO: 119326 - DNA, 2581 bp, Cannabis sativa
aggttgaggactaatcggcatcaacctcaaatttttggggacttttgccgcaattatccctttacaatatatatacttgttttttttttttaatttttttcatatatataatgttggataatgcttcactagatgtataaaaaacgactttatgtagagtcattgtttttaatacgagtcattattttattttatgtctattaaataatatttccttatttattatttttacatatataattatttgttaaaaatactattattcattttaaacaaaaaaaaaaaaattatcattcacttctcttttcttctcctcctttttctctaaaagttcttaatagttacttatcaaagaaccaaaactataactaaaactaaaaattttgatatttttttaaaagaaaaatagacgttaagactcaaaaattctctaatggtgaagtcaaagaataatccaaaaattatttgtacatatctcttttctcaaatcatatccaccaaaaaataattttttttggtgaatatgagtatttttaacaaatagttataaaaaataaaataaaattagatatggacataaaatgaaataatgtcatctatttaaaaaaaaaaaaataactctatatgaagtcattttcaatacctcaattaaagcattatcctataaagttatatatgtgtgtttgttttgtgttgcttacaatttttttaagaaattatgattgaactgaatatataggattaaactaatatatgagtttagaattttatatatagatagtatgttttcttttttgacatttaaataacacagtactggtctgatgttgtaatttgtttctttttagaagtttttaacttttttggaacttaatttttgttcctctgttacaatatcaatcttgttcatattgttaaataatttggataacattttagaaactgcaacataatttatttttataatatatatataatttaattcacttgaacttagactagacatgcttgatgtatgttacgttatgttctactctgctcagtcttttttcagtttattcctttttcttgggagagtttcttatggaccaaacaagattgagtgaatgaaatggaaaaggcacataccttagctgattttttttgatgaaaaggcacataccttactgtttagaccaaccctttcggtttgaggaaacaaagaatgtttggaagtggatttggagtaaagatatctatccgagaatctcagtcaatctttggaggttcttacaagaggctatccctatccgtaacaaactgcctttcatcctcgaaaaagactgtctattttgtggaaaagatgtggatgcaggccttcacttatttaaagattgtagtcttgcaaaagccttgtggttttctggtgttatctctatttgggttgatcagattacttcaaattccattgtggagttcgtggaggtaatcctgtctaatgtccagggtgaggataggttgaagattctaaacttcatgggcatttgatttgctgaaatttggtccctgaggaacaaagtattgatttttggagacaaagttgagatatcaagtgtaagggagagaattgcagtaaagtttgatgagatggttgatgtccaccaaaaacctgaacattccccttctgatgtggatgccctaaacctgggacgtctgagactctcaaaggctgtgtttgtggatgcttcatggaaggatggtctcatgggaacggctgcagtgttggttaacttggaacaaggatcgtggtttttcaagtttttgcgagaaccttgctcctctgctttggaagctgagtcgagagtagttctagaagctttgaagtgggcagtgcaaaaggagtggctagatgtaactatgatttctgactcgcagattatagtgcaggctctggtgaggaggaaatgcattcatgattggtctttaatgtgtatttctttagccatcttagattgtcttaatatgtttagtagttgtgacttttgtatgttaaccggaagtttaattccttagctgatgggttagctaaaagggttcggttgtctaaccaccctgctggtgtttttgttggggagggattaccccctgtttttcccatctctctttcggtttaatgaacttttgttcttttaaaaaaaaaaactgtgagtttttttcttctccaacaaaataatttttaagttcttgtattctttctctctctttcttttctgagtttggtgagagagtgaagtgatgactgtagcacaaattgtgcaatgagagaaagtttgaggctttatatatgagtgagagaggaatataaattttgggaagaagtttcatgcaaggaataaaaaagaaatatgtgagtaaggtggtcataattacttgagctttcaaatatgactccttcttcacccttttcaaattgaatttttataattgtttagtcattagtcgccatgggtatgagtaatatattttagggaaatttgattttctatacttaaaaaacttaattttttttttaaaccaatacattttacactacaaaaaatat

SEQ ID NO: 119327 - DNA, 1745 bp, Cannabis sativa
ttcatgtttcttagatgttttgatcgagttgttgtgtagctagttgtttttaattttttttttcttttactgaaatataataattttgtttttgtaatacaaaaacaagcttattattattattattattattattattttgttattttatagaattcattttcatgtttcttagatgttttgattgagttgttgtgtagctagttgtttttaatttttttttcttttactgaaatataataattttgttattttgagactttaatatagtaactttaaaaatttaattttgtaaaaatataataatagaaaatataagtagcatttagttaagtatttatgtaaaccctcccgtctcccctcccaaaaaaaaatacaaaaattaagaaaaaagataaggaataagttgaggaatatctttttttgtatccattaattaaaaataatctcatattagatttcattaaaatctatccacttttgtgagtgggctgcctaatatatccccgccctccacttaagtatagcacatgatttacattaacctaacgggtagaatagagacatcatttataaaagtgagcatatcttaaagaatataaaaataaaggtaataattaaaataaataaaataaagtgagtatataatgtaattttctcaaaaaataatagtgaaagaagctcatagagaatctccatatcatctctctatgtttcagaattatataaatatatagatatagattatcaaaatgatattgaaatagaaaaaacttatttgttttttttatataatatattttcataaattttgtttttttttaaaaaaaaaagtgaatattcggacaataggtaataattaattataaaatacccatgtaaaatataaaatactaacttgttatatagaaatacaattagtaaaaaaatcattatttatatcctacactatatataatataataataatttttaaactatgtaaatttttttataaaaagtgactaagtagtcatatcattcaatatttatttaaaatgagttaaaaaatatatatataaaaattaagaaaaaatttaataattaaagaagctcatagagaccactacctcatcacttcttttattatttcaaaattatatataaatatataaatagatatatagataatatttaactccattattctttttttttttacacaatggtgtataatgatcactaaaacaatgataactttgagtattgatttttctcgcattggtggcagtagaaaattattgcaaatggaaaatttatctaataaccctaatttcgtaaccaaagattttagcttcgattcataactaacgctaaatacagtttatgttgttgcaaagcgtgtgtaacaaaaaaaaaatagatgaacgtaatatttttaaatgtacaaatattttctaaaaattaatagagaggatatataaatatgtgatgtaggttaattaccgaaatgactccgaaaagggcaaagatgattgcagacttcatatcttcaaatattggccaaagatggtttcagaaaaatcttactaattatttgtgtttgttatttttgtggtgacgaaaggttatgaaacttctaacactatttataggaaagtcagtacatgaagtaatatgttcaataataatatgaacctcaataatatgttcaataataatatgaacctcaataatatgttcaatgaattatttgattgtttgat

SEQ ID NO: 119328 - DNA, 1399 bp, Cannabis sativa
agaaattggactataaatacaatagatctttgtttcagatagtcgatgtgggactctacttctctcttaacaactaagcaactacaggtgtcgttataatttagtttttgtattaaaaatatataacatgtgaaagtaaccatggattagatccttctctttcggttgttgtgaaaaatattcaaattagaaaactaaatgcaattaagtaaaagaacaaattataactcagttcagcactctcaacagctgacatgatttatattttttagcaagtatcaataaaaaagcctatctactagttgactagtagtccatttggagccttaggtgaacttcaaaatactaacaataaaaacaaacaaacacaaaatactaacaataaatagagggaaaatcaaaacaaaacaaaccataaaaacactatacaaagaattgaggaaatgatacattgtccaatgtccattagttgcatgtgacattttggacaatattaattttcaagatcattgtcacacaggggacataatgcattaatgcttacagaatgaacataaaatttacaagcagatttagcagagaatcccccattagagttttgataatagtactattacaaactttgttgttgcattgtaagccctttgattcacatattttaagtaataggtagaatgagttcaaccttgtggctcgtacatgagtacaagtttcaattaaacaaacatttatactttctactactgatattgaaacgctgcaagcttctcaatcgtaatagtccttaatgactcggagatcatggaagattgactccttgtcgataattcttgtgccacaaaatgcatagtggggcgtgaatgtggcctagttctagtacatgacaatgccaagctcaccactaacactacaacagctgataatctcccagtgggaagtaacaaccgttgatctagcacatcttttaatagaatattctccacatcttttggtcgagctgatgataaagattccaacagttctcctgggtgctttcccaacataatttccaaagctaacccaaaactataaacatcacatttctctgtaacacgcatagttaaagctagctctgcaatacaatacaaattttaaaaataagaacacttgaaaaaattcatgcaaacactaattagtaacgagtaaaatagtaattacctggggccatgtaaccataagatccagctacatttgtccaaatagataagtctgggatcaacaatcgagctgtaccaaaatctgacaatattggaacgaaattggagccaagtaatacattattcaatgacacatcgcgatgaatgattggtggagaacaatcatggtgtaagtatgagattgcatgggccaatccttgaac

SEQ ID NO: 119329 - DNA, 1534 bp, Cannabis sativa
aaagagcttggtactttcttatcaaatctgagaatcagttggaaatgagtgtatgatctatcccactaacaactaccgaaaactacactatgacatccctatctgctatctctaaccccccgcaaaccttatcccaactaccaaaacagttaatttacccttttaattataataataataaaaaagtaataattaataataacaatgtaaaaaaaaaaaaaaataacaatgttatataccgtcctttttgttgtcccctttctctctctctctctaacatgtaataagtaacatgcatataaattagtggtgtatggttcttgtagttttcatcactccatattggccagaactagaactagaaccagaaccaaaaaatgggtattttcagaaataaagtcctagtttataaacctcttaaagaagtcgatctgacctctcatagctccgagccctatctaccagcgaatgtcaaaggttcatatgatcttcccttttctttcttcatcttctatgacttttctatcatttcatctgtttttacgaaaattgtgtgactaaattattccacaaaaaccagccaagtgctactcaattttgtttctaatgtaaaataatcaaacacaaaaactgttatttaaagaagaattagcttatagatgattttgtgggtgaacatcttcaaaattcattgtaaattgataagacataactaaaatcaggagaaaagtaattaataagctctgtttctttaaaatcgggagaaggatttgattgtattatttttccttaattaacatatcgacaaatatgatgttttgtataacataagtatggattgtctgaagtgaaactaattgactatgtctttggttttgtgtgtgtgttagcaccacgtatggctggatttcttgtcaaggtttttgtgtggtttatggagtcaaggatttttggaactttgctactctacattttgaaggctaataatcttattcataaggtaatcaattcactcattccaatatactattttagcccattatagcacttagcatcggtttaaacaattttctgtaatttgcaaagccaccttaccgtaccatagaaacagtcaaaaatttactttaaaaaatagaaagaagaaaaagaaaaagtatatgtatttgttaatattttgtgtagagctgtaaatttaatgtttacttcttgaaaaagtataaaccaaatgtgatgtgaaaatctgttggacagttgttcaaaaacgttgtttccatcacacttgaaacagaaaacaaaacacaatatgtcaccaactacaatttattattattattataattattattttatatctataaatttttcgaaattcattgatgattttatgatcagagtttgtatttgaaggtggggcagagataatatatttcttcagagaatgtattctttttgtttttttgttaaggtttggagagcgtattaaaaaataaaataaaatatgttaatcaaattattgagcaatttgcggcgaaac

SEQ ID NO: 119330 - DNA, 1875 bp, Cannabis sativa
aaatgaaagaatgtggactaacataagctttgatttgatcagaggaagttcttgcttgtttccgagtgaggatttggttctttagattttatatttataggccgtttcctcttttttcaaaatgtcaaaaaatattcgttttcctatttgtttgttatttatattattttttatatcttgttttacaaatacattattattgaaaactaataatagtttaaaatattgttaatttaaaaaaagatggtttaattttttgagtttatatgtaacgggagatcaaacctattaacatcgttaagtttaacagaatattcttttatttttaaggtatattctgttaaaccaagaaaccaagaaatgtcgttagatagacacttttaatatataaagatattattattgaaaactaataatagtttaaaatatttttaatttaaaaaaagattgtttaattttttgggtttatatgttaacggagatcaaacctattagcatcgttaaatttaacagaatattcttttatttttaaggtatattcagtttaactaagaaaccaagaaaatataaagatatatatatcttttatatatttagagaaatgaaatgatagtttcctttaagcttagttgaatgtgctaaatgaagagatcttatcttagtaattatattagtttactggagtccatttacaaagaactaagtgttcaagaataaaatacatttgagaggtaaaatggtatttttaatcccgactcattgtgaaccatctatagataatcatgaattgatttgattgaaataatagataatttatagcgtatttatattatgtatatagagcattctataaaattatgtgtacaatttcgagtctatagtggagtcatgaggaattaataaattaagaaatttatttgttaaattttaaatctacttattgggagcttaattttatagctcatggtccttgcagtatctaaggtaatgtaataatatgttacaataattgattatttaatcaattaaaattcacagtagtaattttatcatttttaaaacttttcactaagttggtgaaattaagaaaatatgtaaaataaatatctaattattaattatatattttgttgtcaaattaataataaatatttaaatattttttatttaaataattctctaaatataatcatttaattaaaactagtctttcaatactaaaaacttaattgattataacaataaaactatgtcagagttttaagttcatttggacttaagtgaacaaaagagaaaatttaagcccaatagtcatctagttggatggcaagaaaattattttcttatttgtatttgtatttgtatttttcatttaattaataagagaaaagtagctcttcctttagctataaaaagaaggctatagaagagcttttcaacaaatcaattttttagtctaacatgttattttaacatgtggaaataataataataataatcgactaaatttgaataataccaaataaccaccatttaacgtttcatcttatctttgaacgattatttatcgaatcgtctttctgttcgatgcttgtccttcttacaaataacgtagatgaattattcttctcgtaaagaattatcccaaatgaggtttcggataatttttgtctaatacttataggaaaacttttccaagatactttccaagccaatgcctggagaagtcttgtcagcctacctcgcagtgtccgaatacgcgattagttcagtactaatccgcgaagaccaaagtagacaatatttggtgtactatgtgagcaagcatctcctgtgtaatgaccgctctagtaatgtggattagtaaaggcaatt

SEQ ID NO: 119331 - DNA, 3533 bp, Cannabis sativa
  modified_base (3491)..(3505): a, c, t, g, unknown or other
aggaggaatatgagggcccctgcgctcctccagcaccgcatccagcctcttatttttctcccggaagcgagccagaacctcttcaggtctagggtaaaaattaaggcaaagattcttgtcattagctatccaggccatgaaaaccccatcgtcaaagcgcttcttgcaatgctgacaagtgattggggccaagagagcatccctctttgctttagccgcttctttttgagcttgctccctaaactcgcgaagccccttcactttaacagtcaagttagttgttgtctgcaagtctgcctggtgtagctactcaaaagactttagcttggtggttagctcttgaactgcttcctttgaatcctgaaggtcctgcctcgtcgcagccacgacctcatcggtggccttcagcgcctcatccttagccttcagcgcctcccgatggctctattccatgagggactccttcttctgggcttcctcccagatggctttcttttactcctccgactcccgaagatcattgcctccttcatgcccccaaatttggacatggtatatccatgatcaatcagcgtcttcgagagacgaccagtctctactgcaatctggcaaccaacaaaaatatatgatattaggcatcaaaaaggtaagaggcttgaaaaatctaacagataagaactcactgcagtaagggtcgcgcttacatcctggatttgatacataggattggtagaggcacaggccacatatctcttaattgggagttgagttaggccggcagtgaagtggctcattaactctgaagcgaagggagccagggtaggtccgatgaggcagttaaaccagtcagtcaagggatccaaattcaagtcccaggcgttctaggcatattcactacgagtaaatctatccttggcatccttcagaatcttcttcagggcctccacctctgcattcttcttggtgtactcccccatggcctaattttgtttggcgatccggagctgagtcctttcctcatcgacagggatgggggttaagacgataccaggaggcaaagtatactcgtccacttcggacggaatccctgagtcagaactgggagcaagagtatccacgcgtctcggttttttgacagtctctgtctccaccatcttgcctttaagttgcggtccacgggacaaaggatcttgccttcttctccttcttcttcctcgtcaattaagatgacttggtcctgggggatgccagtagaagatctcccgggagtccccatcgggtcgcgtaactgaggcaagccgggctcaagaatgtaagtttaggcgagaacatccaagaggtcatccattggcttcgttgcttaaagaaataaacaaataaagatgttagaacattattaaaaaatcatgcacgcaagagtaatgtaatgaaactaatcctaccctggcgatctaattctgccctagcaaaagtatgtactaaaaggctggtgtcgtcgtcccctagaaagctatccgaggggaggaaccaactggaagatatataggcagagtgatccaaggggatgggtacgggaggacaggaacccattcgggaccggcctaagaaatgactaaggttggaaaaataaaaactcttggcgtgatcaccatatcaaagagggggcattctaaacttatgaagctgatcatcaaattccacctgcttacaagtaaagtaatcctgaacagaaggaacgtgatgaacaatcagtggggacttaccagctccggaggtactagcatcaggagctccagtgttaggaacttggaatgaaacttgggccaggaggtcgcctgttcttttccagcctctatctgaagaaccctccttgaagcagcttcggctttgatgtaggctaactcttgttccctcttgaataggtacttcttgtacctgtcccccgcgaaggcaatgatatcttcccagagtgtcttctcggactcagggttgcgaatgttggggtagagaaccttggataaattgaagtcatctactgaatgaccctctaaaattaacttagccctcctgcaatttgcagtcgtgaccaagtcccctacattcaacctgtctttatcgtaggtggagaaactttgatgtgttggagaaagagttgagtaggggtggtgcgatgcataggagagactctaacccactcagtgagtagctccaggcgctcaatggcttagacatcggaggagaagaaaaatcgatgacgatactccttcatgatctttagaaaattataaggtatcgagccctcgttagaaggatggccgtgaagtttgaaaaaaccgtccttgagtttgtcccctttcttagggacgaataaaagttcgtaaaaataaagaattttagctagactgcgcggggcccagctcttggcaacataaaaaatgtataagcctgagagcaggcgataagcttaaggaatgagtttgtaaggcgcaaggccaacaaaaacaaaaaaaaaaaatcaatgaaatagtcctggagtggtagcatggccccagacatgaggtgggttttactccaggccctaaagtcgctataattatggttgggtatttcctcatctctgggaagacggtgaaagactctggatgcagaaggcttgatcccaactaccgtaaccatcttctccagttggtgggcacaagtaaaagttgagtgcaattcgtccgcctgccagccagtggatcggcaggtgtatttctcctggatcacgggtcttttcatcacctcttctagggtggctaaggtcttggaccctttgcctgaagattttgctctggttgtcgggatagacatgtcttgggattggtaaaatgctgaaatttcttgatcaaagctaaataaatagtgctcgtgaaggtcgcggagaacctcactcatctgaaaaagagaaatctagcagtgagcccccaaaccaaaccttaacataaaaggagggaatgggggtcccctaaccgctagaaggagaccccctccggaggtctgctagaaatgagaaattcagggattctcctaggcaaacatcgggtgcaaatatcccaaaggcggtgaaagtagagaaaagcaagaaaaaaaaagaagaggaacataagtatgaaaatcgtttcatactctcgagagtcccgaagcgaagaagttttttgcaaaatcaaaaaacaaaaaaaaggaaacaacggaacacagacaaggaactacgatgcacgacggtcttcaccatgaccatttcactatagaaatcaaatacgattaaaggcactgccctaaaccttgccctaacatgcaaatgaacaataaaagcgaaatgtacccacaaaacttgcacaatgataatgagctagaagttgatgttgtttgacggtagaacttgttgggttttgtgccctaaataaaacccatttctatataatcagatctagttaataaagatcagaaataannnnnnnnnnnnnnnggttcacatgatttatttcatgagatcg

SEQ ID NO: 119332 - DNA, 1138 bp, Cannabis sativa
  modified_base (928)..(930): a, c, t, g, unknown or other
attttttaaaacaaaaaacagaaaacaataccaaacatgctctaaatattttagaaacatatagtttagttttattatcagtaacgtgtttagtgaattttttttcttttaatttgaatctacatttgtgaattttagtagtatttgtttttatatatttcaaatttacaaattctacaatatatactatatatatagtaaaaaaaaaatgatatgaaacataaagttacaagaatatatattttggtaaaatagttaattatgcggatttctttattttttggttttattttttttttcaaaatttaatactaataattagtatatttaataaagctctcgaaaatgatagtggtgactataagtgagatacaatgatgacaataactttaaatataatagcgactacaagtgagatacaataataataataattttaaaatcttatggtaatagctatttttaatgcagtatcaactacaaataaaatacaacgataaccacaatatgttaaaaaataatatataataatatatatatttttggagatatatttttaagatagtataatatatatgtatatatatttttgagataatataataacaataataatataataatatatatatttttgagatagtataataacatatttataatagataaattaattaaaagtaattgtttattaattttctttatgaagcctctactcatattattgaaaaaaatattaaaaaatattaaaatttaaaatttaagataatattataactttaattattattaaataaaatataattaatcgcaagcgaagcaaaagttgttttctaatttgtgtgtaacagatatctactacaaaaaattgctacttttagtgataactttttagtcacaatataatttttttgtaactaaatgtgannnttagtcacaacaaaatgttacttggcttgtgactaaaacatagtatttagttacaacttgtcactaatttagttttagtcacaacaagtactaatattatgactaaaaatacattttgtcacgacaaattgtaattgttgtaactaatacttttatccacggatcttttaatcacaacataggactcatgatttataattagtcacaa

SEQ ID NO: 119333 - DNA, 1204 bp, Cannabis sativa
ttgatactcgggatcccgatccatatggttattaatatataaattattaaagttaatttccgagtttattattattaaaatacgggcgttacaaacttactggtcagattattatgaagttttaatttgattaaaataagattcagggtctattttgtactattttaaaaaatagaatctaaactattatttaacaaaacagaaggttcaattattaacttttacaaaatatatagtcgaaaatgatatttacctatttataaatttagtgagtgaggaatgatattatttagaaaaaatattattaagaatttttttttatttttaattaaatataaaaattggagaaaaaaattataatagggacaatttttgaattagtcattacaagagatatatatcattatttagatactaattacatttaaaacaataaaatgttggtgacaaatatgttatttgtataagttaaaaactattgaccaagtctaaacacgatttttactttaatacaaaaattgttggagagtcgtgggagatcgatgttgattatttggatcatgctgatggggtgttatatatagttacaaatttttcgaaactaatattaaaatatacatgtagtatatttttttagattactcatgcctatgtttctgggcttattctcttacctatagtttagaatttgatgattagttgatcgactgttattaattatagaaaatgtttttggtaagagcaacactagggacattttatttaaggagggttaggaattggaacttgaaatgtttaatctatgagtatgatataatagagacattcttttgtttttggtgtatagatagattaattttttatttattattttatatatgtatgagtatattatagtccggacgaacccacatacaggcgaggtggggcagtcgcccaccctgaaaaaaaaattaagaaaaaaatatatatgcattttagtaagttacaacatatatttatatatagaagcgatatttatttacaaaataaactttggtataatagacaagtcatttcatgcatctaaagaaggtcatgagttctaatcccaataaaagcatgtttactttagtatttttttttaatttttgaatctctaccaataatacttatatttaatgtcttaattattgaaccaaatatattttattgttactttttt

SEQ ID NO: 119334 - DNA, 733 bp, Cannabis sativa
  modified_base (703)..(707): a, c, t, g, unknown or other
cattcccaatgtctaataaaccgtcccaataaactaacatactaaattgtgattttactgagccaaacaccgagttccatttgattatgatactttaagtaagtgtcattcccttctttagactttaggattctatttttcctcttgcttgaagtattttgatacatttttcacatttgttaggctgccttcctcaattgcctttgacccagagctagaagagagaatagccttgtacaaatccttctcgctcaaggagttgcaagtataggggctggtgaccactaagaatttacaaaaagtaggcctcatcgctccacatcaggacgtggaccatctttccgtgaaggaccaagttcaagaagctctttgaggggacccatatgaggttaaaggggctattgcagtcataacagctgaggaggccttgaaggtagtaaaggtcgataagtaatgattggtcaattggaggagacgattcccaaaaagcctaagtgaggccgaggaactcactattagattcaaggaggtagtgcagaataagggtgctttgggagcgagcacttcaggtagtggtgagacaccctttcacataattagggcttccactttaactgaatttgatagtattgatcaaggttgattttatccatacatcctaaatgtaaataatcgcagatatctgttaggttttatgccctannnnnaactccatttcaatgtaatctatttt

SEQ ID NO: 119335 - DNA, 1655 bp, Cannabis sativa
  modified_base (122)..(131): a, c, t, g, unknown or other
  modified_base (486)..(486): a, c, t, g, unknown or other
taagtggttgaaataaagtggcaaatttgtaactagtgaggcccatagtggccgaccacttagtatgaattttacccattattttacttttttaatccatataattaaatcctaaatcctannnnnnnnnnataaaaggaacatgatgctctcgttctcatcaaactcacttttcaactaaattaaacgtagttctcattctctgacaacaagtagatgagagacacattctatagtgatttcaaacctcattcattgttcttcaccaatttgagccatagtgatagagtaccatgcccacacatagcaagtcaaatactcaatcatactgcggaagatggtggtaactaacctgaaggagagaaaaagatctaggctcatatgttgttattactccgtgatagaaaggaacaagggttaaaaatctgagtgaaaggagtcattattattcctctgcatcaatgtaagattttctaaactcttatntgtttaatttcatcgtattagataatttatatttagggtgttaatgaaacatacatgttagtaaatttagattctggtaaaataaattccaacagtttattcatctatccgaccgcagcacatgtattcgtggaacctacttcactatggttgaatatttaagatattcaaactccactaatcattgataattaatttataacaaaagttacctcgggtgttctaattaagtacttaggccaaggaatgaacatgtttgctacttccttaacatatctgcacccgtcaattgagattgggattttagcatcctcttgcagcatttctaaaatcagaacctgggctttgaatcatcgttgtctttgcagtgaactttgattggaccctcatgttcgtacaaataatcttgggccataatgttgtcgatattatcagagcagagatatactagctgattaagagccctatgttcatcgaaattgtacatgagaggtggctcatttagggaaacaaactcctgagcataattttgtggtcgaccctcatcttcatgagcgtattgttgtggaacatacacctgatgagacacctctccttcttcctcatcctcattctgctcttgttgggcaatatttttcttccatttaagggatttgatttcagcttttaatttctcaatctccctctgtttttgagccacaacatcagaaacttccctttttttcctgccaaagagtttagatgccttgacaaggaacctgcaaatcaataaataaaattatgtataactaaggaaacaatatttttcaaactagcatacccagcaacccagacacatccaagatgctctagtgtcctgagcacttgcgtcaaaatgtcattttggccatggacctgaacttgtccctgagtaacttgctcctctagttgagcctaatgcacatattcaaccaattagtatatgatcaatatatattaactcattattagtacttaatcaacaattaatatatacttactatcttttcggaaatttccttgtcgtaatcagtgataagtttcgttctcttagtttgagatttgatccaaacacggtggtgtgggggatcttgaacctcgaggtcctttttctatattattttataaaaattaaatgagtacaattacat

SEQ ID NO: 119336 - DNA, 1029 bp, Cannabis sativa
  modified_base (998)..(1004): a, c, t, g, unknown or other
aatttccaaattaactaagcgagctttacagagttggtgggctatccttttacttgggagaaggggaggggtacggaggcatggttagaagtttggttggatagagctcttatcaacacgattggaataatctttttctggatgcaaggttagaaaatttagaaatttctgcttcagatcattgtcccatttggttgaatcttaatctatttaaaaaggtggttagtatgaagaaattttggtttgaaaatgcttgggtgcgtgagcctatgcgccgtcagattgtgcatgataattgggatgctcatgagttgaattccttgagctcaaaaatcaaatgttgtagtattgctctagccgaatgggagaaggatattacaggtaatttcaagcagagaataagcagttgtaataaagtcaagaagcttttgaagaatagaagggatgttgattcggttaacagatataaggaggctcaaaaccgtttatttgaaatcctggctcaaaatgaggtttttttggaaacagcgatccaaagaaatgtgactgcaattaggtgactaaaacaaaacactgagtacttccatgcttgtgcaagtacttggcagaaaacaatgagtttttgtctctaaaaaatagaagtgggatttgggtggattgggataatggtttacctggtgttgtagaagaatattttagagagttgtttattgcttcagaaattgattggggaagggtcacggcttgtgtgcatagtcgggtgtcgaccattatgaatgagactcttacaactccgattgaagctaagaaggttcggaaagctctcttccaaatgcatcttgataaatctcctggtcttgatgtctataatcctggtttttatcagaaattctaggatattgtaagcaaggatatcattcggttagttcaacatttctttacttttggtgaattgcatgatcatttaaaggaaacgatgttgggttttatgccctaannnnnnntccatttcaatgtaatccattttat

SEQ ID NO: 119337 - DNA, 1482 bp, Cannabis sativa
gggctaggcctgtgcctagggtcccctcattttaggggcctaaataaaaaaatttaccttttaaaaaatatacatattttttttagtaatttttaaaaataccatttatctttatattaagggtccaaattttttttgcttatggcccatttcaactcagggccgacccttgaacctcccaagtattcgttcaacatagttctctagtgacaagcataaccttagagaaggtctatcacgaatgatttttattcttaggattagtttaactgcccacaaatctttcatatcaaagactcctcatagtttgttcttcagtcgatttatcaccttaccattttggccgactattaacatgtcattgacatatagtaataagataaaaaaaaaaatcattagaaaatttcttaatatagacacacgaatctataactaatctcttataacttcgatctaccataaatgaatcaaattttttgtaattgtaaagcctattgtagaccatacaaactctttgtatacaaattttattgcacacaaaactttaaacaattacatacagttggtaagaagtcctatcactacaatattacataatttttattaaaaaaatagaacagaacacattcgatattttttaacttatttttttagttatagcatgcactctcagcacattagctatgaataacaaaaaagaaaaatgataacgtctcaatcaccacaaaatgtatcaaactgctattcgtgcaatttaatattagatttcacatttttttatttaataaataatatgagcaatgctattggacacctgtggtgtgtaacaccttttataggtgacgtttcatgattggttagtgatattttctaaacactattttcttatgttatatgggagtcgatacttaattacaataatgatggtatgacacctaggattgtaaataggtcgaagctgatctgactatgatccgacctaaagatcatgtaaggatatgccctgcccgcccctcttgatcatatacttagattggatctgattcgacctatttttttaaaatttaattttatatctaaacttataattttaaatttattttaattttttattagtattatttaatacaataatatatttagtattgacttgtattaatagactggctccgggttcggttcttaggtttggattcgggtttgagtcccgggtcccgagtcccatctttggatctgggtctgggtctgggtttaggttcgtatcctgatctgggtctgagtttgggtctaagtcttgggtccaatctaggtcccacattcaggtctggtcatgagtttgggtctcgggtccgagtctcgagtctcaggttcgagtctaggtccaggtccaagtaggggtgttcatcaagccgcccaaactgctcaaaccgcccgcaccgcaccacactgcaaaaaaatgcagtttgaaattctttgcagtgc

SEQ ID NO: 119338 - DNA, 1714 bp, Cannabis sativa
ttggagatgttttatttccaaacaaacatgtcagtttgttagtgatagtgattaagttgtgtgccacttggcaccttttttgtattgatcttgtatgttaaggatgagcgtgtacgcccattttattgctggaatctctctcttcgactttttccaatataaaatgttcactatctctgttctcccttggtgtgaaaaatttcaggactactacgaaaataagctttagtcaccccatgattaaagatttttagggacctttccctgtgaattattaacgtgactgattgtaaaggtaatatttagtgatttttttagtgtgggtcaataaaacttttaaaatccttcactatgtgcgattatagatttttagagtcttacatcagactgaaaagataacactgattttttttttttttttttagtgtgggtcaataatgttcttagggacaacacaccaatgggagcaagaaaagagaatgatctcctattcctggtagctatgtatgtatcaatagtgtttgaataatggaggcttggtgttgacaaagtgtgaagaactcaagttatccccagttcaccaatggaatcctttccaaattctctgaattcttcccttactgttcgattcgatcgaaccaattatcttgcgtggaaggcgcaagttatccccaccgtcatcggtcatggccttgatgaaattcttttcaccggagttgctcctgttcgaaccctcgttaatggcaacatcaatccagagtacacggcttggaagagaaaagatcaattactcctcagctggcttcgatcttcaatgaatgagacaattcttaggtcatttgctcaatataactcctcctataaagcttggcgtgctctggaacaacggtttgcaagtcaatccaaggcccgatcacttcaaatcaagtcccaattatccacaatccagaaacgtaatctatccattactgtttactgtgacaaagtgaagattcttactgattctttatcaactgctggtccccctcttgatgatagtgatttgataatgcatcttttaaatggtttgggaccggaatacgatcctgttgtggttcatgttacaagtcttgtggataatttgtctttagaatctattcaatatttgttgctgacccataagagcaggctttaaagacactatacattgagtgattcttcatccaagatgactgcaaatctctctcgatacactcctagttatcgttcttatgctcctcaaggccgtcgcactgctacaaacaacagatctcagggtcgatcctttggccgtggccacccctccattccacccctactatgtcaagtatgccacaaacctggacatactgctgccatatgccattaccggttcgataaaggctttgttaaacccacgataagtgagccaagagcctatcttgctaagatagatgaagatgatgaccctcaagtgtactccagctctgtgctccctcataaaattactaaaatacccatggtgcttaatctaaagctaattcaagcctaggggtaaaatggtcaaaaaaccacaacgccgctcaaactcggaatgctattttctccaatatacatcacaccaagaaataaggttctagacttacccatgtgattaaaatagtcatccatcgcatttttcgttatagctgagcaaaaattataataataatataat

SEQ ID NO: 119339 - DNA, 1985 bp, Cannabis sativa
caattggttttgagatagaaccctatgattctcaacaaattctatgagcgaaagaccacatgtgaattaatacaaagtaaccgaatgaaaatatagtcttttaaatacttcaaaaaaaattatataaaaaactactttcatgaaatagaagacaattattattattaaaaaaactaacaattctttgtttctgcgcataaccgagcaaattagtacatggcatggcaagaatgtatgtagggtaagaaattccaaagtttagtcctatcatatatatatattgttgtcggagaaatttagacaacaccaaaaagtaaataaataataaatatgtaacagaaaataatgagtactcaacttaaaacaacgagtattcaaacaagactgaccagacaatagaacaaaaatagaaaaatataatgaacacaaagatatataatgattcagttaaatcacagtctgcttagtccactgttttaaagaatttctgtctagtttattcatgttggatcactcctttatatacaaagcaagcatccctttaattacacataactggtcgattatagaaccgttttacaattaatattaacattaaattagaatagacgtaataagaataaatgaagaatagttttaaatctgtttcaataagtaagcaacgtatgcgacctatagagtgcgagttgcctgttcgtattctcacacaagctcgcaagctttgggtgcattttatctttctagggagggctaacgagcctcatgttaaggtgtctgcgttctatttgagtcgcatatatggacacctcatatgcattgacaacatgagacatgcgagtccctattgagtcatcgaatatgctttgtcgttaggataatttcattatgtaaaaaatcgatctgtactcaatcgcaggagaaggctacatagtcatcgcatatatcttggtatatgcgcggcttgtataaactcctcttggtcctgcttattttatactatgcaaggcacaatatgcgactagacgctattaaggtcgcatcatctcgcgagtttaggtcaagcaaggtcaattcttgaggagtcattaattaatagctcatccatcccttagggattggatccacgtgtcaattttataggaaactaatctcgagtttctaggtaaaaatttcgtactataacacatgcccctagtttcgcgactgacggctacgtcattagggaaactattacagagagacaggcgagttattgtcacgagatggtgacttttggttgtcttgtcaagggtttcaaaatgacgactgtaattattactttatttcttcgagatgccacatcatcaaaacccttcggcattttctttggagaccgttggattgggagaccttaggcattttcttgccacgtgtctatatcccaattaatgaggaatatcagtattttatccccacagatataaaccgatcacaactcatttttccctctcatttctcactcttttctccttacccaaaatttcaaactctttaaagttttctaaattttcaaattcctgctgattgaaggggatttcgtaggttcgatcatctgcaagaatatcctagaaagaattacattgaaggttagtgactttcctccttgtaataattctcttttccttgagtattcggcatgcattttggattttagggatagaaaatgtatgaaatgaatagggtctaatgagagaattaaaaaaattaggcagaatatggtatttctttttttggaaaatacgtgcttgaaatatgaatactcgtgggtttctatgatgaactcttgaatacccgcatctttatgatatacccttttacgtactcgcatttttgaaattgtttaacctagcataactttttgaccttgtctctgagtttccactcttaggtcatatgtaatcagttaacttcggggttttaatccatatgcactttagttgatatga

SEQ ID NO: 119340 - DNA, 2079 bp, Cannabis sativa
tatatttaattttactaatgcaatgattgtctatatactaagctagtatgtctttgaaattttgatatctaccaaatcatgccttccatactttaacatgtacaaaatcgtgtttccttaactgtcatctacgtcaggatttcatcagtaaaattagacaaaagtctttgaatttaacaattttaatacaattcaagaaaaatttttaacgaccaaaaaaattaaaaaaacatgattttatacatatcaaaatttggagaagtgaaattttaattagtcgaatataattaataaccctaaaattacaaatctaacctttggaatgaatgatattcatgaggagtagcagaagcaccaaaagaatgatggtggaagacaagtagaacaatgaacaacaaactaaacaccctcttcatcttcatcatcttcatctcttatatattataaccaattataaaaagcaataaatacattatatagaacatacatatatatatgtattaatatatttatagaccaactcaggaaactcatgagaaaatacatgataattaattagtttgactatagtatgctaacatgcatatataaataactacatttttcatgcataacatgaatatatcacgcgttattttcaagactttttggtcgttgttgctctctctctatagattgactagtacattttaattttatttattttgttttataaaaaactaaattatactctatcactaaaaaaaatatttttagtgtcaattttttagttacagcacaatttttttgtgattaaatatgacttttagtcacaacaaaaaattacttgtggctaaaacataatatttaaatacaagttgttactataatttagttttagtcataataattattacgactaaaaatacatttagttataataaattataattttgtgtaaataacacttttaactataaactttttaatcaatataaaaataataatttataaactttttaaaacttattaatataaatttgatcaatgtatgggatctaaataacaattagttacatatagtcaatattattacttggtccgtgtgtttgattttaaaaaatagtttcgtgtctaacaaaatatatatgtaaattttattattggtattataaattatttgatttttttaaaaaaaaattataagtgattctaaataattataacgtacatgatcataaaaaaatatttaaaaagttctttaattagtatgccaaagacgatgaagggtaaaaatagaaagtcaggacatagagaacttttttttttattatttttttatttttgaactattgagattgttagatgcaaggactttagttaaattttactaacagaagtctacgtggataaaaattttagcaacataatttagtacacgtcaaaatttgggagtacgatttgatataaggacaatcgtcatgttagtgattgaatgaaattgaataaaaaccattgaatttaatgcaatttcaataattagagaaattttttttaatgacttgaaaagctggaggcaaaaaataagtaaaagtagaattaaaataaaataaaataaaaacaaattaattaaaataatataaaaggtaaatcgttactagctcactaaaatttgaagatacaatttttgagatattttggatgtttttaacatgtttttttcatgacctcttttgcactcatggtgcggattcatcaaaacttgtgttcattgttttgttgaatatattagtgtttatatgcataatatattcctcaaataattttttttttgactagttcatcaaatagttctatatgccatattaattaaaatacatacattattttttatgaaaaaattaaactacttatttaaacaatgaaatgcactggatcacaaatacagtaaagatatacagtagaatatttatttaagaatatatttggatcaagtaaattatatttaattgagatgttttaattaaataaatttatactaaaaaaattcaaaacactaaaaaatattaatatcaatgtaacaaaaataacaataaacaa

SEQ ID NO: 119341 - DNA, 1384 bp, Cannabis sativa
agggcataaaacccaacacggaccccatggaccatttatccaaatacaaccgaatgatgcaagtagtaaaagctagtgatgatgcaaaatgcatctacttttcattaactctgtcaaagttggtggaggactagtggaaaaggttatctccaagatcgatttgtaactggaaggatctacaaggaatgtttacgaaacaattcatactagcaaaggattccaacctagaagttggttctttaactaacatcaagaaacaactaggagaaagcctcaagaagtatatccaacatatgatggatatcgttgtaaaaaaaaggttactgatgatatgaagatggtggctttaacattagaaataaccattagatccttgctatgggggaacttcaaaagaaaatggtagattctttatctgacttcttatccagagcctaaggatttataaatatggaagatgcttatgttgaggtttatggagtacttccagcaccatcatcaaacacttccacaacacaaacttcacagatgaatgctccaactatctttcctctagcatctacgttcacaacacccactgtttacggacctggtacttccatacaatttactacacatataagtttcttcgactacagagtggcataaactacatacagtgccgctcttagacaagcaaaccaaaaaacataagtttcagaatcgaacgtaagttattcccagaataaaagtagttctaaagggccaagttgaagcaaatctgggaagaaaggaagaactcaagaaccaagatattttaagtataccaacttagtagatactcgtgagaatgtttaaaaagctacttgtaatatagttcattacgaaagacctccatctatgcacaaaggcagaaaacaaaaaaaaaatgacccaaataaaatgtgtgaacaccatgttgacattggagcataccacaaatgattgtaactacttgaaggatgatcgaagggttagtccgaaatggccatttatccaattgggagaggatactagttaactatcacgaacaagacgtagcacaaggacaactttttattcctggaaaacctggaaccataaatccttctcatagagtaggtctttagtaaaatcctagaatacaagctctgactacaccaaatgcccccgcaataagaccttttgttacttctggacctggaaacccatacctacccagagttgctccaccaacattagatggccatgtggaaacaatatctgaaggcccacatattgtcgaaagcaccagaaatgcacaaaagaggcacctgaatgagctggaacaggatgaagcatgtaattgttacgaaaattattaattactacgcaagtgcacgcaatc

SEQ ID NO: 119342 - DNA, 744 bp, Cannabis sativa
tttttttttttttttgaagttttgctgtcaattttgtataaattattttgatgccttgattctctaaggactcaatgattttaaattaaagcattttattgtgttataaaatgtctaacatatttatttttgtatgttaattatgctatgccggtttatcgataaatggatgtatgtaattgatcaaaagtttgtttattctcttattcagtttgattcttaaacaatgatgtagatgttactaaacaaaacaagtatctgattttcatttacttactctgttttttcttctgaatataaagtaaattaataatgacctctatatatggtactctaggttaagcgagtaaaaattgcattgcaataatgacagaatatgaaattatttgatgagcttcttgaatattcttgataaggaaagtcacatatatttatataatacttgtgtatttattttttcaatgcttaatgatagttttgatagaacttttatcatgatcatttttgttttgagtattaaatttggtgtgatctttctattagagttgaagaattgtggtgcagcaagtggttcatgagttaaaaaaatattcagagagaaagactcaatagacatactaaattaattgaaattttaattttttttactgctaaaacattttctaagcatgttagaatgactatttgaatgcaaaaataaaaattaaatatatttgtgttataaatattaataattatgtggat

SEQ ID NO: 119343 - DNA, 2574 bp, Cannabis sativa
  modified_base (104)..(104): a, c, t, g, unknown or other
  modified_base (1220)..(1230): a, c, t, g, unknown or other
aaaaggattttgtcagataatggcactccatttactggaaaagcaaccaagaaattgttggaagactatcaaatttttcatgggaagtcaactaggtactaccnacaaggaaatggcattgctgaggcatttaataagttattattgcggtgcttaagtcgcatggtgcacgatagtcctacaatatggcaagaatttatccctttagctctatgggcctatcgcacttcaaaatgggaatctacagggttcacaccattttctttggtttatggatcagaagcagtattacctgccgaaatagttgtgccatcagctagattagctatggttgcgggaatggatgtacatcaagcacgattagaagaattagagctaattgatgaatgaagagataaagcccaaggtaacttattacagtatcaaggacgtgtagctcaagcataagacaagcttgtatgaccaagaatattccaagaaggggatatggtactaaaagctgcagaccatgtgatgcgaggggcacatgcaaccaagtttgtacccaattgggaaggagcctataccgttaaagatataaaaggtagtggctattgcaccctcttagatcctaacacaggagtaacacttcctgttacaaatataaaatacattaagaagtacttttcttagaatgataataaaaggtctcaagatctaaaaaaaaataagacttaatatatatacatatatttatatcttcacattctctactctttgtgtcacataatatatattaactagtttagttttatttcattaagatgagacctaagaaataaaacttaatatgtatatacacatcttcgcattttctactcttagtgtcatacaatatatatttatatatatgtatattaactaatttagttttattgaaatgataaaacattctctactttttacattctacacgagtgagagtaaaacataacttgtaaaaaaaaaccaatactaacttaaaatgtaaatgtcattcgatatgtatatatgcattatacatacctaaaatggcctattacaaagcaagaagctttaaaaaaaacaacgacaatgtacacaatcacacacttcgaaatatgtgtatgcaccaactggtacaagggatagtcattacaaaaaaaaaatgaagctatctcaaaacataattaccggagatacacacacacacacacacacannnnnnnnnnnacacacacacacatatatatagacatatgtatgtataagataatacagtacatgtgtattctacctcaaagacaagctattgtgtaaacgcttccaagcaaaatagtaggctaaaaaaagaaaaagggaaaggcgtcataccatgaaattgtcaagggggagtataaacccaggtgttcgatggagagccttgatccttacaacgttgtttcatacttgctatcttatgatttagctcttcaatttctctaacctttatatcccgttcttcacacatcttttcaagttctcccaccaaatgacgatagcagatagatgagttgacaacctcaaaataggattcaacaatttttcctaacacagaaggtcgttctgggaaaataagactgagtatcttccaatactccaacaaaagagagtagtgttgctcagaaatttcaaatattaagcgaagcaagggtaaaaaaggagaacttagctgaataaatagtgacttcttgattggggaaagattctcaaagaaggaggtaaaatccttgtccagcgaggcataaagtgagaaaaatcatgatgtgtaaggcccaagtggggccaaacattctgaatccaagccaacaagtgccgctaaatatttaccatactcagattttacttgagtgtgttcaatcactaaaggattattagtaggagctgatgggcctgctttatgggcatcttgaccaatgttagccacggttgatgtacgacttgaaatatcctcttgatcgtgagagaatagatttgaagtttttgagaagtcaaggaatcctcccgtctgtaagtatatatatatatgtatgtatttgtataagaaaattatttataatatactataaagcaagaatgaagaggagaattaagtactttcataccccaaaggatgcaattgtaggaattggtccaactggaatggtagtctgaattgatccactaatggcctcatcatggctgctatttgctaagcaaggcaaacattgcaacttgtgatttgtatgagtttcagcacctttttcagataaattactaccccaacatgcatcacctaaaacactttggtgaccctccaaaaaagctgacatcatattattcgatatagacctagaaggaacatgacactcaccaaccaagccatgtccaagagggtctacaggttgtgtttcttgtgaagttttgtgtgccccagttttggtggtaagatcctcttcttctgtaggacctatcaaagatcaggtaatgattaatatatataaatatgggtatgcatgatatatgcatagtcacatatataaatgtgaatatgacaaa

SEQ ID NO: 119344 - DNA, 1032 bp, Cannabis sativa
accggttagggtttgggcgtcggagtaagttctaccgtagatctccaggggttgatccgatggccggagaacgtagaggaagagccatgctccgatgaggaagataagggcgaggagtgaaaaggggtgggagatgaggaagtaggcgagtacagctgcgattagggttacgtaattgacccgaaagtaagtgatgtttttccgtactcgcgaggcggcgtcggagaaggttgccggtctggagaaggcggcccggtcgacgaactcggtccagagacgacggttggagagcgcgtggcgagcgtggtggcggaggcgagtgaggattgttcgggcgaatagggtgttggtatggacggttctgattggctggtccgagtttgaagagatcgtgatctttggatatgatgacatcgatgggtcccgttggaagaccgtaaaagatttggatttgtcaaattcaaatcaaatgcgtgtaggaaatggttatctggatttttgactagcaatacaaatattaggattatgggaagaacatttaactaattcttaaaggaaattagaagaagaaattgaatagaaaaggaaaaaataaaataaaatctgttgtatggaattggaacactgtagtactaaataatttataatggcaaaggaaaacgagtagtgtaagtgttaggcaaactcgatactttacaaaatttgagtgatttgtaaatgttatttttaaatttgtaattacttaatttaatctacttcaatagacagaatccaatactaaatcactttgtttttctttttcagtgatataatattaaaaaatgtggagctggtttgtaattttttctgattttttttttttgaaagagtaaataacattttaactacaaagtcatcatgtacataattgttgaatttgcaagagttttagtgcatgtttggcatcataactaaaaaaactgttgtttgtttttaaaagcagaaaattgttttttgaaaacaatttaacatgtttgaccttatttttttaaa

SEQ ID NO: 119345 - DNA, 866 bp, Cannabis sativa
tgtgagtagatctaagatcctggtaaaataaattccaacactgcgtagccagaatatttacgcaattcgatctaggaagtttctacaaagacaagttgaaatagattttctctttgcaaaataagttttattttgattctccatttggattggaagttaccatcaaatttagttacattgtaatatggatgtgtattgatattgaattgtcaatccatttttatcgttgttagactcaattaaaaaaataaataatgcgggaaataagtaatatgagataaatacaatatacctaccataaataaaaaataaatatcaattttggaatttaaagatgatgcatgagtacacttagaaaaacacagaaaaccatttagaatttcaccataagattatccaaaggttaaagttccgccttagggtcggtcaaattaatatcgaataatctacaatacttgctcttttctttaataattacaactaaaatacctcttatttaccttataaaaataaagtactatttatttggtcaagtcatgtcccttagtatcaaaaattgggacatgattttgtgagtgtaacccattatttcagatttcatgacttaatttagtagcatcgccttaagagtcgatatcacactaaaatacatcactttatcctatccttaaaggaagccaaccttgacaatgtatgattcaacaccttcctagggggacgaaaacaaagacgactcgaggcccgtccccattccctcggtgttggactaataatggagactatgggtttcaatagagatgacaaccctctcccactcactattttaaaatgtgtttgttgttataaatattaataattatgtggat

SEQ ID NO: 119346 - DNA, 1434 bp, Cannabis sativa
  modified_base (155)..(160): a, c, t, g, unknown or other
  modified_base (327)..(341): a, c, t, g, unknown or other
tctagagatgttatgacaagactggttaaattttctgtatttgttcgtattaaaaattatcttaaaattggttatattaaaaaataaaattgttgaaaatatagcttagcgtcctatttttaccattttggaaaatatagggtccattttgtcannnnnnaaaacagagagtccaattaataacttttgcaaaatatagggtctaaaatggtatttaccctaatttatccaacgtaacaataaacttgacagcatatatgtcgtgtggttacagtacacagcatatatgcagtggcaccagcatttatttttaattattattattannnnnnnnnnnnnnnttattattattattatttaatttacatttatagatattgatattattattatttataagattaaaaatattatttttacaatgcattctcttaaaatttgatttaaaaattctcttatatgctaaaatagataggaggtgcatcagtagacccctaatacattataaaattttagtctatttttcttcatagtcatatgtatattatagttatttaagatatcctgcaaaattttaaaaaaaaaaattgaaaaaatttaacatgccaaaaatgaaatgtaaattgtttgttgcacgattgattcttttatttggagggatacattataaaagtacctttttaatttattgtgtgtaaatttaaatgtaaatactataattatttttattttattacaaaattaatatactaataagtaatttttttagtgtaatttttggtattgtggttggagtagaaataatttttgacactaaatttggtgatagtgtgacaccaaatttggtgtgctcctttgagatgctcttagttttatttttttattattaaataaataatataaaaaataggaaatatataataaaaagatacaaaattttaagttgacatatttaggatagttagaatctgtgcgacaccctaccataagaattgtgttctctcttttaaaaccaataagcatcattttattagtggagcactaagataaatttaagtatttatatcgcaaatcagtttttttctatataaaaaattagatttcggttagcaatctggattggtccaatccaaaaatccacagaccaatttagaaactttcttgaaactgaccaaagtaaaccacaatttaatcggttcaaactgtccaaaccaaacttcttttttgctctttgcaaaattaaagacttctttttttttacaatttcttctcctgaatctcctcaagttgagttgattggagagagaatatttattttatttctttaacatcattaaaataataacaaatttatatatcaaaacataatttaaatttaaattgataatatatataatataaaggaagaggtttcaatggttacatttttattgt

SEQ ID NO: 119347 - DNA, 1563 bp, Cannabis sativa
  modified_base (36)..(41): a, c, t, g, unknown or other
  modified_base (605)..(626): a, c, t, g, unknown or other
  modified_base (1532)..(1537): a, c, t, g, unknown or other
taaataatataaacaacaattttatttgataattannnnnnattattaaataaataattttgacacttataggattgaaattagaaaatatggcagtattggaagaatgataaatggttgaaataaaatggtaaaattgtaactaatggggtccattagtggctggccacttagtgtaatttttacccattattttattcttttttaatccatataattaaatcctaaaccctagttgaaatactataacaggaacatgatgatctcattctcatttaactcacttcagctaaattaaacttagttttaattctctaacaactagtagatgagagactcctttttccatagtgatttcacaccctattcattgttcttcatcaattcgagtcatagtgatagagtaccatgcccatacataggaagtcaagtaatcaatcatagtgcgaaagacggtggtagccaaacccaaaggagagaaggagatccaggcttagatcttgttattactctgcgatagaaaggaacaagggttagagatttgagtggaaggagtcatattatttcgctaccatcaatctaaggttttctaaactcttatgtgnnnnnnnnnnnnnnnnnnnnnnttcatatttagggtgttaatcaaacatacatgttagtaatctagatccttgtaaaataagttccaacaaggccacctcctgtacctacagcatgcagcatgatagcgacgttttgtctccttgggaccactttgtacctcaagccattagagcctataaatacccattttttagatgtgacgaggggttggaaaatcatacttgtaacaccatatttagagcaatagacatttctccattattctctcaatttcaagataacaatttgagtttaaatttcatctttatcttcatctcgttttcgatcatgacgcataagttgattttctggccacaagttggttgacgagttctcgccatccatgggaacgacaagcttttgtcgagttgttccttttcacacaatcaatacagaatccctagactctctcactgcctttaggatgtggagattcgtcttaacgaaaaccagttcatcgatttggggcaagacctccctccacccgtcattagagaagaaggcgctaatggtcttaaccctcaagtaagaggagaaaatgagagcattgtccagcctcgggtaggaggagagggcaggagtaggcgggaatatcaagcaaagcaaggagactgttgctgtagaaagaccctagtggacaagcaacgcgatggagttaccgcccccgtcatgaccaaaggtaaaggtatgacacaaaggaaggacgtcccatcaccactgaggcaccctcggccaccaacaccgcgagatcttggtactttgcgacattgctccgaaaaggaaaagcgagctaactctgtgagtctaaaatcccaaactctccactatgaatacaaattaaaaaatcttcgctggaagaaccaaaggctgttaggttttatgccctnnnnnnaactccatttcaatgtaatctatttt

SEQ ID NO: 119348 - DNA, 1901 bp, Cannabis sativa
  modified_base (62)..(69): a, c, t, g, unknown or other
ataatcgacaatgttgctcaatacaatttcccaatctcagccctctctttctcaaatatctnnnnnnnntctctctctctctctctttctcactctttctcactctctctagaaagtcccacacacacaaacacaagtcagccaatctctactggagcacccatcgccgaagttctcaactcagctggaccatcaaagttctctagtcaatcaaaaaatatgttattatgtatatagttttgtttttaacaaatctacacatttgtgtcatttttatggttttccagttttttgtgataatttataatatctagtgatgtatttgcaatgatagaccaaatttgaggttaatagtgaaatttagcgatgattagcgatgtttgactaaaataataaatgttgcatatttagcaatgatttttgggatatgagactaaaaactgcaaaacacatcgcttaacgttgctaaatcaaactcaaattttcacgatgaatagcaatgtgctttgcatgctttagtctcatatcgtaaatacatcgctaaacatttacaaaaaaaatattattttagtcaaatatcgctaaacttcatccctaacttcaaatttggtctatcattgcaaatatatcgctaaatatcgcaaaaagctggaaaacaaaaaaaaatgtagaaaaacgtataaaattcaaaatctatttttttgacaaaaaatcaacgaaacacaaacacaaatgtgtagatttgttaaaaataaactatatacatatagtttgggaattgccaaacagagagcaagagaatgaaaggtgttcgctggtgagtggtggtgggcagaatgcggtggtgagcggtgggctatggtgagtttaggtggtcttttatgggagagataatgagaggaagaggagagagaatgggggaagttgaaatgaggggcatttttaggtttatgtggaataataatatatttttgttatgtgtttagtgggtgaattgatttagattcatgctttccatttaagaatggtcacctaaatgtcccttgataaattgatgcaaattaaatatttttcacccttttactttaataattaaaaaattaaaaatataaatattgttgactagatttttagccaaccgacatggagtcgtaataaatgagaaattaaaccaaaatcgtaataaatactaataaagaacacttgaatttaaagaagttcagcccaaagtgttggtaatatcctactcttcttatattttattgatcaaagttgcaaaatcaagaacattctcttgaatgcaaaaagtcaaaatggctgaatttctgctctttgagtgatgattttttaatccccttcccaagtcatgaatgaccccttatatagggaatagtcgatgcatctcgcttcaggagacgcgaacttggtgctaaaatatttcaattgttctgttgattttcagagttggttgaggtctaattcttgcgttaacatcccgccattttcgtgggtctgtaaccacttttgagagttatgtgggattggacgacgttgggagtgtgttgggagtgttggtcacggtgagggtacccctagaatatggcctgatcattcgaccccttggtcacagtgagggtattgggttttgtgtcctaaataaaatttattttaatataatcagatttactaattaataaaagatcagaaattattttatattgtatgcttcccatgatttatttcatgaatatatgtttaatgtataaaaccatttcatccagaacatatagctattcatgattatagtgttgtcaatacagtagaatataatcatgattatatttttcaaagttttatgtctatgatttgttagtacactggatttagactgacatgataat

SEQ ID NO: 119349 - DNA, 939 bp, Cannabis sativa
ttttttttttttttttggaagctgttatatatacgatacattttacaacttgagactcgatcggactccacacacatgtatcactaagcgtatcttcaattggattgtccattgaagtgatcttgctacatatctaatgcggttcaaacttaattttaaaataaattttgagagtataaatgttaagtgttcccccaaaaagcaatagtcatgcaagcttggtcctaggaattaatgaattaggcttgtacttaaaccccacttaattcagaaatcaaaaggaaatttttttcttttttaaaattttacatttttttattaattttgaaaaaatttacatttttttagaataaaagcctaaaattaatttttttcttattacctactaaattttaaggtgagttcctatggtcatgtcatatatattttgtttttagaaaaaaattatttgtattaaaaaatttattaatttaatatttaaaatttgatatgtaaaataaattttagagttgtcaattattaaaaaatagtgaaatgaaaaataaaaaaaattaatattttaaaatgatatattaattttaacaactataaattttgatttttgaaaaactaacaataattaattacagtaaaatggtaaaagcgacacgcgggtttgaggagcgtgacaaacaatcgagaaaaatagttgtggtgctttaggcactgattaggatatcttaaatacgtggctctctttcaattggttcgtgatcagcacctaatgacgacatctttgtcataatgcttttcaactaccaagtaggtccactatttgtgagtcgtgatcgtttttgcagttgttcttttctcttgttttttttttttcctttattacttttcaataatatgtgttcttacttatatcttatacttagctttggaatataatgtaaagtg

SEQ ID NO: 119350 - DNA, 1557 bp, Cannabis sativa
agaacggtagccatgttctttggctaagtggtagaacttgtccaaacgatgttttcccttgactttacccatggctactgtagcttgcttgttggttctgaattagggttttaggaatgctttgctgttttggggatatagggttttgaattttgacaagtgttttccgtttcagaagcaaaggcttccctcagcaatgggccaagagaattgcagaaattcgactttatacctagggcaacgagggcaaaatggtccggctaaccctttaccctatgttctatgaattaattgatttaaaaaagaaaaataggatttttatagcaaattttgacatctaattttacaaattattgaaattgttgaatttaatgaattttgtctaattttattcaattttagtgatatgtaattgtctatttattaaattgtgtccaaagaattttaaaatgtatcaatcataccctcaaactttgacacgtattaaatcgtgtcccttaaactttcatcaacgtctcacgtccgttagtaaaattgaaatgaaatccttaaatccagaaatcttaataattcaggagaaattttttaatagcctaaaaaattcgagggacacaatttagtaaatgttaaagttaagcggcaaaaattctaattagcctttcaaaaataaaaattttatgtatgtgtaaatggaatagtttggtcaaattttaacatatttttaccaattcagtgtaaataacgagttacaattatttaattgtaaccgcacacttaaacaaaattgcatgtcattaaaaatgcaccagtggtgtctagtactttcttacgtattaatatcgctattggtacaattaaatatcgagtctcttataacttaatgtaataattttaagggtatcgataatcaatcgcaaaataatatgtatagaaagtgttagacatcactggtgcctaataacaacactctaaatttaaataaaaaaaatttctcaaattaataaatgagacgtaacaaaagtcgaattcttctccacaaatgtgaatgtaggataacatttataaaatagaccacataacattttttacttttgaaaattgaaaatgagagattatataaaaatgttggtaattgaatattttaatataaatatttagataaaaagattaatttgaacaaattatagggatgtgaaatatgtatcttaaattgcaatgctgaaaaacaatgtaaaaatatttttaattttaagtttcttaaaatttgaaaataattttagttagaagtatttacgattggactaattgttattttaaatgttttaaatttgtatatttaactattattattgtgatatttttcaaacttttgagtacctaaatgttgaaaatattttcagttgcaaatatttaggatctcagtaattataataattggaatatcttaaatattttctacacaaattttattatgatttcacaaattattaaaattatttacgttttaacatcttatttcattttactactttaattatactaggtgaatgtacgtgc

SEQ ID NO: 119351 - DNA, 1908 bp, Cannabis sativa
gagagagagagagagaattcttagttatcacacttcactagcattggtaaaattcttagttatcctttgaataaagccttgaatttttattctaattctaattctcttttttattgctctatctgtcactacgctaaataaaggaagttaccttttgcatctaatcataatattgatgaaaattactttgatcttatccatattgacatatgggggccttttaataccatactgagggtttcaagaattttattactattgtagatgattgttcaagatacacttggatacatctcattagacacaagtctgaagcccaaattgtccttccccaattcataaggctggttcaaaatcaatataacaaaactgtcaaaggggtaaggtctgataatgcaaaagagctacagttcaaaaccttgtttagtgaacttgggattatacattatcactcctgtgtccaaagacatcaacaaagttctattattgagagaaaacaacaacatttactcaatgtggctagaacacttctttttaaatcctatgttcctttagtttattggggagagtgtgtgtcaaatgtcgcgtaccttattaataggacaccaacatccaatcgaaagaacaagtctcattttcatattctctattctaagccacctgcatatgaacatttgaaaggttttggttgtttggcttatgcctcaaccttaagtcaatctaggtctaagtttactctgagatcagctccatgaatcttccttggataccctactggcatgaaggcatataggtttcttgacttaaacacaaacaatgtctttaattcaagagatgtttacttctacgagtagatttttccttttgttaaaacaggagtaatagctactccatatgaaagaatttctctaatgttcacggtgatgctgcttaccagcaattgcatactgatcacttgcatacagaccacttgtgcactgcacaattgcattctgaaccattgcatacaacacaatccgctccatctaataaggttttacctatgtctacccttgattctatatatgtaccctcttctaatcaaagtaagtgagggagacacataaaaaaaccttcatacctaaatgattataattgatttttggccactaaccctactgctttatcttttcatggctcttttattactccttatcctttgtctcaagttatcaattacagcaggttgtcaccagcttttcgagcagtttccttggccatttgaagtcactttgaacctgaatttttcagccaagctcatggcattctagagtgggataatgtcatggattttgaaattgatgcacttgaggaaaacaacacttggattgttgtttctttacctgaagatcaacatgttattggctcaaggtgggtttacaagataaaatttaatgctgatggcattgttgaatgatttaaagctaggttggttgccaaggggtacaaccaacaggaggggatagactatactgatacatttgcaccattaactaagttggttactgtgaaattagttcttgctttggctgctatgaaaggttggtacctacatcaattggatgtaaacaatcctttcttacatggagacttaaaagaagatgtttacatgtctttacctcaaggatataagccaaaaggggagctaccacacaatcttgtttgcaaattgcagaagtcactttattgtttaaagcaagcttgtaggcaatgatttgccgagttttctagtgctttggttgatgaaggttttcatcattctataacagatcactcattattcatcaaacacttcaatggaaattgcatatttctattagtgtatgttgatgatattattcttgcaagcaattattggaaatattttac

SEQ ID NO: 119352 - DNA, 2557 bp, Cannabis sativa
ttagattataatctagatcctgataaaataactttcaacagccaaagccaaagccatagctaatggtttctgaacaaattgttgcgtcaacattgatcttgacactgttatcaattggcttgatccatcgctcagcaccattgcccacaaacaagaggttcaatgagggaatactccccactctccctcaacttttatcgacgagactgtaatgcaaccgataccacttcagcaaccgaccaccccttctgctcccaaaccgtatcatcatgagttccacaaatagctcaacaaaccatagctactgtagctactctagactgtaatatgaaaacttcatgtttgatagtgactatttagtaagaaaagtgaacaataattactataagaacacactaaaatttcaaaatagaataataatgaaaaaaataaaagctagtgattcttcagttaattgttgccccattgatcaagtatattcttttataagtggtctttgtggtctgattctttaatggaattcgatctcttgatcttcaagctcactagatttcctcaattttggacttttgtctgtctagcaattattgtaatgttgaattttagaagtaaaattgactagaccatcatcaacttttctttttctttttctttaaaaacttacctatagtcaattataaagatcacatattcttttcccatggaaccaaattattcttttcccttttggtgctagtggaactctaatgagaagtctaatagacttgaaaagatgttcttataaccagttcagtttgattcttaattataatcttttggaccacaaaataaaccttttttttagaccaaaactcagtagaaacattattaaataaatatatctgccttccaacatcccaacatggcttcattttaaaatggagtactttgagtttgagctactgaaccaacctcatatacttctgctctcttctgctctttttctatctttttctaatttctttttttttcttttttcatttcttcttcttcttctttttctgtttacaatattttattttagtcacatgcacataaacagttattcactacaaaacatcttattttctccaatggagttgaagaaaatgatctttttcggtggtccttatttatgaattgggaatatgtaagcttgaggacaaataatgaatttatcaaaagacaattatagtgaattagaggggatatttctgattgtgactaatcaggcatcttttaatatattaataaataaatatttgatgtaggtataatggaaaacataaaaaacaaaactaagcctagagcatctttcctaaatcatatatctagtaagaaaaaatgtcaataatgaaaaaacataagttatatatgagaggttcgaattggcttatgaaatgattgataacctcccactcaagatttcttttgtggcaaaaaaaaataaaaaaattgttaatataaattggatgaaataatataaagcaaagaagtaggtgagggatggaaaattctgttctttcaaccaccaaacttaccctttcttgtagcacatggcagctttgattacatatcatattcttgtcttgaatgaattgtattttaaattctaataaaaccctttaagcatgctctggtattctcttggctgctattacttgaagctccaaaataaggccaaattgcctcgataattataggtttatggtagtaggagaaactgtgccaactggcaagaattccaaaaatagacccaatttcaagtgtctagaattttttctttttcaaatctattattaatgttaaggtctgaatgattaaaaaaaaaaatcacaataggaatgtggactcaaccaactcgtagaggaaatcaatcaactaaccaacatttatgatcattaagtgtttgattataagtgtcatggctgttaggtctaagagcccatcaacatgaagttgaagaagaagaagaagaaagaagaggatacctattgcccttccatattcttttttcttattattattataagaaagagcacttgtcatattgcagaaaatagtcagtttttttttccaatgatttgctttgtaacgagtaataatttatgtgtgggacaatgaagttaatttatctacttttggtctaacaggttatgcagttaaaaagctttatttttgttttctccaaattgtagtattgtaactaagatccaaactctctttcataatattttatgcttttaactcattctgctttttctttgcattatgtaaatcaaatgttctagtgtacagtattttttcattattagcatcatctatgaaactcccaatgttattttgaactgttcaaaacgtcactattatctcagcaatctcgttttccaagtcaacatcttcactggggaaaaaaattgatggttacatttatttgaattcaacagtacagtttttcaaaaggatatattgctaccaccaatttttttaatctaatttttaaaataactaaaatcttctcttttttatttgaataatt

SEQ ID NO: 119353 - DNA, 996 bp, Cannabis sativa
ttattggtttatcgttgttgtgacatagggccgatgtctaggttaacatcataactcaatcaatattgatccgattaatgcaattaaacttgcatttcgaagataattcaatgttctatcatgtctcacacttcaatctccattctgaaccatcggttcaaaatttcacctccaaggagttacaaaaataagtctcgagttacctagaatgggtcccgccagcctccgaaaaatgactgtcaccatcaaaagttaattttcactattggatcatcatctacagtcaaaaacatataatttatatttttttttctatttttgtgtgcctccttcatctataaatggagagctccctaagctcatttttcaaattcagaaaactaaccacaaggtcaaagcttctgacacatagcctttttctgtaaaccatcttatgagaaataaaaactcgaagtagacgtagcttcattactgttctacgaagtgaactactataaattagttatgtctcccttataattacttaataactatttcattcttgctaatttagtgagcgggtgtagcttagaagtctcgtccaaatttttgagtcaatagtataaaccgtagaaatctatcactgtgttgagtcgattctactcgtttcaagtctatgtgagtcttttctctatgtattccaaattatttcattgatgtgggggattgttggaaaatcatattaaatatatgataaatagcacatttgaggttagtgagtgaatgagaaattgatgcctaaatttgtggtctattgataactgttaataaatggagattttggtcaagaatgtaattaccataataatggtgaatattataattgatatatgaaattacggtgaataatataatgaaatttttacactaaaaatctaaaatgataaatttattacattaatacctatacacggctaaaccaacttttttacacatcttttatattttattactatt

SEQ ID NO: 119354 - DNA, 3031 bp, Cannabis sativa
gactaggaccacgatctggactagcacccaaacccgaacccaaacccaaagaaaacccagaccgagacccaaacccaaaccgcgactaggacccaaacccgaacctagactagacccaaacctagacgagaactggcacctggcccagaatcgagatagggacctaggcaacggaactaggaccgggacccaagacccgaccccagacccggacttgaacctagaacccagctcgtgactcggcacccgaaatggaaccagactgggacccgagatcgggatcggaatctggactcgaggcttggaccgaacccattatcagtgtttggatctgggacccaaccccggaccccaatccagacgaggacccaaacacaaacccagacctgaacctagtcccagaccctaacctagacccgaactcataccctgtaactctaaattggaaccgaaaccggaagtagaccaggacccaggaatgggattggcaccacgacatggacctagaccctgaaccgtaactagaccaggactccaaccaagacctagacccgaatcgggacctagacccgaacttggatcccaacccagacctggactgaagacccgaacctcgacccaaattcagacccaaacttggacttgggactcgggacttgaagtagaaccagaccggaacacgtgatggggatccagatctgggactcagaccaggatgcgatccagaccggacccaaactcggaccctgacccagacgcaggacccgaaaatggaacctaaacaagaaccaccaaatgaggaccttagaacaagactagaactatgacctagaactgaactcagacctagccctagacccaaacccgaacctagacactgaatcgaaatcgaaacacggactagggcccaaacccgaacatcgacccagaccaggacctacgaccaagacctggattcctggaccttggcatcaaaacccagacccagattgaaactcgggactcggacccaaacctggacttagactcgaacccagatctggaccgagaccgagatccgaacccgaacttggactcggactaggaattgaaccctgactaggtcctggactcagaccgagacgtaggactcggacttggataggggacctggaccaaggacataggcatcagaactgggacggagaccgaggacctgcacccgaacccggaccttgacttaggacccggactggaacttgggaccctgaaatggaactagattggacccgagattgtgatctagatctagacccggggcttggacctgacccgtagtcagtgtttggatctaggacccatacccagactcgaacccagaccttgacctagacccaaacccgtacctcaaaccttggtccgagtccgagttcgagtctttgtttgagtccaggaagtggaatctaagtaggacccagaccccgattcagaacgggatgcgaacctgaatcaaaactcgaatcgggactcaggacacgaacccgaacttaaacacggacttggacgcagacccggacatgggacccaggacccaaacctagattggggacccaaactaaaaattagaactagaatccagacctaggactggactagagcccaagaccccaccctagttccggtctcggacccagacccgaacttggacacggacacagatcgggacccatgatttgagtctaaacgagaccaggaccatgattgggatctgaatcaagacccacgactcggggcttggacccaattggtagtcggtgtctagatcttggaatggtaccaagactcaaacttggaaccattttagaccaggaccaaaactaaaactcagactcgacgctcgaaatcagaacaagaatcggaatcaagaccctagaataggaattggaccttgacccaaaaatgaatcttgatgaaaaaccaaacactgacccagacccaaactgggattgatacccagacccagacccgaacctggacccagacttgcccgggacatgcgacccagaacctagaactaggacccgtgacccgagacctggaccagaacccagacccgtatgagaacccagacccagacccaaactcataccaaaactcagactcgaacctaggactcagacccagaccgagatcaagacttggagctagacccggacaaggaccgagaccagaacctagacagggactagaacccagattgggaccaagactgagacccgcgactgggactaggactaggaacccgatactcgaccttgggacttgagaaccaaattgtgacccaaacccagacaaggccaagacccgagataaggactagtaccgaacacgtactgggaccttcactcgaactgactacgggttaggtcaaagcctcatgtctagatttggacctcgatcttgaatctcagccttgttctagtttgggtcctgggtcctaggccgagtccttagtatgggtttgggtctgggttcggggttttgtcccggtagtcaggtcctagattctgggtccaaggtcgggtcttgtgtctcgagtatggggtcaagttttgggtctcggtctcggttctggggcccagtttagggtccaagtcccccatctaggtccagatcctcggtccaggtttgggaccaggttcaggttttgggcccaggtcccccatctatgtcacgattttgttctcaggtccaaggtccgagtctcgtgtctcgagtcccggtcccatgtcccggtcccaatctgagttctagtcccaatacttgttcaaggctcgaaccggacccgaacctgaactggaccacgaacttgacccggaccgagacctaggacctggacatagagtggggacccaaacatgggaattgggcccccgaactaggaccagaacatggatcggggtatgggacccgaccctagacctaaacctgcacctaggactagcagtgttcaataaaatttacaaaccgcccaacccgaataaaccgccca

SEQ ID NO: 119355 - DNA, 873 bp, Cannabis sativa
ctaagatcctggtaaattaatttccaacagtggctggaagtgttgtttgcgctcatggccatgaaccgtttgacaatccttaactttacagatcgattgtgggagccttacaatatctgttaattgctcggcctgagctatcctttagtgttgacaaggtgcgtcattcatgaaaactcctttacaaccccactggcaagctgtcaaacgaatccttaggtacctcagtggcacaaccgactatggcttacatattcacaagtctatattgaatgatctagttactttttgtgatgttgattgggcatcagatcctgatgataggcaatcaacttgggttttgctatcttcttagggggagacttaatcacttggcaatgtaaaaagtaacaaaccattagttgattgagtacaaaagcagaatatcgaagcttagctaatggggtatctgaacttacttggcttcactccctttttagtaaactttagattcctcagtctaagcctccaattgtttggtgtgacaaacatagcacggttcttcttgctgctaatcccgtcttgcatgctcgaacaaaacatattgaacttaacctttattttgttcgagaaaaagttcttcgccatcaagtccaagtcaatattcttgccacagatcagtttgtagacgggttcaccgaatctgtctcaagccataattttcctatttttttatccgaactcacaattgtaagtccttccaattatgagtttgggggaagtatgtaacgtccccgcttcaaccctccattgggtctttacacccacggaatgaatggctcttatacatgagtacgtcactctggctgtttcatgcactgacgactgacccta

SEQ ID NO: 119356 - DNA, 1132 bp, Cannabis sativa
  modified_base (1098)..(1101): a, c, t, g, unknown or other
gacacttcaactcaaaggtgaaaagtcataccttcgacgttggtgatcttgttctgcgaagactattcacaacttcccaggaactgggagtggggtgcttggcccgaactgggaaggcccctacgagatactggagaaagtgggacaaggtcctttttaggtcaaaaaaatagacggatcaagggtccccaaggcctggaatgcagatcattagcactgatattacaaataggcaatggacaccaggtactgacacaatttggagtattttttttgtaaatagtctatgtaattaacttttgaatcgatggctttagccatcatgcaatgagaacaaaagtattttatgtttacactttacgctttacatttttttaggccaaaagctatgttttaaacaagtgatcaggaaggtggagacatccacacttctcagctcacttaggtggtatcatgcctagcttactatgcccccaaataacgtattgtaacgtattgtgtgttgcctttttttgttttgtttactttttttttgctgatgagttatttgcttagtataaaatacactttccacaaaattcctttgaaaatgaaaacctcttgaatcccttctcaaagcttaaataaatacactcaatttgaaagaagaagagttttcagctaaaattccctaaaatgggaagtactcacttggattccatcttgaaaacttttaaaatagagtcgtataaaaagtttagaacttttaaggcttctcttgaactcctagaaattttagtgttatcctgaccacgaaattaccatctgaagtctatagagtgtgaaaccagccttcttagataaaaaggccaatactgccgaaaaatatcaaagctctgtgatcattaagtaattcgagaatagcatagaaaaccatcaatgctttcagcagctttagttggctgaagaaattttcaaagggtcaagaccaaaacaatcccaccaagcaaaaaggtacttcctaaagtacctcctaagcagtagagggataaagagtctaccaatgtcataaggtttggagtgatagccgttggaaacactgttgggttttatgccctnnnnaaaactctatttcaatgtaatccagattatt

SEQ ID NO: 119357 - DNA, 1334 bp, Cannabis sativa
  modified_base (1291)..(1301): a, c, t, g, unknown or other
catttttgcatttttgcatttttttttaaacccatctaacaacctacatagcaatctcggtccaatcattccttcgcgtggcattagataaggagattcgttgttcccttattgttcattatttgtgctgaaggcagaaggccttccggctcttattcaaaactttgagcaaagaaagtggattcatggcatgcaccttcaatctctcacatgcttttcgcatacgatagctatttaactgtcaagcctcagaggatgaagcttctcgtgtgatgtctcttttgcataaatttgagattgtctcgagccagaaggtgaatttggctaaatctttgatattttttagcaataatattaaggttttcttgcgccaaaaaattatgttgatcacgaatatggtccaagctgatgagcataataagtacttggatcttccgagtactatgggtcgtaataagagttctgttctgggttttcttaaagaaaaggtgaggaaaagagtggaaggttgggatgaaaaattgctctctcgagcagaaaaagaaattctcattaaaatggtggcacaagcgcttccaacttatgccatgagtgtgctccttttgcctatcaaactttgtcatgaaatagaaagaattttatccaagtattggtggagttcctcttctggataggagagtgggattatttaggaaagttaggataggatggtggctcataaacacgttggggggatgggttttcaaagtttaagtgatcacaaccttgctatgttggggaagccagcatggagactcttgagtaatgaaaattctttggttggaaagatgtttaaagcaagatattatcccaatggttcgtaccttactgctgcctttggtcagaacccaagctttatgtggcatagtctttttgaagctcaatctctgacaaaaaaaatggttatcgctggtgtattgcagacggtagtttggtgaatgttctttcttgatcaagcttggcttcctcatcttgataacccgtttatctcatcagatcatccggcgttggatggaatttctgttcagcaacttatggtaccagtaaagagagtttgggatgttgatcttttggatgagcttttaaatgcttgggataaagagcttgtacaagcagttatcttaagtgagtcagtggaagaggattctaggtactgatttcatgaagcttcagggcactatactgtcaaaagtgcttacaaagttcttcaaactatcaatgggtgttagttttggaaatattttaccaggannnnnnnnnnntaccatgtatgtttcattaacatcttaatatga

SEQ ID NO: 119358 - DNA, 1510 bp, Cannabis sativa
  modified_base (1482)..(1484): a, c, t, g, unknown or other
taaacttaaagtgtataaaagttgcttttaccgtgttgtagtatatatgtaataaagttagccttttgtatttttagtgtaaaaatttcattattatatatgataatatatattttagttataaaattattataaaattctacataatttactttacaaattcaaattaaataatctattttactctagtataaattatattgtcattagtataaataaatattgagtcaactaatatttaagagaaatgctaaagggcatcagtggtgtctagcaccctcctatgtgtcaatatcgctattggtccaattcgggtcccatattagccaatcgcaacgcaacatgtcgagaagatgctaggcaccactgatgcctaatagcaatgctcaatatttaaagtatttctaaccatgttatgcaaacttactccttaaaatagaaagtgagtttaaaataaatgtgctttaaccattaaaaaaaatgactccctaacccccatagtagagaatgaaagcaccataatttttttttttttataaaacttttaaatattattttagttagaagtataattattttattaaattaatttatatttagcaaacttaaattataaaatattattaaaatattcaaatatgcagattatgatcttccttcataagaaaatagaaaagtatatataggctaagtggcagatatggacgtgcccatgacccgcctagagtttctactcaaaacccactaatagggtaaattacatgcaaagaagagctgattattaggtcccttgaaaactgtttatcaagaatttcgaaaactaaaatatttaagagctaaagaaatagtaaatggcaaaaattaagagaggaagatttttacgtgattcaagtgttaaataaccttagtccacgagtcaacctattagcctgaaagggaaatatcgatgaatttatagtattttgcaggaaatcctaactctttttccttagtttctcttcaaagaaggagaagattaatgatgattttagcagagtctttgctatgtgttttcagcttgaccccttgcataggagtgaaggagtatttataagctaagtggtgggtatggattgtcccataacccgcctaagatttctactcaaatcctactattaaagcaaattacatgcaatgttgagctgactggttggtcccgtgggtagcattctgaacgtgcatgctgcctctggataatggagactattttgtaccaattgaacatgtgtcacaaaaatatttaacctttaaaagcaatggacacatggcattcaaagcttgttcctttccaagaaaatttttgtaatgctcgtctagtaaaaagatggtggtgcgcactgccatgttctgatgtaggagacaatatcagattatgtcaggaaaagcataaccatcactatggtgacttggcgtatgagaaaagtctgttgggttttatgcccnnnataaaactctttacaatctgattagt

SEQ ID NO: 119359 - DNA, 2637 bp, Cannabis sativa
aaactccactaatcattgataattaatttataacaaaagttacctcgggtgttccaattaggtatttaggctaaggaaggaacatgtttgctacttcgttaacataatttcacccgtcaatcgagatcagcattttagcattctcttatagcatttctaaaatcagaacccgagcatgtgaatcatcgtagtctttgcaatgaactttgattggactctcatgttcatatagataagctcgggccacaatgttgtcgatattgttagagtagagatatactagctgattaacggccctctattcatcgaaattgtacatgagaggtggctcatttaggaaaacaaactgttgagcataattttgtggtcgaccctcatcctcatgagcgtattgttgtggaacatacgcttgatgagccacctctccttctttctcaaaaagtccggccaccatgcacatacaaaataacaatgttaataatatgaaaaaaatccaatttttttttttttttaaattaaaataatgtacattacaaaaatgaatgaaaactatatttataccttaatggacattgagattgaacgttttctcaacaaatatcagtggctggagttatccccaccactattcttcaatttgatactgaattaggaaaaaaattgaaacttttttggtgtatagatttaggtatcgaaaatagaagatttaaaaaattaaatgggctcaaatggtgcaaaaatggggaagatatggactggaataagggtggttggcgaaggtggcaggggtttgggtatgtctctactgctggtgtttggttcgtgaggaagaagaagtgaagcagacgaagctgatagggtttttatataatcctataccatcggttattaggaaataacagatggaataggctattcaaatcaccctcaaaattatctccctctcaaccgactctaaatgatatagtcaaattttatacctacagtttttttaaaaaaaaaaccgtctctaaaggtcaatcttcaatagatgagcatttttactccttttaactgtccttattatgaaacctgtagaaaaaacagactctaaaggatgattttgtagtagtaatttaataaaacaccaatttttataaaaaatgaactacattacatacgtggcaacaaccgtccacagtccacaaccgacaaccaaccgacaaccaccggaaatgttctcagtttgcagtaattatgaattggaaaacaaatatgtagattagtgtacatgagtgtgacacgcttcatatacaccactaataaatattgggatggatttctgaatagtctctcataatgtagtgatccagttccctcctctagtcactgtctcgctgacaccttttttgatcaaatataatatacaagtccatttaaaatatcaacaattaaaatatcacacttcccaaatgttattattattccattacaatgtatatatatatatcaacaaaggtcgttaacaaatgttattattattccattacaatatgtccttcttagacttaaccagtaataatctctcatcctttaccatcttattagcaaccttattattctttgtcctgctatataaatcatggttctctattaaaacaaattctccaccatcgcctccaaagcttccaataattggaaacctccaccagctcgggttgtaccctcaccgaacgctgcaggcctggagcaggcgctatggccccgtcatgcagctccggctaggcagcgtgccggttctcgtcatctcctctgccaccgccgctcgtgagattatgaagactcacgacattgccttttccaaccgacccaagtcctgtgccctcgagaagctcctctacaactacagagacattgcttcggcaccttatggcgagtactggaggcagataaagagcgtttccgtgcttcatctgttgaataataaaagggttcagtcctatagaaccgtaagggaagaggagaccaagctcatggttgagaagattcgaaagtcttgtgggactggggtgaatttgagcgagttgtttgtaaggctaaccaacgacgtcgtttgtagggtggccttggggagaaagtacggtgaagaaagtggtgggaagaggtttaaggagcttctgggggagtttacggagctacttgggggtttctatgtaagagactattttcctaagcttggttggttgagtcgtgtgagtggtttggatggtagaatggataaagtggctaaggagttcgatgagtttctggaaggtgttcttcatgaccatatgaatacaaataagaatgttgatgatgaacagaaagattttgtggatattttgctttggattcagagggaaaactcgcttggattttctattgataggacttccataaaggctctcatattggtaattattttttgtccttctttttcgtcacaatcacatatattttgtgccttttttttacgtactaaattttatactatttttagggtagtacggtttatattactttcatatatattgatagttttgttatttttcttttcctttaaaactggttttttttctttcaaaaaaaaaaaaaaaaactggtttttttttttttttt

SEQ ID NO: 119360 - DNA, 1258 bp, Cannabis sativa
gtgtatggttttccaaccttagaagtttgagtattttccattcatatcttaattaaaagttaatgaaaaagaaataatattaaaaaaaaaaatctaatttcatatattcatatcatttgttttttttacaagataaaatgcactcaaaaaaaaatattataaaatagcattagacataagaaaaataataaaattgtgtacatgaaaaaaagaaaaaaaaaatacgagggtctaacctatataggtataggaggagaccaaaataaaaataggaaatggaatagattgagatggaatatatataaaataggttgatgaaaggatgtatatggaaatgtatatggaaatgtatattgacgtgtttgatgattgataggaaaagggaaagtcaatacattaaaaataattaaatatcatattaattaattaaaataatttgaatttatttttggtatgtaattacatagtgtaattacacccaattctcatagggggtatgagaattggagagagtaattgaggcctcccaattacctttaattacacagttactatgtaattacgtggccacacaaatacaccaaaccgtgtaattaccttcaattacatccaattctaattctcaggtggctttccaaatgcgccctaaatgtgaatatattttatatgcaaaatggagaatgcacaagtcctctctagagctttcagtaagcgtgtttcttgttcccctttctgtatcctaattggatctttggttcattcaaattgattttgtggtggcattgggcatgttatccctcctatttgtcttcatcatttcccttcttatcacatttattgttgcattaatgattttaacgatcattatctgcaaaatatctcttcaaatgcggttttttgttgaattaattgcaaatcgccttttcttccaagatactctttttcatttatcttcctcaaatccaagtatcaaatcaggaactagctcggtagtgattggttttatatgaatgagtgtaggaatagaattgctattcccgaagaaagatcattcaagtatttggtttgtttattatcattggaaaactcattacataggaattgtaattcatgtaaactaaggaattacttttcctaaataaaatgatttgaaaagccattccataccagcttaaaattatttttccttttctacccttttcataaataaacgattaaggttataattatatggataatattttttattttaaaacat

SEQ ID NO: 119361 - DNA, 1268 bp, Cannabis sativa
ttacttgaaaaaagaaatgatttaatttattcaaaactgaagttcaaaatattacatcaaaaatgtcagttacaatcattaatttactggtagtagggtcgtaagtgttccacgttctagtagtaggggcgcttggtatgaggtattcaaaataatttaattataggaaatattatgaaagagaatgcgattgtaaaaaaaacgtgtaaacttttgtgtgtagggtaatatataatcatattaccattaattgaattacattatttggttgggcacaagaatcttatctattattttaaaaaattaaaataaaaaatattcttctatatgtatttagtgttaataattcataacaactaaacatttattcgctaaagaaatatatttatttattagtaaatattaaaatttattgtattttttattatttaaaataaatatttttatatattttattactatgtcatttatttacgtttgttatgctatttatatacaccatctacatgaacttcatgtataacatatgtatattcttgtaataatataaaaataactcagttttttcttacaaaaattatctcacaaactaaagaatattttttatatataataaattataatatatattaattttatttaaatttattattaatttaaaaatactattcaaattaatttaattgaagggaataattacactaacttctttttaagagtccacattaccctacttaagggtaatatgttaattaaggaataatattccaaggttaaaatctgaaaataaatatagtaatattttacattattattctgatgctaggtattaacccattccaaataatcccttaaattgttgaccttttacatttattttttttattgtattacataataaaataataataaaattattactttttattttttggatgaaataataattgaattttaaacaatactaaaaactaatacaaatatattacaaaattattttttataccaaacatagtactattttaaattttctattgtgatggtcttagaacatctccgtaaataagtaatacaaaattaaaataagctcacttaggccaattccaatgaaatactaaaatgtcaatctgtggagattttacactaatattagtgtcactataaactacaccaatttttttttattaattttttatatttaaataatatattcataattaaatgtttgtatatatttattggaaaatttacatgatgtactaactttt

SEQ ID NO: 119362 - DNA, 1062 bp, Cannabis sativa
ttattaataaatagttttggcatttataggattgaattgaaaaatatggtattattaaaaaaagaataagtggttgaaataaagtagtaaaattgtcactagaactagtctctaattaatttgggacgactgacttatcacattaagaaaaagatgttatagtatatactacgaattatcattacaaaatcaaaatgctccatttagttttacacattacagctagtctccaatttatttgggacgaccaccttatcaaattaagaaaaagatgatagagtatatactacgaatcaccattacaaaactcaaattctccataagcctatcgagttgcagatggagcggttacgtactcaaccgtaccagcagcatcttcagagagaacattaatgaagtttacatgttctgcctcagccacgacacaccacagcagtttcagttagtctcttattctagggactcgtctttgtagatgtcccacaatttatttatcaacatcttaatatcatctctctatatattttcctctttgcacctccatagctttaaaccaacacaaccaatatagtcatatgtaatgtttaatattgaaaccaaagactaaagaccaaacttttagaaggttcaaaaaggtatttaaaaaaaatattaaaggtgaaagttatgttaattatcctaacgcattcttggcttcatatggtgttgatcatactccaaaaaatataactaaaaatttctttagaatgtataataaagcataataaatcaacatataattgttgataaatttatagttttaggattataagtggtttagattatataattagaagagacataaaattaggttaaataataagaagagatacaaaattaataattttttatagaaatatatagcttataataaataaaaataattattattttttttatataatatacggttttgttaaattttttttaattaattaataattaatatttattaattaaataaaaaaattaagaaaaagagagaattaaagagagaaaagatagtgagattaaaatgatttt

SEQ ID NO: 119363 - DNA, 857 bp, Cannabis sativa
  modified_base (54)..(61): a, c, t, g, unknown or other
atagttaaatttgtttattacccattaatggataatacccattaagaagtattnnnnnnnnatatatatatatatgatattaattaatatgaaaaaaagacaaaaagaataaggtagaataaaaccgttttagagtgtcatgtcactcaatgaggaaattatactatatacttttttaacttgatgcctttattttttatatttttttaaataatcgattatgtttatctcttttccaattattctaccaattttacatctatcacttcatgatagtttttattcttctctaatcaaaaatttctcctaactttcttacaaacctacacatccatctacaagatcacaatttattatatttaaaattatgtcttagttatatgagtgttaaaataagagaaatactaaaaggcacccgtggtgccaaataccctcctacgtgttaatatcgctattggtttaattaagtatcgggttccatatagtttaatataataacttttagggagtatcgctggccaatcgcaaggcgacatgttctaagggtgctaggcaccactggtgtccaatagcaatgctcttaaaataatttaggtacaatacaaagatatatttgaattaaagtttatttaaagttaaatatgatttaagtataaaaaaagggcattttttatatatgtacgttataagataattatttatggaaaaaacaaaattaattttaattgttaaaaataggttagttttaccgaaataatgtacttaattatttatattcattgtattattatgttattgtcagcgctactaatgctgattttcggttttttttttctgtgcacttttttttttttttt

SEQ ID NO: 119364 - DNA, 991 bp, Cannabis sativa
tttttaaaaattaaaaaaaaaatgtatatattcttacaaactccctataaatattgtaaacctatttcaatgtttgatattttatatgtaggaatggagtcaatgtgaaaggctacttctactggtctttatttgatagctttgaaggagaacatgggtataacacaagatttgggttattttttattgattacaacaataactacaaacgcattcccaaaaagtctgctaaatggttacattgtttcctcaaacacaacataacccaaccttcaacactcttagaagaatcttccatgtttggtagcaacaccacccaaaagaacaatgaatccccaaatggtacccttacaacggctgctgtttccattatcggtaccttcatcggcttcttcgccttgtttgtgctccctactttttgtgagacggaagaacaactaatgatgaaccaatcttcatttaactaatagggaatattcatttaacaatagccatagtctcattctagctagctagaggcttattcagtgaatgtacattacaaagagagttagaaattttgtggttgttgatattgccatccttaaacaacttttcattttgcccaaagaaaataaataaataaataagttattacttttttattttgaagcaaagtaatgaatttcaaagacttaaaaggggataacaaactatctaacaaggtagaatcaaattgcatgctcaatattcaaagttggataagaattcaaaagatggaagaaactaaaaagcatttgtttgttgtggttataaaaggagtagttaccatcatggtaacagtgaaaagattgacaaaattacattgtattctcattttattttatatattttaatttttacttttatttttatattctttaacatatacccatttttataaataatatcttcattatatcctttaatgaaatataatataaagatatttttaattaatgaatatatataa

SEQ ID NO: 119365 - DNA, 1429 bp, Cannabis sativa
aaaatatcaaaatgttatttttaattttcaaaaataattttttttgtctaacatattatattttacagttttgctcacatattcggatcctagatttggaattaaacctgaactcggattcgaatggattcatgtcatggtatggtgttaaaatattgattttttttaatctaaaaatagttttaaaaaatttgtgtcaaacaccattaaaattttaaaatgacaaaaaattgttttctattcttacttttgaaaatacaattctaaaaattaaaaattgaaaacacaaccaaacagactcttgatatttataaacactcataatagctctaaaaggagcaaatatttaaaatgaagagtgttgtaaatctctacaacacaaactgaacacacacaatgcatacaaaccagaacttgaaaccaataagttatgaacacaatcaaacacaaaacagaggaaaattaaagagacgagacaaaaaaattatcttggttcgaatctcaatgtgagtcatactccagctctcccccaaggagtttctccaatatgtaaggttatttacaaacaccaattgagagtaatgcaaattgagaatcacacagagagaaattgacccttaaaccaccatggttgagctgctcgagacaccatgaatgctatggttcttcatcttcaaaagtctctttctttgactttcattcactcaatctctctcaaatttctctcttactctcttaatctcttcttacattctctcaaaagagattacaaggtagtgtttatataggttagtttaaactcacaactcgagcaactaacacttaagacacacttaactaatcttaacaaccttaactaacttcttaattaacttttccaagaatagaaagtgagttccaagactagttttctatggattactaactacaaattctacctaaattcatagaaaacaagtgataacttgaacttgggggagtgaacctaagattttaagtaggtccaaggttgagcaagtccatgcaatgattgaacttgctcactggcaacacttttgttcctgcatcagcatggttctcctttgtaggcacctttttcaattcaatctctccagattctatcttatccctgatccaaaacattcttatatcaatatattcggatcttttatgataaacagggttcttgttcaaatgaattgttgattgactatttgaaaatactgacactttccctttcagcatgctggtctcttgtagaattgtcttcatccatgttgcttctttgaaagcttctgtgatggctatgaactcaacttctgttgtagataaagcaaccacatgttgcagctgtgatttccagttactagaaatcattatctagaatatttcattaaactaagtgtgcttttctaaattaattttaaaa

SEQ ID NO: 119366 - DNA, 810 bp, Cannabis sativa
  modified_base (759)..(761): a, c, t, g, unknown or other
taagtatgtatttaggaaaaaaataatggaattttgtaagtatggaaattcaaatttccctatataaatagattaatagggactaggtgagatgagctgatgtttcaccgtattattaacatgaatatattaattggccaacattttataatcaataaaaaaatctaatatatttttgagaagttttttttggtatatatagggataaggcttatgaaagtataagcattaagcatgcaaatggcaataagtatagcctataggaagatattattaaatagaaagtagaatatatagtaccaaccaaacactaaaataaaataaagaaaaggtttataaataaatacatatatagtggggtactactatactagtgtatggaatatggatcatcaaatgcagtagtacattattaaacttctcagaacgcttcttattattttcacatttttatatttctctgtgcgtttgcccataattttgcccacctcttcttccacttccacccaccatatatatggtaatttttttaccaataaaattaaagttaaatagagattatataatatggtagtatgtatatttacatgtaattttttatttttggttaaaagaaaactactgcttaaaaagaattgataaaaaaaatggaaagagtactttttatatacatatctattctatctctgtataaagtgtgcttacgtaacaaaatttttagtttatgaaaaatttatggatgactttttatttatattnnnaataaaatagtttattattaaaaataaaatggtttacgagaaattcatg

SEQ ID NO: 119367 - DNA, 1536 bp, Cannabis sativa
tgataaaataatttttattattatcattattgttatcattatcccttgttattgttcttgtatatatattgataaacataatgtatcaaaacctagctccccttctctctttctcttgtgcgatcaaacaaccaccaccaccaccatcaaaattttcttttcttcagcccaaaagctagctcttccttctgcttgtagcatctaaaggtgaattatgaagaatggaagcttgaggtaagggttagtttatggttttcgtggaaaagcttaggttttaaggtttgactttgtgttttgtagctattatggggtcagtgagtgtttggttttacttgtgagatcctattggattggttttgatgttcatccgatagtttttctactattttgagataggaatcaagtttgagcttttaaagctcgaagcttgagctttaatgacactttttgtttaagtgcatgattttgagttctgttacgttaaaattgttgtatggatgttatataagtgttatgtgaagttttgaataaattggttaagttttggtggagttttgtagttgaaatttgttttctttttgtccatgtgacgaaatggttaactattttaaaacaattaaccatttttgttgtttttggtaggattaaaaatcgtattttggccattactttttactcgggtgttcattttagatgttctatgtaccattttgaagcttgcaacgagctctacaatatggtatatattttagagccaaagtatatgtattattttagggtatttataccacgagattcggtaaaaaatcttaaatcgtttaatacaaatattaagcaatgttttgggatagacacttatcgatttaccgttgttgtgacatagagccaagattaccaagaattttctccacttgggttggctaacatgcatgaatctagattaaaggtaagaaaagtattttgtactacatggcatgttatttgagatataattattatcgtatgtaaatcgattgatatcaagattaagaaacgattattatcgttatatgataaaatggttgtcttattagacaacgatgtaaagattgtctgatttgacaatgataaaaaggttgtcttattagacaacaatataaagattatctgattagataatgataaaaaggttgtcttattgaacaacgatataaagattgtctatttagacaatgatgtaaagattgtttgattagctaatgaaaaaaatattgtcttattagacaatgataaaaaggttgtcttattagacaaagatgtaaagattttctgattagacaatgatcgataggctatcttattaggcaacaatatttagatactgaacggttaggtatcaaaagtcatgactataaacgggaaccgttgttaagtttcctacttgtcgattgtctgattagaaaatgacagatatatatggatgccaggttagggcattaaggttgcctaattaggtaataatacaacatgcatattgttatcccaatttttgtcctc

SEQ ID NO: 119368 - DNA, 927 bp, Cannabis sativa
cgacttgcagcagccaagccagcaaactcccagcaagcccaggcaaaattgcaggaaaccagtatgtgtaattcggtttcagcatacactccacacatgggacaaatattttcaaccaacaccttcttaatgcaaagattgactttggtggcaagacaattagaaaccgccatgtatcccttccttccattagtcttccttttcaaatagtgcattacttcaaaagccaccatgatgttatccgatatcaaccttcccgacacaaaagcgctttgagtttctgagatagcatagtttaaaacattcttcattctattagcaactacctttgaggcgattttgtagataacattgcatagtgagattggtttgagatcgcccatttgggaagggtttttcttcttcgggataagaacaatatcagtgtcatttattgagtccggaaactgacccgagtcaaagaaatcccgaacaaacttgaccacatctgccccaacaattccccaatacttttggtaaaaagcacgagtcataccatctggccccggagacttgtctggatgcatttgaaaaagggcatttctaacttcttcctcagaaattatcctcaagagttcttcattctgctcacggcttacagaaggccgaataccatccaacaccgttcccatgttaatgctagaagtggagaaaaaatcatgaaaatagctagttataacattggccaaacctgactcccaattaacccacactccattactatcttgaagccgagtaagactattgttcctctttctagaattagcaattgagtgaaaatacttgctattcttgtcacccgagtttaaccaaaattgttttgatctttgcttctaaaatatttctttttgagccaacacctctgccaacttatccttcccttctttg

SEQ ID NO: 119369 - DNA, 993 bp, Cannabis sativa
aatggctgtgttgttgttgattggaaaaaataatttgtagttgtttcaaattttatttggcattttaataggagaagcataaaagataatgcttcattgaattgattactaagtaatgacctgtttagagaagtctagaaccaaaatgggcaatacttcattgaatagctaccaactaataacgcgcttaaagaagttgtgaacaattatggtttattcatttgcatctcttcagcattgttgttagtatttgacggatttcttttagaactaacagaggttttaacagtattctgttaagccacaagaaattctgttagataggcatttattatataggtaagagatatgtgtgttggtgtgcgagtgtagtactttgacattgagcaaatcagtatgacttgcataaaaaccatatataaactgatcatttgtagttaggggctttattacatatgaaagatacattgtttcatactatatattgatccttttagtcccataaccaattacatataatccaaaggccagttggagcatatagagaagaataaattagttagggtggctatgctgtcctcaaaagataaataaagcttgtgttcaaattatgtaagaatgaaattgctctaagtcatatgctggccttgtagatgtaagccaattgtttgtctgtgcattctattttacttctccaaggaggaagttttcagatttgttgtagaagtaaggcatgctcaggcagctaatttggtggttcattcatgataggacatgagtctgaattttaatgtagactactagacattttgggtggttgtgtgtgatcgatttaaagtgaaaatataaatattaaatattcatttttttaattaaattaaatttatttaaaagtaaacaaaatgccaaaataaataaataaataaaatgccatttatgttgaagtgaaaacaaaaattattagaagagaaacaataggttgcattaagactt

SEQ ID NO: 119370 - DNA, 1468 bp, Cannabis sativa
gatgttagtgagattttatcctgagctttctttcaatgatcaagtgcaaccgtggctgatgcaataacatccgaaacaaaggtctttttttccttccaaaccgtattgttcctagctttctatattgtccagcagatcatagcaattttacttacttgttcagcagtggccgtggcaaaaagaagctccaaccagctgcaaaaatggcctttaggatcaaagacaaaagagactctgatcctcctccaacaggcgagagcaaagttacagaaaatgagtgcatgggttgttgttttaggctgagttttacatactgggcagacagtagacacttcaacatacttaataacaagatttacacaagtggggagattgtttgtggcagccctccacaagaaatttctgactttagggggaatacacaggccccaaagatgatcccagaaacctgaaacaacagtaagttgctgagattttttctgctgttggagaagattataagcactctttaccgaaaactcctctgtgttctcatacatccaggaccaagtatcacagctagcattatgagtgagaggaattcctaagattgcagcagcatccgaagcattaaacatgtctctaacaatatccacatcccatgctcgagaatcagtgagaaaaagagagttaacttgtttattcaccaacccagaatgatgcatcaaaacatatggattcttcagattgggaagccatggatgatgaagaatattaacactcgtacgagaaccaatagttctccgaatcccagaacgcaacaactcttgagagctccaaatactttgccaaacgaaggtaggattagaacccaactcggcagtgggaaaatccgaatgaggttaatatctagctttatagattctttccgcgagagaatcaggattacacagaagtctccacccttgcttagcaagcatagcaagattgaagtcatgtaaattacgaaagataaggtacttttgctgctattttttttattaggatgatatgtataataattacaaatattaagataatttcgtcgcaaatatccttatataaacataatactttttttcttgcaaagaaaaagttatgagttcaattctttccttaaaaaaaatattctaacttagtggtagtataaagcgattattttaaaaatactcaaaaattacaaaaagcttatgcttttacaaaatatttttttatatatatttttacgaaatacatttttacagactttttttttttcttacaagactattatttttttttaaaaaaaaagactgttattttcacattgcaaaaatatattataataatagtacaacatgaaaacaatgttattttctctctaaaaattacaaatccgtacaaaataatccataaaaacacaaaaaaaaaaaaaaaaaaggaaaacccttggccagagctggtccaactt

SEQ ID NO: 119371 - DNA, 1268 bp, Cannabis sativa
ctgcaccggctaccgggactgagccgagccgaagacggcaaacaatccggctcggctttgtagctagaaattagctcgtcggcttcggataatcgagtcctgtatttaaccgggtgtgctctcagaatcggagcatctcggagcaccgtattgacccaaaccggatcttcctcgaggaataaggtagcgccacgtggatttagggaggtccacattagggagtcgcgtccgacgccgaagacgaggaagttgcatggtccgacggcgcgtagaacgtcgaacgagacgcggatctcgtcgatcgattgctgtggaacggttgatgacgtggcgtagtggattatggcgaggagctgagtcggcttcgccttgtactcggccgccttggcaatcgcaacggggtccggcggagggcagggcttgcggttgaggagtgaggagactttgttgtagttgatgttggtcattgttttggtggcggcgagtgtgataaacgcggcggtggtgattatgagggcgagtaggcatggccgtaagcggtggtgaagcctgagagtgtgagtgttggcattactgttagtagtactaagcttcatcatgtctgtctgtatagtactcttctttctttcatggaaaattgattttgggttatatttgtatttatataattattggttatgtccacgtggattaatagaggattgagattatgtccacgtagatttaatttttgggcacttatctcgtgtacgtatgggaggtaatgttttgaataatttttctttaatatatgccgacagtatatttatatttcattatgttccatattaatttttatggtaagagtaagtagaggcattaaaatatgtatgaagatcaagtaagtgatgtatagttaaaataataatatgttataataaggtgtcaaatggtgatataaatttggcaaatagaaaatgttaaatagggaaaaaaaaaatattgcttatttacattatcataaatatataattttattatttattaataaatttagttatatcattatttatgaattgattatattttttattaccttacataaaaaaaattagaagaattaccctatatattgtttttttaattttaaatttacggttcgaatttctaaagtggtttctttggcaatttctatgtgagttgctatacgattttttgttgcgatttaggttgcagcactagttgcaatatgagtttctatgtagaattccgtaaaaatacaaaacaaa

SEQ ID NO: 119372 - DNA, 916 bp, Cannabis sativa
  modified_base (567)..(590): a, c, t, g, unknown or other
aatattttaatatttttgaaaaaacttcctaattaaacctaattacctaaccagaaaattactttttatttatttattattatttttgtttaaagtctttattaataaagcttctcccatgagacaaggtggaacatctcatccacctataattacttattttagctattacttataatctatagttctatttatttttgtatttataacaacttgaggttgaactagttgaaattaagccattaaattatatatatttaattaaataatagaattagaaaatcaagtaattaattattgaaaatatatatctctatatacatattagaatttcttacactacaaaaaaatttactaattataaattattatttttatgttgtgactaaaaggtccgcggctaaatatattagtcacaaaaattataatttgttgtgactaactaaatgtatttttagttacaatacttgttgtgactaaaactaaattagaacttgtaactaaatactatgttttagacacaagtaatattttgttgtgaataaaaatcacatttagtcacaaaannnnnnnnnnnnnnnnnnnnnnnngtcactaaaaatagcagtttttttgtaatgaattaggtgtattattagaattttataattttgcataaaatatatataatatgatttcatattgatttatataaatataaattgaaaaccatatatgtgtaataatattaatttttaataaatttatatatatatatatatattccaaattagattcatttgatctaagtatttcatccatattaataataggggaattacttgtttttttaaccttttttttttttcaaatttacggtttgggtttctaaagttatttctccggtagtttctatgtaggttgttatacgattttt

SEQ ID NO: 119373 - DNA, 2645 bp, Cannabis sativa
tgtcagttcgatctccattgttgtaagtactctctcaaaaccctaagcttgagaaacatacaagttagtgacgagtggtttgcgagccaggtttcagagttagagtctctcgagtgtttgaaactcgtaaattgcaaaacactacaaactatcatatctacatctaacaataatatagagcgcattgagttgattaattgtgagacagtagcatatatcaaagttctctctccaaaactcgaatattttcactatcattcttccaaagagtttagcaccatgttattacagctttatctttaccaatgtgatcgtttaagagatgtgagactagagggtgcaaacataacaaacaaatggatcaaagaccattttaatccattgtggggttttagggttttagagaacttatgcttgaagagatgcaatcttctacagaaagttgagattcattgtagtagaattagcaaacaacatttgaaatttgttgagttgattgattgtgagaatgtgtcttatgtggagattgatgccccaaatctagtgtggttcaattatggtggacctttgccatctacagttgtggtaccatccattaatcttgatgctcagatttctgttcgtggtgattataataatactcttgactattaccaaaacatgaggaactttctaagctattttggtcattgcaaaactttgactctcgtttgttctcatgaagaggtatatatatatttattctttattatcattttattcatctatagaaatttaccctatatatgtgattttgtgataacattcataataatttgcaggattttatctttcctaaggaagcaagagaaggtttactttctcccttgtgtgaccttaagcatctcaaaataaagttcttgaaggaaattaaattagccaacattgtgcaattgatcaagtatttattttggcttgctccttctctaaacactatatttatcgccactaataaaataaaatcaccgacatttatattgaaggtatgtacacaaaaattttcaactatttacttatattttttctatatttaattttaagttatttaaaattattttctcaaattattatcattagcaaatcatgctttctaaattattttgtccattgtaaatttttttgatgaataattctcaaatataggactttgataagtttttatcccatgtttctaacaaaatattaaagtagttgatgtgatttatattttctattcaatatcaactaataatttcttatttattagactagattatgattaagaacatgtttgatagttcaaaatcacttgagatggtttgaccacaattaagaatgttcttcaatagtgcaccaaatgcacctaatttacttatgtcacataaaaatattgtttagctcttaataaataatcgtgtatatgattgtaattattattttcttttcttaatgtatgtaattagttaatgagagtttaaattgaatgattaatgtgtagctatattactctaataaaatggaggaagaagaaggtggaataatacaagagtgttgtgttgaatatcctgtaaaatgctggcgacataatttggcaagagttgaagttacagataattttgaaggttatgaagaaagggcaaagttattgcacatttatttttccaaaattcctaatgttacaataaccacaaactctcctccaatcataggtattttttaagaattattttaaggttaatcacatgataatttgtaatggttctttagaaaaaaaaatatattaaattatcttcttcttattctatcagattcagagtattgaaggatctcgtcgttgccataggatctaatcgagcctctcaaactcaacaattttgaatgggaagatttggtctctggtgacaataagtttttgatgactgggaatgtcattaaatttctttcagacttattaaaataaattctgaatattttgtgataatttctaggttgtttctttaattttggttggctttaaaaatattgagattgtgggtttgtttctttaataattggagtattttctcctggattttagatttggatttggattatattctggataatttggtttgatgaactgcaattttatttgtgttctttataatttttcatattttattttgaaattttttttaagtgatgattttgttaatttcaatcagtaaaatatgaaatttggtagagaaataacatatatattataaattaggaaccttattcagaaaaaaaaaaaattaggaaccttagtacattactttttacattattggtagagacatctcaatttttagtaagactgaacatttttatcaggtttgacccagacttggccaacccaaaaaaaaaaaaaaatcattcattgcgggtgggttgcattcaacctagtggaccctttcgggcaagtttcaagattaattttttaggtgaccgaattttgggttagagggcctgcccgtaaaactatttttttttcttacataaactttaataatactacaaatataaagggaaatttcactttttggccttaataatacaagccatatcaaaatttataccctcccttaatttgtacaaatttagtc

SEQ ID NO: 119374 - DNA, 4492 bp, Cannabis sativa
  modified_base (2003)..(2010): a, c, t, g, unknown or other
tattttaatagtggtatatatattgtatttgttgtgtccttgtaatatacacagttaaagtagttaggtcataattgtcttgacagttatgacagttagtttcttgactatattggacacctacaaatacattgtacagttagtaattcaagtaagttgtttgagtagacattgtaagcttcttgtactaaagcaataaagtatgagcattttgtctctgtgcaatttgttctaatggttaattggaattctggtttaagtgatgatcgaagctgtatgtttccaacagggggtatcagagctaagggagttcttgaagatcttgaattagttaagagaagaagttcttagctgatgggaaacgcaaagtttgatctggcaaagtttacaggcaagaatgatttcggattgtggagagtcaagatacgagctttgttggttcagcaaggactacaagatgctttgctgggagaagctaaactgtaatatccagagaaataatatggcatttaattttacatgttttattaaatatgtaattattctggtaatgaggtaagattataatcttactagggttgtttagtgtgattttagtaaataattaattaaagtgtaatttattaattacgaaaattttattggagtatgtagttaccgtaaataccatttctggaataaaatatcttcgggcacaacgactgtggaagctcggtggagtagttagaaatgtcacgacaataaatgaaggattgttttggaagtattccagattaatttagaatttaaggttatcaaattggtggttaattagaattaccaaattacccctagggtatgtttagttaagtttttttgagtgagtgtattctagtcttttcatgggtaattacttttttttttaattttattttgagtagtgggctgattactatattagttgtatttttttttataaaaaaaaaagattaattaataagaaataaagcctagagaagactaagtcaacaacacctatcttcttctcccttccctcttgttcggaccctagaaaccaaccactaggaaggattttcttcagcttctccttcaagtttttggaagatttggtcaagctttgggattgtctaagtataggagtaagttttcctacttatttattgaatttccatgagttataggtgttatcttgagttagaattatttgaatccaggtctgtagtaattgttgagttgtagaaagaatctgaaagtctagttgggctaaaataggtttgatttgttggttattgagttgaatttggaaaaattgagttttgaactcaagctttggttttaacttggtgttttatgaaattctttggagtgttgttaattgatatgtgggatgagttgaatttatggtattgtattgctctgggaggtttaaacaggtttgtaggagttttgtgtggttttttgggaaaaaactaggttttcccgtttctgccaactgagaaaccggtttaccggtttttctagcagggaaaattctagttttagcctcgaaacttgttttttttgctcagggtgtttttcagaacctaaattaggataatttagcgatgtttaaattgtctaaatccagtgggagttagatgtccgattatagagattagggtttgattctagagtttggataagctgtttatcggattttgttgttgtggcataggacccgggatcgtcgagcgtaattccactcaggtcggcccgcacacctgatttatggattgaggtaagaaaagtgttatgtatcacttaaggttaagtgattaacaactgtgtgattatagtctcgattatgatcgagaacgtgattatatatctgctaagcctcagttacgatcgagggttagaaacaatcattaccattacgagtaattactcttgaaatcgcggataggtttcttacttatcgttcgttgtatcgggcaacaatagtgacatatacagctcgtggnnnnnnnntggtaagggtactttataaagtacgaagattgtgtgattacaatgatgtgtaattattaaagcatgaataatgtgtgatgtgattaaatgagtgttgtatcgtttatagttttattcacttttcttgctgagtctctgtaactcgcaggtcctaaatggtgcaggtaaagggaaggccaaacttgagcagtcatgagttggaggtcgtaggtgtaatgtacatatcagtcgcggtgccatggcccggtggacacgataacccgttttgattgtattttgaagcgtaaacatactttgtaaaagcacttttggattcgaatgtaaatatttcggtagtaaggaatcccgtaaatattaatacttatcttttataaaattatgcgtttgttttaattgcaaaagttttaattagtcacactttttagtatagtcatatgaactagtaacagaataatttttttaaagcacacatgtggcgtccctgttggacagggcgttacaacatggtatcaaagcgccaaggtttttagatcctgaagactggtttgatatgtacattaattgtgaagattcgctcgactcatggtttagtaagttttaattattagattatttgttaattacctgactgtatgttcattttgaatatgttagccgttggaaagtgtgaaaagtttgagatgtttgaaaataattattagtatcgtcatttcttggaattcgaccacaggtgtatagattatgcacccgaggcagactggtaagggtaaccaagagcttgctgggctcggggttggccctgagggcgagaaccctccgccagcaccaaattgggaggagttatatgctacaatgtaggagaccatccgacaacagggtgaacaaattcgagagctgagggagtagcgagctcagctcgttccaaaccctaatcctaatcctttagcacctctgtaagtgctaccaaatgcagggaattgcctggcgccgttgtacaagtggttcaggaagtagcacccgccagtgtttaagggtggtgatgatccactcaaagcggaccagtgaatgagtatgataacatcaatttttgattttatacgagtcgaggataatgatcgagtcagatatgccatctatatgctgcgggaggatgcccgtatttggtagagatcgtgtcttagtgtcatgacctgaataacatgacctgggatgccttctggacattattttacgggaagtattataatgagtctattcggaaagcaaaggcagaagagtttatacgactgactgagggtagcatgacagtgacagagtatgccaccaagtttgatcgactgacaaaatttgcttcagatgaagtggctactgaagctgctagaaaagcaaaatttattcgaggattggatgaacacattgcttgggatgtgattgttgttgccaaacaacccgagtttgttcggacatatgcacagatatttgagttggccctagctgctgagggtgcagaagaccagatacgaaagaaaaaatattgcgagaagagattcatggaagcagacatctagtgttggttctggtaggggtaatgatcctagtgatcgcaagaaaaggcctaatgaaccatcaactacaggcccaaagaagagattccaaggtaaccaaggtaaccaagattttcgttgtggtgggaacaaaaattggcagacttttcgtgaatgtccaaggtgcaagaggcgccaccagggtgagtgcaggctagggcctgtttatcagtgtggggtagtgggtcacttgaagaggaattgcccatagctgctgcaaccaaaacagaagaaggatgatacacctgcttctgcttaggtgtttgccctgactcaggcctaggctgatgccggcccttccactgtgacaggttaactttatattgctggtactttattgactttctaattgattccggtgtgacacattcttatatttcaagtagaataattgagaagttgaataggcctagtgatgtactttcaagaggctttggaactttactacctactggagagctagttatctccagtaggtgggtttgatctcttccagtagttgtggaaggaaaggagttatcggtcgatttgatagaattaaatttgaaagattttgatgttaattttggtatggattggcttgctaaatacaacaccactaatgattgtaaaagaaagatggtaacttttcagcctgagggcgaggacccctttgtatttgtgggcaagatgcaaggatcccggattcccctaatctcagtgcttaaggcaagagatttgttgtgtgaggggtgtatcgacttcctagcaaatgtagtggatactacaaaggaaccactagtgggaccggaacatgttccagtggttcaagagtttcttgatgtttttccagagaagttaccggggttaccaccaaaacgtgaaattgattttgagat

SEQ ID NO: 119375 - DNA, 901 bp, Cannabis sativa
atctcatgtgagcaaaacaagacccaagatcacccaactaattcaatctcatgtatctcctgggttacacttattgtcatgattatcaattcaatctctaaagataagcacttgaactcatatccaccatacatgcctatataagccaaaagctgaaatcaaccataaatcacaaacaatactctaataaaacaacatgagtaacttagtccttttatttgagtttaacggatctgttagaaaagagaccaactgacttacagaaaatgcgatcttggggactattaccgacacctggcattttatttgagtttaacggatctgttagaaaaaagatcaacggacttacagaaaatgcgaccttgggaactattaccgccaatttttgaggttggggactaatctacatcaactttaagttttggagacttttaccgcaattatacctaaatagtgtgaacgcatgttgtttatttttcacaactttcttttggtctttttatattattattattataaaaaaaaaaaatcattcgtttgaagaccaattagtaggacactagaactgtttaaataaaaacaattacttgacttgagtcctctcttcactaaagatgtccttacaaaagtaaattattctctttcggcaacaattaatgtaaagttagtgtaatgcacttttgcttttataataataatataaaagacaaacaataagtttgaataattttctctaaattttaagggtaacttaatggtaattttattttatagtgatttatattattcttactttatatatcttgagaaaattagactttatattttttttatattgtctttcttttattattactcttttttttaaagtctattatttttacctctttttttaaatatt

SEQ ID NO: 119376 - DNA, 2772 bp, Cannabis sativa
gaatgaaatcaattaataaagtatcaacaattacaaagacaattgacttaaacaagtttagactcgctctaaattattaaatatgtaatttagtgggtatcagagtaggattacaatcttactcaagctaattacgagttaattagtgaaatgtgaggaaaggaataaataaagtgtaatttattaattacaaagatttttatcggattatgggggtattgtagatactattttcaaaataaaatattttcgtgttcggcggccatggaaactcgacaaggtggtcagaaatatcacgacaattaagatgatttgtattggatttataccggactagtttaaaattctaagttgttagttttgtggaatatttagaaaatgaccaaaatactcttaagttttaatttatttaagtgattaattaagaagggtgtaaaatagtcttttacttagtttgttctttatggattaattacctatgctgaataatactttaggttagattagatatatgtgggttaattctttttctagaaaattagagcattaaaaaaaaaaaaaaacaagaaaagagacgcactaaagctcttctccctcttcctccttcgacagcccaaaaacccagcaagaaactaggttcttccttgcaattccagccagcatttagcatgataaaactaaggatgtgagtctcctaagctgtaaggtaaatcccctacttatcctttctaatttttttaggtttaggttgaatttggttaggttttgttgggattttagatctctatgagttgttggagattaggtatgattttaattttgaattaaatgttattcaagtttgtttgagttgtttttttggctgctaggtttataattaggagaaattgagtttaggagttcaattttactctttaatggtgaattgtttaatttgatgaattgttgtgaattagtgatttgaatactttttatttatggtattgaattgctctgggaagtttggacatgtttggagctaatttgtgtggtttttgggtgaaaaccagtttttcccgtttctgctagctgagaaaccggttaaccggttttactggtgcagtaaaatcggtccaccgattttgctagcaggggaaaattatggttttagcctcgaaattggtttttactcggggtgtttttcaaacttaagttagggtattttaatgatgtttgagttattccgaaccaatggagagttagatatgtctggttacgaagttagggttattccaaaatttggaataagttgtttattgagctttgttgtcgtgacatatgaccgggatgatcgagggtagtttcactcaggttggcctgcacacctgactattggactgaggtaagaaaagtattatgtactgtttgtggataacgattataattatgatagtctcgattatgatcaagatctcgatatgtgtatgttgtgactcgattatgattgagaaaaaaatgatatgaaatgattattatcgttgtgactcaattatgatcgaggaaaatgatatgaaacgattattatcgtcgtgactcgattatgattgagggaaatgatatgaaacgattattatcgttgtgtctcgattatgatcgagggaaatgatatggaacgagtattatcgctgtgactcgattatgatcgagtaagagatacggtcattaccgttatgagtaattactcgttgaaaccatagataggtttcttacttattgttcgcgttatcgggcaacgatagtgacatatatagcttgttgataacgagtggtaagggtgatttataaagcactgagtttaggtgattatggtattgtgtaagtagagtgcttaatgaagtactaaaattatgtaattataatgatgtatgactagagtgctttacaaagcactgagattatatggctatggattgaatggatacctacttagtgaaaaggtgaaattattaattatgagtttatatgattattcttatattgtgttatgaaggtgttcgcgtagatgtactgatatgtttatgcatgttgaatatgtattgatccactgatatgtatattatgttgtaatgctagtacttactatactattatctagtagcttttcttactgagtcattgtgactcacaggtgcttcatggtgcaggtaagaagaatagtatatgtgttcagccatgagtcagaggtctcccaacagtttacatataagccgtggtgtcttggcttctgggaagcaggattgacccctttttctgtatttggaaatgtaaccttgattttgtaaaggttaaattagttgtaaaagaactttattagcaggggatccccatattacaaccatatttataacaaaaattttagtttaaaatttaaccaaagattttaagtttaaccaaactttttcctaaactaatagattagtgataataagtttgttttttttttttttgaataaaatgataataagtttgtaagagcacacacacgtggcgtccatgagagtcagggcattacattaattgtacagctcgttgataatcgacgagtttattgaaaattgtgattaattagaattttacttaattaattataaacattaaaataccatatttacaataaactggcatcctgtttacaaaattatttacaaaagtttcactatgcatatacaaaagtttattgcctagcgactatacaaaataagccctgatgtctcaaagatcgtacgctccaag

SEQ ID NO: 119377 - DNA, 4672 bp, Cannabis sativa
tctttagtgacccacatttttgtgtgtgtcactaaatcatgtcactaaaaggctaaattgtagtagtgaaggctttcatgttcttgattttggcttataggcattcagtttttgaacactactattatgtagccttaaagccctttactatggacgtatgatcgttctggctatcttcttatggccttgacatgtaagtatctgaatttacttttctttatgtaaagccgaagtatgcctgcacttgacttagagaaaggcttagtaggttattctaagcgttaaaatttctctgcattagttcttcatgctagtttgatccattgtatagtgtaggtgcccaccaagtgagcacgaagacttacggtctcttagtcacttgcaattgaccaagtttcatagacattgcatgggaatattcttggggtgctatctagtgtacgcatgtggaactccaaaaggaataaactttttaaagaagttatctttattagcaagtgatttagacacagtcgatcttacgtgtaacaaaatcttataactttgtgtcgcttttgaaatcatgttgtggctacccttgcgtggcttaccacgcaacgaccatcactgaagagtgacaggaagccatgctaaaaagcaatgggtactaactcttttatattttgctaccattgcagggcttaccgtgcaaagacgatcactgatgagtgatgcaatgccatccgtgaagagcgatgggtactagctcttttatgggtccttgcatggcaaaatgttagaggaactaatatacaagttggctaatgagagcacttaccgggatgttctctattctagtattttggttaaagagccaactccaatttctcgttgtactcgccttgcttgtatgtacctttattgttatcttgtaacttggagcagacctttttagtagggtccaatcatgcttgttgtaggatctttgttgccaaggaatactcttcaaggagtaagtcttttacgaagaatttttttcctcaatttgtgttttgaagggcctcgttagtctttgtgggcagacatgctgctttgagttagcttggtctcttcttctttccctttcgtcaagggatcctactagcaagatgtgttttacctcttgttcactgtagatcagaagtatgagagcagactgcaggtggatctggctagacagagtaaaaaccaggtggccagccacattgagggagcattgcctagcccgttgaatgaggctatggccgatcaggctgtggaggtattggctggctaggttgttgattttatggtcggccagcctgttgtggccaaggtcggacaaccttttggaggccaggtcaatgctacagtttaatcccatctatacttgattggctttgcctccgacatgattatcgtagagcctttgtgcactcctttcaatagctttttagcttttttcttggtaatgcattttagaggttgtattgggataccacgtctatgtgttatgttgtgcaagattggacaccctgcagccatcccccaaatccttactttctgccatggtttttatttggaagtatgctgctgtaggtgtatccatgttggttatcaagcatgttcattccttttgaaacaaagatgcttagttctttaaagaactaaggggttaccaagtctaccttggttgtcaagggacagttggctagtcgagcgagtgcgttggctgttgtgtgagcttcggggacttcattttagtatagcctttgagctgacttaacaagtcttaatattagctcaagtaggtcatcatcttttgtattgagctgcatgttaacccagagcatgatgtacgactagttaagagtcgtggtgtatgtctaggtgttcacccgcgctttgtgtgctagcttgagtcgaacaattagagtaacttattcagcctcattgttagaagctttgagtctgacctttagtaatcgctcccaggtgtttttagggctaggcctacattgggcaagtggtaaatgcacctcctaggttgagcagttttgctcttgctctcgcttctttgctggctttacttttctcccaaacattgagagatttggggagatatgcttctacatttagccatgaagtttgcaagatcttggcctttgttggccatgcttggttgacaggtggccttatattgtccgagcctcggttgtctacttgagtggtcggccaggtgctacaagttttggtgacacctatcaccgtggcttgttggcatacattgcatcgggagttttggtaggagagtgaaccatgcacacttctcctcattctcccttacacttcatggcgtaaggaaatcgttgaatttcccttttttgcgatcgcgttagtcagagccatcgttgttgtgcttgcctccaatattcccattgctggagaattgatagagatcatctgtgctggttggtacatccgacagcacttggggcaatattatgccctgtgtctatttagcattaacttgccctcttgtctgcgctttctggacaacttcttcaaactttatgaagtcatcagctctctcaaggaactccttcatgttgtttgttaagatccttctgatatatttccataattcactcaatggtaggattcctctgagtacggtcgtatatcggccttcttctatcatgcttttgacgttggtggcctcagccatgaacctttgaatgtagtctttcaaagcttcatcttgtctttgctttattttacaagatcctccagtcgtgaaggtatttgtcttgaagtagagaactgaatgtagaactccggggagaattcttcccaagaattaaatcttcctcaggccaacttgaaataccattgttgggctatttcaactagggtagctggaaagattcaacatcgcacatcgccaaatacttgctggagatctacatggatctcaaagtcttttaggtgtgctgggggatcttcttttcccatgtcatcttccaagttggcatattgaatttgggcacaggcaaggcattgatgtatgtttagaaaggttagcccctcgacctatctagctcgaggtctaatagtttttggccagtcaagcccttgacatgtctcgtatatttgagatccaacagttgcttgcacaaaaggatctgttgttgtaggggcctcgttgattggcctttcttaattaagctgcaaacctagattgggcagagcatggccgaccatagcttgggaaaggatacgttcaaggctagccagccctgagtctggcagtagtccatggctggccaggcccccagccctgtactgggtagggcctagccgcccactcttccttcactggctaattgagcctgtccattgacacggagtagatcacaccaattgttggagattggtggatctaaatgtctaaagttattgtattcactcctcaggttgttattatcatggatgcttccacccattctcgagcctaaccagttaaatattagcctttgggtgactcgctcttgaatgtcccaagatgggaattcaccttgttggtcagccaaaggtgcacttctaaggtgctggacgaccatgggtgtgacaattggggatgttgtagtgcaagaaattcctttctggcccccaggccaattgctacaagagtttggccattctcaccaatggatcctttttgtaaggcttgtcctccttcatgtcggggaaggtttgtcctagttctagtagaactatgttggatagtttgtttgtagaccctcccttatctttcgattagcctcccttagagtggatctcttatgagatcctgacctcttcttgcaattctttcgtggaactgccttattaagtcgctaccttctctcttacaatgatcaaatttttcctgataagatcgaaggatgtactcttggtcatccatctctcaaaaatttacatctctattgtacgagtgcatcgcaacaaacagcgcatggttcttcaacttagctgacttgataaatatcctctctaagtctagctaacttgagatcttcccccaagtctacatggggctcgccctggtctcgtgtctcaagcatagtaatggggatgaggtccaaatgttgttcttggggattgttccccaagggtccttccttcagtggaaggcgcctgtggagggtcctcccttggaggcaatggctaattgtttagatccaccgagatgtttgtgttatcctggccaactataggggccagattcatggtgcctactgagatggcaggaatgaccacatctgcagtgttcatggaaattccagtcatggctggaacatggacattaggatctacaatcagggggtcttgaggaagagctaatgatgtagatggttaaactggagctctcgtcgtgttaaccatggtatttgatcagttatggtaccaattcgctctcaatgaaagcaccaaactgttgacctcagaaatgtgccaactgatagcagagtcgaattaatactgatgcttgccacgtcttactcaattagagttagaaagtaaaagaacacaaggatttttatagaggttcgaccccctaagtttgtgggtaatgacctactccccttttagttgtattgataccgagaaa

SEQ ID NO: 119378 - DNA, 922 bp, Cannabis sativa
ttttacgtggttcaggcgttaactatccttacttcatgagtccattttattaggctctttggccagagattatttatgcaaatataaaataatagactttgctcttattctttcgtattcctcttgtataagaagaagcttagtaagaatatgttgaagttaacagtaggattacagaataatgtgttttcttggtgaagaaaaggtctttgatttgtaagtgaaagtatgaaggatggatcaggaccccttctcttgtgcattcgttggagtatttatagggcgacgtcatggcatgggctaccttagctggatcttcatagagatgaacccccactgttagattgtgttatacacgaaattcagtttcacttcaaaaattgacacgtgtccaatatatatggaatatgaatcaattctaaatgatataacgtgtaacaccctgatacctaggcgtgttacagttattttctaattaatgtgccacccttcctaatcaaagagtttattttgaaaatcgtgccaaattaaatttttgatttaatactattaaactttataacatatatatatttacataaattgggatcccatgtttaaacttttaaaatctatatcaaaatacttttagtaacttgtcacacgacgactacaaaatacaattcaagttgtctcgagaccgaacactccaggtcgcgccgtctcgacatgtacaatcatcccccgagctcaaaactcactcctgttctacctttgccttttcttaacctataaacagaaataatatttgtgagtcgacactcagtttgaaaagtacataacaaaaaatatactaccgacttgtatctaggcgcccatatacctatccacaaggcttattagataagtaagagccttcttaacagttggcactattggccat

SEQ ID NO: 119379 - DNA, 1712 bp, Cannabis sativa
aaaagggcccaaaaaaatattttttttccctatggcctactaaatttcagggccagccctggttggacctgagaatttaattgataagaaaaaaccagtaatatttatcagctagtttaaaatatgacactgaggaaataattatatagattaactaaattaaaactaaatcttagaaccaattatgtataataacaaaagcattaattaatacaaaaaccaattttatattgcagtcaactaaaaaagtaaacaaacatatgatccctaaagtaataaaaagatatatcaattacaaaaactatttacttaaaaaagaaaagaatacataccaatttttttttaacaaaaacttataaactaaataaaaaaaactcattacattaaaaaatttaacaaaaatataatataaaaaaaaccgattatggatagtaattaaattaaaaattaattcacataaatcaattagctaaaattaaaattaaatatgaaaacaagttatttaatatacttaactaaaaaattaaaacaaaaacataaaaatctaaagggatttttacatcatatattgaaattttcaacttcttttcttttttattgtggggcagaatttttttcaaaaatactaaattttttttttcaaaaatactatgtaagttttatattatatacgtgttaattaagttttcactgttattccacggttattttttagttgttctactgttgtttttaattgttctattttgttgttttacagttgttttaggttgttttataaaaagataatattttttataaaaaaattcatgtaacaataaaattataaacttttgctcaaaatccaatatttttgtaaaaaccccaaacctaaaataataaaatgatatattgaaacaccaaaactagttgattaaagaaaaatatatcaccgtaagagaattcttaactgataaataaactcaaatcattgaaacgggttgctttaactaaataaataaaaattttgactcaaagaaaccagttacattaaacaaccaattgaatatcgtataaaaagaaaccagttacattaaacaaccaattaaaaatttgacacaaagaaactagttacattaaacaaccaattaaaaatcttaaacagaaaaaccaattacgtgaaaaattgttattcaaaaaaaaaaattacgtaaaaaattgaacaacataaaacaaccaaacaataaaaaaaattgatacacaaaaaggagttagtaaaaaaaaatataagtatgaaaactagtttcgaacctaaaaacaaaataataaaaataaactgaaaatataaaataacatcataaaattgagcaattacattacaaaaccctcaaaaaattggtgaaccctatgaaaccagtttcattagtcaacccaatgaaaaaaagaagcacacacacaaaaaaaaaaaaatactcacaaatataatcaaaacaatacacaatgcacaacaaaaatctaaaaacaaaatataaatgtgaaaaccagtttcgaaccctgtaaaacctgtttttaccgtatacaaaatcataaaaaaacttgtgaactcatacaaaatcataacaaaacttataaaactaatttcgatcatataaaaaaaataataaagcaaacttaaaataaaaaatagacaacctataagaatatttttatttaaggaaatatatttctattta

SEQ ID NO: 119380 - DNA, 993 bp, Cannabis sativa
  modified_base (46)..(46): a, c, t, g, unknown or other
atatgaggcttgataaatccttaagagcatttctagagtttctctnagtgtccatatgagggaggaaatgacttttaggacaaagaccgttgagccttagtcaagcattgtgtgtgttattattcttcttcttcttctctagctttcttgtaatcttgacgaaatacttctgtttttattttgagtattttgattgtaattttcatattctctcttgtaatgagaacttttccaacagtgacaaagcaccgaagcctccgcccccactgggcttttagcaaaaactgcaccgcaaaggagacctacgctgcatcaaacaaattaaaatcactattgtcaacatggtactagacataacgggctctataagcatatcacttaagtatataatataataggaatattgagggaaatactactcaaattacacatttaattacacttaatctttcacaaacttaatttttggtgggaaaatctctgaatctcacttctgttttgctcataattgcccatgtgcacacgtagcaaatctgtaatggtctacataatattaattattaaaaataattttaaatgtttaaaatttttaaaaataaataaattataaaaaatattttattttatttaattctttttttattttccttctttttatctttttctcccccgaaaccttttcacctttaaaaaccacactcaccaaaaccctatcttagaacaaccccaaacgtcctaagaaaataactgtccttgctcggccatgactcaaggtggtctaagatgccaaaattgagcccgacaacctcaaaaacaagagaggtccaacgaggcttgacaaagatcaaagagaaggatggggcatgtcacgatgttgggaccttggcctttgtcgacgtggtggaggagcaagagagatcttcgtcaacgtcgggaccttgggccttcgtcctaactcttgtccggtctaagtcgagagagagagagagagag

SEQ ID NO: 119381 - DNA, 1249 bp, Cannabis sativa
  modified_base (1219)..(1224): a, c, t, g, unknown or other
ttattcttatttataattggcctaaattgagactgattttttttatataataaattagaggttatttttgaatagagtattcttaaatagaggttctacaatactttaatatataattggtattgatgttggtctctcatatttgtagaggttatgatgtcgatacttatcgtttttattgtattagtgctttaagattttagttgtattaaatttttaaagaataattttatgtaatacttaattaaaaagatttgtaatatttagttttcatactttatttttttatatatttttaagttaatattaaaaatttatttttataagttaaaattcaattattaaattgaaccaatctaatattgaataatgtaggagattataatgatttttaaaattcaattactaactaaattgattcggaaaaatatagaaatattaaattaaatcaaatgcccatttctagttattgcatttgagtgtaaaaatagaatagcaaatattaattactaatcattggagttattatgattttcatttcataagtttttttctttaccttaaattcttttgtttattttgactaaatcaagtgaataattattttaggataatttcagttttagcattaacttttattcatgataaagtatatatattaattattctaagaatccaatgattattcctttattactacatgcaatcatatattaaatacttatattttctaaaataactatttgtatattactttcttttttatgaatgaaccttctcattaggcctaagccaaaagcaagtccaaagacttatattaattctaactaccaactcttatcattaagagagagaactactttagtaagatggagcgattacaaaataaaaactcaaaaacattaaacaaatatcttgcaaaactattataaattgccaaataactatttgtttattacttaatagtatactatatattcattctaaactatacaagtcaaataaatttcataatttaaaagtcaaattctatttataaaacaaaattcatttctttttattccaatgaattgatctattaattttgccttgatgcttatgttagttttacagtactaaattaagtatgtagcagaagcatttattttaattatcattgtaccaacctaagaattccatgtacagtagaacctttatttaagaatactctattcaagannnnnntctaatttgttataaaaaaatcaag

SEQ ID NO: 119382 - DNA, 921 bp, Cannabis sativa
aatagtaataaaatataaaagatgtgtaaaaaagttggtttagccgtgtataggtattaatgtaataaatttatcattttagatttttagtgtaaaaatttctaaatttttttaatattatatacattacatatttttgaaccgacgtcgtgccactttttctgctatttaattgttgtattttttttttaataaaaaggtctagagttgaccaattcttcatttagaaaaagaaagagaaagagactaattccaattttctattatgtgaatttcatttattagaggggtttttaccttgtatattgaaattttttattttgttattttttttactgtggtacagaatttttttaaaaatgttgtattttaaaaaaaaaaaatactacgtaagttttatacggtatattatgttaaattttcacggtcatttttttagttgtttcactgttgttttagttgttctttgttgttttacggtggttttataaaaatacaatatttttgtaaaaaattccgtgtaatagtaacattataaatatttgtccaaaattaagtatttttataaaaatcactttattatatggtaacttcagaaactccacataaatcaactttagcaaatttcaactttttttctatgcaggtctacactaatataaatatatacaccaggcatatataactaagaaatttccatagaagagaagagacaaaagttaaagttttcaaagattaatgttagtaggaacattggcggttaaactacttgaactttaaattttttaacactcaactacaaaaacgattttttgggagaaaaactacctaaactcccattctgttttgctctgtacccctccgtccaaaaatcacagttaagtgtcgcagtggactgcccacgtgtacacacttgtacac

SEQ ID NO: 119383 - DNA, 2233 bp, Cannabis sativa
  modified_base (1485)..(1497): a, c, t, g, unknown or other
ttcgttggggtcgaatggcttcgtatgggtcgtgagtcttcctggctcgactaggttcgtgggtcgtgtggggtcgattgggttcgtgggtcgtgtggggtcaactggattcgtgggtcgtgtgggtcgactacgtctggtggttcaagtggtggtgagaatggtgcggtggtgagaatgagggggttaggtggtgagtttgaaaccgagaaaggaagagagagaggagagagtgggaagttagagagatggggggaattgaaatgatggaggtatttttggaagaaaattgaaagattggtatattttttttatgtgttataattaggtataattaaacaccatgtctaattttttagcatggattttcaaatttcccttatgaaaatctttttcaatcacgtgagattttttttttttttggtagcactataagtaatttaattttcttaataagcaagcttccaaaaaagtgaaatcagtccccacacaatccgaagttttgtaaatagctaggttgatctttaattgatatccttgctaagaaagggtcaaattccttgcttgacatgtgaaaaaaattaaaaggacctttttgggcatatgtgtggtgaattaataccgattaagaattaaataaaataagaatggcagtacaagaatgaatgaatcaaacaataatataaactaaaattaaatgtagaataaattaaatacaatagagacaatatttaatgagattcattttttttgtgagaaaatgttttttggccaagttttattcgaacttcttcttagggtgtcttgcactttagaaactaactcacttaaaaaagatgtgatcaaacacacatattttctttaacatccatccttatttattacaatgtaattatcatctaaatttttctttagattgtctcctaaaaagaattcaaagccttatatagacaactcaataaaaagaggtacacccaaatcagtaaacttaaataattaatttgggaactaactaaacagacctataacatttaacatatcacaagatgaaataccaaattactaaatttcccacaatatgcatgattacatatttgtatatgttcaattatgtatacatgtttcaaattcaactcatcaacacatgcaaatttgaaattatactagctagacaaatattttcatacctacttatctacctaactatatacaatttataagtggggagtagacaagaaaccaacttaaggcacacgcaaaaggcataaatacacacatatataaatgtatattattaatgtatacaatgtctaagtattcaaacaatgagttcatgcatgccaccagagttggcacatatacacatggcgatgaagaagatcaacttaggccatgggacactatgtagactgtagtaattatatgcatttagatccaagatattttgttgcaagttcaaggaagtatattattattattattatnnnnnnnnnnnnnattattattattattattaagaggaggtggaagtggaggtggggttggtcaaagtcaaaaagttttgaatcccaaacatagtttccaaaccttatagggttgcggggtatttgtaataaaaataatcaaaatttattaagttgaaattaatatgaaatgaaaaacccaagaaaataagagaagagaggatgagcattcctagagcctattagcttatttgatgagaggattttatttataatagcaagagacagtcacagacacgcatgagccttggacttttatattacattaattgtttttcttatcaatttattcaactatttataataatatataataagctcaaatcccatctctctcactctctctctctttttgtaattaattaatatattagacgcatctaatacattttagccgtattatcttacaattaattatttgtgatatttttttaaaaattattacattaaattatataaaattaatacttaattacaccaacacttcaaaagataagatgatagacatgcaccttttagaccatcccaacgagatgtaaaaattgtgttatattcaagcacaaaaagtaattttgtggtaagtttacactaataactttataatcaattttattattattttaatatgtaagataataaaaaaaataatataaatatttcataatttaatgtgatagttaaatatactaacactacaaaaaaatttactt

SEQ ID NO: 119384 - DNA, 917 bp, Cannabis sativa
agtgggataaaaacttaatcaaggaaaaaagagtgaagtacgaaactcctcctcctccttttggcattcttgaagatcttttaatcaacgcattcgaatcttgtgaaccatcttcttgaatgttgatgtttgtaaagactttgacacttggttgttggacaccaatatagtcattctcttgaagatcatttgttagggaagaattttgtgaaaatgtatttggtttattgtttgactcaaaaatctagactagacttttaagccacacccgctcgctagattggtgagaatgaaatagttgttaagtaattataagagatacataacaaatttacagtagttcattctctatatcgagaatgaaatagttgttaagtaattaaaagaaattgagttcctgataagaaggaacaatccccacttacattagtatgtccaagccgaccaaaactaagcacaggtccaaaaaaacaacgacccattgccccccccccagattgttggtaacttataggtcatcattggtggaccctacattgttgggaacactagcaaagcgttggaccgctatgctcggacatttcgtcacgagcaaagaaacgaagtcctagctgtagagaaaagagatccaaagcaaccacaggtagaagagtctgtcatcaccgtcactgaaaaagatattgtccatgttaggttccctcataatgaccctctagtcataaccacccaaatagggacataatggtagcacagtgtatggtggatgatggagccacttttaacatcatcttcaaaattgtatacgagaagatagggcaccatttgaaagatttgacaccttgtgcacagctcatgtacagattctcaggccaagaattggctcctctaggttacatctggtattataatcggtgaaa

SEQ ID NO: 119385 - DNA, 764 bp, Cannabis sativa
ttttttttttttttttgcatccatgcaagattttggagcctattagttacttcaaggccttaataaatgccctgatctttcttcttggctttaccttttctttgtttagtcccaaaatgatagttgatattttattttcaatctattcgcccatacctcatattcaatgaaaatcatataccccatttcctcattcacgaattacttttttttagttatttctcttttttttatttttcttttcaaatggttttctcaataaacaaactaggaaaacaactcggagagcttcttctaaaagagcaagactcttttcttcttgatattttcttgaatgaaagaggttatgaaaaaaggaataaaacaagagataagaggaccaaaatccctaaataaataagataatcatcaaaatacttagtaattttacacaaaatcaaataggcaacttcacaaaatctatagaaaaataaaagtgtctcttacttccttgtaaaccaaatgaattaatttcacagaaccaggaaccagaagctcacaaagggatgcgaagaaagggaagagatagactaatatcaaaaggatcttaaagttaagctctttcaattcaacaaaaaaaaacagacatgcaacactaaacttaccacacttatcattggatagttgacatgtgttatctcattaaaggttataaataaataaataaataataagagttattttgtatagggaaattttactttttgcccctaataaaatcccca

SEQ ID NO: 119386 - DNA, 1325 bp, Cannabis sativa
ggaggcaagccgtggcagcagcctcgagcttgcacctcatgcatgtagctagctttactcacgaacaccttcctttaaccgatagatccaatccaaatccaatgattcaccacgcttacaatccaaatattgagcttcttatcccagatgcaatagtccctttcgggtgtgagttgttaacccgtttagataacccgatcgaagatgatcatgcagatcgggttttgaaggttattgtggagatcacgcgagcctttggatcacaagggattattgatggtcaattccatgagaaggtagtcaatagatccaatggtgaggaagaaaacaataatgctgattggatcgattacacatgtcgaaaaaaggaagggaagttgtatgcgtgcgcggctacatgtggtgccattcttggaggggcaaatgaagaagaagaagaaaaattgagcaagtttggtctctatgtgggcatgattcaaggatattctaaaattggtagagggaaagaagaggagagactaaaaagagttgaggagctcaccaaattagctataaaagaattagaacatttcaagggaagaagggttgaagaaatttcaagcattattctaggcccatagattttttttattattatttatcaaatggccaatcttagtgtataatttttgttgaagaaaatttgaagaagatacaataaagtgggacatggcttgtcgtgtgattgtgttgtgacatgcactataataattttttcttcaaggggatcatgcatgcactgacattaaaatatatagagaaacttacaacatcaattattatttttggtttatttagaaatatatatatatatttacgttcatataaaaaattagggataattgcggcaaaagtcctcaaaaacttaagattgatgcagattagtccccaacctcaaaaattggcggtaatagttcccaaatcacattttttgtgagtccgctggtccctctttttaactgctccattaaacccaaataaaatgccacgtgtcaaatttttattggttcaaataataattttaattaaaaaaatttaaaataatataaaaaacaaaaaaaaaattattttaaattcataaaataactgtttctttttctttttcctcttcgtcttcttcacacacccgagccatgaccctcaccccaccccatccccagccaagtcgaccctcaccaccgccattcccagccacggtcgtcgacgttaaagacaaccagaaaacaaaacaccaacattgttttgaccaaaaaaaaaaaaagaaaatccaacatatatataaataa

SEQ ID NO: 119387 - DNA, 2082 bp, Cannabis sativa
  modified_base (681)..(682): a, c, t, g, unknown or other
  modified_base (871)..(876): a, c, t, g, unknown or other
  modified_base (2033)..(2033): a, c, t, g, unknown or other
ggcgccggcgagctccaaagtcttctatagcccgtttcgatgcgtcttttcgattaaaaaatattcccaaggattcctgaacctcaaaggagcaaaatatcactgatatttcgtctcgaaatggccggtttgagatcgtcttctccaaacatggtacaccagtaaaaattgtgtccaaaactgtgacttttcgttttagagccttttaccccatttcttcacatcaaaattaatcattgaggtcccataaacttaaacacaaactcctttgatctctgaaacaacttaaacacgttcaaattcaagtccgtttcaagaaccgtatcttcgaacgtaaataatggtctttcgaactgtttgattccagacctcttaatcacatttcaaaagctctatgagagaatatagaactaaggaaacgatttagagcagcccataaactctcaaaatataaaaactcaaaatctcacttttctctctctcggtgtcgcttgctacgcgccgcctctcccctcaattcctttctgcgttctaaaccctaaaactatctataagcatgctatatatatccccaaaccctaaaatatatacatatatatgtataacaaactaactatacgtatattctattattttaaataataataataataatgataataaaaataataataataatannaataataataataacaataatacaactactaataataataataataattttaacaataataaactaagcaatatgctatatatatttacctatattattattaatatgcctataataattcacaaatagttaaatattaaactaccgagtgacggactcacttatattaatgtgggggctatagccccnnnnnncaaaaatattaccttttaaaaaattaaatttaatttatttattttgataattataggctaaaataatggaaaagcccccacaaaattaaataaatctaataagagtaattataatataggtataaatattttttaatgataaataagccccaacaaaataaaaatgttgggtctgtcactgaaactacctctaataatttaattatttatctagcattacacacaccctcaaaataaaatgacaaaaataaatgaaataaaaattttattgtcactaagaaaaaaaaaatcatactccactaaactcataaatattcaaaataataaattatccccattgacaaataaaataaactaaaagtaattaaaaaaaaataattagctaagaaagcgaatattacaccccaagtcggggatcaatatctttgtcctcgccttgggtgaattcctattggacgatactttttcccttctctgaactctggctggaggtatcctatttagtagccttagatagagcaaggttgtagcattcccgtgtagttctttgatttccctttacacaaaccactccactttttgttggaaacttaatgcataggtgaaagactaatgtgaccactcttaagtcatataaggttggtctgcctaacatgaaattaaaagttgaaggaacatcaatcactaagaattgtgccattactgttgtgctcgtcagagcttgtccaactgtgagtggtaagcgaagctgttcgagtggtgatgcacttttcctggagaattcgtaggctacctcaatgcaaggaaccaaatctttaagttgaagtccctttttttgtaggttgttttgaataaaatatttaaggaaggtccattatctaccattgtctgagccaccattttttttttttttttgcaatttgcattaaagaccaaagggtcattctgcggataaatgacgtaactggagtctgctttgctaaaaattgtgactggttctccaaaacatggctatttagggtttctttcttctacagctagaactgcatcagtttgttcatattgtatggctcaggcatacttttgtctaactttacccgattttccagcaaggtgggggcctccaataataaccttgttgggattttatgccctanataaaactcatttcaatacaatctaatttgttatcaatagaagattaga

SEQ ID NO: 119388 - DNA, 1182 bp, Cannabis sativa
tgggcataaaacccaacaatttctatcttaccatgaggaaggattgcactaagtacgtccgtaaatgtgagcaatgacagtgttattccaagagccccactcacaaagataaacctcatgaatagtctttggccctatgtcgtttaaggaatagacctagtgggatgacttccaactggaaaggggggaaccaaagtcgctgttgttgttgttgactacttcactaaatgggtggaagtttaacccatgaacgtagttacatcaaaaaaggccttgaacttcataccaaaaatatcgtgtgtagacacggaataacacacaaattaatgtatgataatggaaagcggtttgatagtgattaattcactgacttttatgccaagcatggaatcataaaaagctttttggttgtggccagacctcaagcaaatagataagtggaagtcatcaaaaagaatctgaagactaccatgaaaaagaaacttcagcatcgcaaagcacactggttgaaagaactttgaagagttctttagccctataggactactgaaagaactttaacatgccacactccgtactccatggactacacataggagagacacctacgacccaactcaaaaccatgctctacttcaagaatccttggatttgattaaggagcttcgagtttagtcacaggttcaactccaaatttaccaaaacaaaattgctataaatttaaattccaaagtcaaaagaagaagatttgaaatcgacgaccttgttttgagaaggtctgtatgaagttatagacaaaatcagtgatggaacttaccatttgaggagattagatggaataagaattccaagagcatagaaagctgaccacctgcgttgatactataagtagactaggggtggtcagcttccttttatttttcttaactttttattttaatgtttaattttcatgtacgccccaggggaggaattatcttaataaaagaagaatgttcattttatatttggtctttcaaacttttatcacataacaagttatcaaaagtctcaactcttggtcactagggaggtagcatacattatatcaatataaagtgtcatacccgaaattcggctggaggacacgtgttaagataaagggaatatgaatcggtgcaatatctttttatggaataactc

SEQ ID NO: 119389 - DNA, 850 bp, Cannabis sativa
aaacaaaaaagtttgtttgcttactaagtttgagaatcaacataaaaagtaggagaataaaatggatgacttgaagaagaaggcaaaaaataaaaaaataaaagggccctctttatctaatttgaaattttatgtaataaaatctttgcttttataccttgttacacaatatgttgctacattgtacttgactaaattcttcatgtagggcattttgttttaatatgagttcacttctcactttaattacaaataaaatatttaattttgtgtaatgataaaaaataaaacttttccatttcaaagtaaataaataaaacttttttgttatttcttatttttctcacttctcattaactaaagtccgccacaaagatttgcatcgaaaatccaacaatttttaagcttattatcgattaaatttgagcttaaggtactatttttttttctattattaatttaccaattctctaaaaaaattagaatcaatatttaaagaaaacataatattaaaaatgagatgatagctttatatagaagtaatgaaagtgtagtaaagctatttaaacacaaagagcacttgattagttcttatgagcataataaataaagtcttagtttactttgtgttatagaaaaaaaatcacaaagaaagatatcaaatatgccttcaagaaaagaagtgaatgacttattttcatatgccatgaaagggcaatgggaagaggttttgataatatacaagaagagccaagaagcacaaaaagcaaagattactatattagaagacactgtgttacacatagcgatttcagttggacaaaccgagacagcagttgaattggttagg

SEQ ID NO: 119390 - DNA, 2793 bp, Cannabis sativa
agtattaaactagtttataaaatcacacatgttgtgtcctatagattcgggtgttacaacttggcatcaaagcagccttggttttaaaggtcctgaagactgctcgaatatgtatatttgttgcgaacacaggtcgactcttggtatagtaagtatatatgttatttcctattgccctacctgcttagataacgatagtgtatgatgggaagtagtgtagtcattatctatactaagaatatgtgtatggtatacacatattgatgttgatatctgtctgagttttaagtgtttaaaagatgtggattaaatgtgagaaaagttatacagtatctaattagcgagctgtctgggctcgaggaaaacgataaggaagagaatcctttattgtcgtaatgctgggaacatgtgaattcctctatgcatgatatgattagacaacaaggggaagcagattcaagatctgagagaacaacaggctcgtcttatgtctattcttgtactatcgacaattcttgttgtaccactggatgtggtgaaatatagggagccaacttacgaacaacttagaaagaaaaaactaaatgaaccaccaattatgggacataacaaaaaatgttcaagtgtgaccaggatagtggtcaaggttagaataagaaatggagacctcatcctgagtattcaagatgcaaaaaggcgccatctagaaaaatgtagagcaagatcttgttttattgtggggtagtgggtcatttgaaaagaacctacccgtagttaaaaaagattaatgttaaaaaaaagtgtacgggtcctgcccaagtgctgattatggttcaaggagactcgggtatcggtccttcgaccgactcaagttagaattttatgggaaatattgtaattgatgtttcaattgacattgatattaaacattgtatgctcaatgaggggatatcaaaagatctaaatgtattgtgtatgtatattatttcatggtaactcatctgacaaggtagacagattagaaaaatggcaatatgagttaaatttgataatattcccaagtggaatataggacatgagtagttaatgggggtatccatctaattgatttggagaacaaaatcttttgattaaaagtgatctagtgttagtataagtgggacaatttatgagtattgtccaaaaccctaggtgaattgaaggcaacgattgtgtgggtggatctattcactaccaagggcatgagtcaagttatgacaattagagtcccgtgatctgcgaaggaaagaccaggaactgtacaatcccacatcgcctgggggaaaggtcgtatgtaatgattcttagattatgcatgcatgggactacatagtagttgaggacttgaatagattgcttgagaccacctatattagcgagaaacatctttttttggtaacctacattgaaggaactctacgactaagtgtgcttgacctggggtgatttcatttaggaactttcctatgaagtgtgcgagttacagcaaagcacattggaaacacttggattggtctgtacggccagtcgttagcccaggaagcagctacagtgacacactcgtgtataagagccatcattccgtgggtgtaagggcccaatagaggtttgaagtggggacgtgaccaggataaagtataggtgaacatcagggagagtagtggtatcactaaggtaaggaagattacctaaattactcattgtaatacagtaatgatggagagtgcttttataattgactggatagctcgctaatcagatactgtagcttttattacacagatacaaagctttgagatcaaggaatgatcttttatcaattgttatttgctaagaactcaagaaatggatgcaagttaaaatgagtggagatggataagattcaagttgacaataagatggaaatttctcaaacataagtgaacaaaattgacgaggaattattggaggataatgaaggaagtgatggaaattggatttaattaacgaaagaatgaaagtaagaaatagaattaggaaacgacaaagaagcatctacctatgaataacccaccatgagcttaccttggagttaagaacacttaacttagggtaatctcaagatggggaattcttttggagagtcatctcagaaagtgtacgagtgaggacaaagtacgctagatagatttatataaggatgcagaatcaatagtcgttccagagattactaagaggaaggaatgtgttagtaaatagactaaatatctatcgaagacaaatgtgtaacttgttataaagttaacttactagatcagtttaggaggtcccgtaggaggaactgaaagatgcaattatgaactatgtactgtgggatcttatggtttcgaccgagtaataatagttggacataccgaatgaatatgaaatctatcaatgtagacaatttatacgataaatgagaatatggaattcatacaaaggaattgtctaatcttgtgaaatcccaaagttgatatctttggctatgatgttaagaattaattaaggttattgagtaccatggagatcagagtaaaaatagtataatgttttattcttgaaaggtagctaatattggaggatcaatggaatcttagaaatatgttgtgagtatatttgataatggttagattatcttagaataatctttttccctgatgaagtgtttatctaaaagttatgattatatgtaccattggttatgtacttaatgttgggttttacgccctaaat

SEQ ID NO: 119391 - DNA, 2330 bp, Cannabis sativa
  modified_base (2277)..(2287): a, c, t, g, unknown or other
aaacatatcttgggctaacaatttttgtaattttttaaaccacaaccgcaccacaagacattaaaattacaaaaattacaccgcaaaaaatgtggtatggtgcgggacggtttaggcagtttacactcatcactatcaaacattaacataaaaataaaaagattagtgtaataaagtttcaacaattaaaaaagaaaaaaaaatatcctatcaaacttttaatgtcatatatactaatcaagttatggtagtgaattgtctctaaaaaattatgtaatgtacatatatatattatatatatataaaaaaaataatatgttaacaataaaaagttaacaaaaaataaaaaatgagaataatttatatggatgttccttaaatttaattgtatggcatgagttttgtgagcacatgagttgttcatatataaagaaatcatagtgtaaaaatttaatatttttgtaatatataatgcagtgttgtttgaaccgtgattattaaattcgataccgcaaaccgcaccgcccagtttggctaaaatgcaaaccgtaactgcactgtaaagaatttcaaactatattttttgtacggtgaggtgtggtgcggacggtttgtgcagtgtgaacggtttgatgaacatccctaagataaataaataaaatcttatatattcaaatgaattatattagcaaaatatttatcaataaaaatataattttatcttataaacaaatataaaagaaaaactaaatgaaattttccatatattacttttaaaattaaaaatattaaaatatactttcactttttctatgtacaaaagatatgcacattcttcttttgagcattataaattaacgatgagaagaatcttctggttctttaacaaaatttagtcaaatccttttataatttattgcacatgattgatcatgtcaaatcaactcgattcatgaactttgggttcactataatttgtatttcaataaaaaatttgtaagataatttgtaaaatcattacaacatataaataatcattacaagttttatttttatatatacgaataaaataattatatgttgacggtgagaactcgccaactaacttgctggccaaaatatcaaactcagaactaagatgaagagaaagatgaaatataaactcaagtggctatctcaaagtagaaaaaaaatgaaaattttctattactctcaatatagtggttacaagaatgattttccaatccctttacacatctgaggaaggggtatttataggctctaatggcatgagatatatggttgtcccaaagagacaagatgtctcttttaggctggaaaatgtaggtgcaggaggtggccttaaacctcgtacatttgtctggtgtcagatggtcccgagtcctaggggtagtggctgtagtgcaccattggtcgggtatttagaccttgcaggtccagtagatccacttatcgtacctcctaactttcagagcttccagaaggtgtggtcgtactctctttcatgcttgccttgtccttgtgaccgtatccttgtcgcggtcatactctcctcgtgtgcttgccttgtctttgtgaccatatccttgtcgcttcactctcctcgtgtgcttgccttgtcctcgtgactgtatccttgtcacttcactctcctcgcgtgcttgccttgtccttgtcaccacatcctcgtcgcttcactctcctcttgtgtgggaaaattccacaaagttttgtaaggtcatggctgagtgacgtgtgcaatatcatggccgaatgacttcctaagggtgcatgccgagtgacttctcaagagagcatgtccagtgacttcctgagatgtggttgccgagtgacttctcaaaaagtgcttgctgggtgacttgaggatggtccaatacttctttgtcaagtgggtcttactcgtcatgcaccccttttgtgtttttagcataactccctcaatattaatctgatttgggcgattcaagtttctatagaaagttaagaaggagatctacaaagtggaggcatctttggtagagtaacatttcattaccttttccagttgacctattgaattgttatggccgagtgaccttcttgaagccttgtaccacttctattttttgagcataactccctcaatatcaacctgatttgagtgattcaagtgacaatagaaagttgagaagtgttggtattttatctcctaaataaaacccattacaatacaatctgatttgttatcaatagaannnnnnnnnnnatttatgtttacatgtagtttttcatttttatggtttaatgtg

SEQ ID NO: 119392 - DNA, 1569 bp, Cannabis sativa
tatagttcctcgaaataaaaagatctccataagactgttttaagtaatggaaacttagttgtctccaggaagtatgttctcggatagctaattaacttgtctctcctgagtctcatggaatgatagttgttatccagaagggcgtttccggatgactatcatgtccactctagatgtagttttcaagaaagctagtccttctttgaaaaggagtttcaaatggctagttgttcctcctaaaagagttttctggatagtcgactctaagtggctcttttcctatccagaagctcctttagcattcgcttcagtctgttgtccaagaagcgtatgtctcatccagaagcacctcgtcttgtgctgacgtggagattttattttgagaaggttgttaagtttgttatgacataactaacttaacaacttatcagttacatccactgaccttaggatctttatcctaagcctatatataccaccaacacttatcatttcaaaaaaggatggattgatgaatttcaagaagagactttgagtttgagagagaaagagattgagaggtacagagaaaagagagagattggatttgagtttttgtataaagaatcttttgtagatgatgaagtttcttgggcaagagtgtgagagttaaaacactttgagagatccaacagagaatcctctcgactatattgtacctgttcttgctaatcaataaagaggatttgatggtgttccaaaactggagtagagccatagatcacatcaatctatcagacttgaactagtatatatcttggtgttgattttattattttactgctttaatcgtttctaaatttttaatactctgttcaatatccttgttttctccgttcactgctttgtgtttgttattcttatcattgctaactgtttagtaattaaattttagttgatttaattatgcactttagtcttaatttttccacaaattagagcttggtattcgatcaagaacgtagaatcaagattatttctacgacaattcttgaagaaacagtttatgtcatcaatggcaagattcaaatgggagaagtttgatggaattaattggagactttgcactacgaagaaaaagtttgaaagggatcctattgcatcagaagttctccaaagttcttggagatatgagaagttagtggctgaaaagaaatcagaagaaaaagtaacaatggaggagatggcatattatacgatcatcatgtatctgtcaaacaatgtccgaagaaaactcatcacaaaaaagacggagaaaggagtttggaaaaaagttagaagaattatacttaaaaccatcgattgttcgcaaagattaattttctagaaaggttatacagttttagaatatttttttttatatttctttagatgataatattgacaggtttaatgtgatcattataggattagctaatataaatcacgaggttaatgaagaaagctagaccatcattttattgagattgctcccaattgcatatcaagaagtcaaggctgctattaagtatggcagagacgtgattgcat

SEQ ID NO: 119393 - DNA, 1069 bp, Cannabis sativa
atatactaactgatattctaatattagacatgaaaaatactttgctctaaaagtaattagtggcgccaaatgtgcacaacgatatatgctaaactaatagaacaattttaatcacaactatatgaattattagtaatatatatacacgttatgtgtgtgtatgaaaatgctaatccttaagtaaagttgtaatgcttttcagaagggtataaggtgaagttgtaagaaatattggtgatgttaaggaataagaaacttgggtgatgtttggttttggtgattgaaatgataatagtaatgtaataaaatttgaatggtaatgaaaaattgggaattcatgttgtttagtttgtatttaaaatgaatattagaacaagtttttatatatataaatttgtgtcattttattgttattttattataatgtaattctcattgtataacttttccaatataataaggactttattatttaaataattatcattatattgtaattttatttttaatattaaatcaagcatgtaatttattacaatgtaataattattacattgagaagtaaaaatatagtaaaataagttaatggtatgtattaccattttttttttttgaatatttcataattataaaataaaaacaataaagttatttgagttcatacacattttattttattatattctcataccaaaccaaaacactaattataatgttcattctatctacaaactaaacattgtgatcaatttctattaccattcttatttattacattaccattactattttattatgtcaaaccaaacaccacctaaagagcattgttatttgacagtaatgatactcagcaccttttatatataacgtttcacgattggttaacaatattttttaaaaactattttcttaaattatttttaattgtaatttgttcgagccaaagaaaaagagaaagcaaagtgtagactcgtaatcctacatatattaaaagagccaataagtattattattcataaaaaggtcaaccaaaactattagtttaatggaattgcaccttttatgcctt

SEQ ID NO: 119394 - DNA, 1456 bp, Cannabis sativa
tccaccttgcttgaccttgctgcaactggttttttttttttgggtataatccattcatctcgagcctcaacttcttgttgtttccatatttctgagccagtgatcaatcgacttgagcctgccttcgattggtcacgagttgaagttgaaactagaacactatctttttgtcactgctacctgatatgagcttttaccctttttttccttccctcctttgtgatcatctcccatgatatggccatatcccgagcaattcttacacttaacagggagccacccatactcaacactttgctcaactaactgaccgtgttcattcaagtatgggatagtgcgaggagcatcatccgtgctgtccatctccactagaattcttacaaattgaactcgggtgcattctttagtatgttggtccaccattatcaattttctaatcgtactaaccaaagcactaaagatattgtttccccaatattgaagcccaagatcgtgaagacgaatccaaaatggaactgttcgcaccagcttgactgtgttcaagtcagttgaccatggcctgatgatgactggtttcttgtcaaattgcatcactcatgtttctagcagtttatctttatttgcttcatcattaaatttgaccataactaaccccatgttaatatggaccacttgaactatacctagatgtccccaaatgcgtttgatgaacccctcgaagactgccattgaaggattagctcctagaaccatacatattactgccgatctccaattctccgctcgtttaacaacctcatctggatcaatacgagcgatcttgaccccatttttcgctaatggctctgtgtatgtgagcttcgaatccctggagaataaattccctttcgaaaacgaagaccattgactcttcgccgactcgtgatacttttcctgttccacctctgcctcaatttcagctactttggcccaatcgaacccagtctggggttttcgaaccacctgctttcttgaactcagatcaatttcttgctccctcgaatccatttctggggagttagccactgcagcaatcagggtcaggccatcagttgaaccagcatcctcaaagacatccaatccaccttgtttctcttcatcaatctcctgaatcttggatcaaagtaccggcttctgaccaacctgtttcttcttctccaatggagaagagcagagaaaatcacaacttatattatgtgaaaaaatcagtagaattttttctcataaacaaattaataggattatttttttataacaattattataaaatgagattttttcataaatatgggaatttttggtgccattgaattttttatggcagaaaaaaataaatcaaacaaatatggaaaaaaaagggataattgcggcaaaagtccccaaaaacttgaggttgatgccgattagtcctcaacct

SEQ ID NO: 119395 - DNA, 636 bp, Cannabis sativa
gtttgaattaagattatcaattcctaatttttcatctagtgaacataggatatgctgatttaggttaggattagatttaggaaattaaaaataaatattttaaagaaagaaagaaaaaaacaaaaggaaattgaagttctttctccaagtccctctctcttttttggcttctctagaaaaccagcagaacccatctagtttcatccttgttcttgaagatttcagcaggtgttgaaggttttctcttttgtgaattcaaaggtaagagccctagtttctccatacctttattttctaggttctaagctttattttaaggtgatgttatgattttagaactgtttcagtttatgttgcttaggattcttttttctgagttaattttaggttagtaggagtagtttatgcttgttttgcttgctgtgagtgtgttcaaccaaggtttgagttcttaaactcaaactttgtcctttcatggtaaaatcgaattctgagggttttggttatcgtttttggttaaaatatgtttattgtgacttgtttaggtcttctggaaagttagaagtgatttgggatagaattgagttgtgtaggagggaatttgtgtttttctgcactgaaccgttcgaccgattc

SEQ ID NO: 119396 - DNA, 1000 bp, Cannabis sativa
tgtaaagggttttatttagggcacaaaacccaacacggataacacttacccccaagctcccgggacttacgagtgttaggagcttgcaacctccttttagatgcttgacttactatcctaactcgttaaccatgtgttgaaatgtggaagaagtcttccgtgtttcctcaggtaactgagggtttgatatgttctgtggtacgactgtcaatttgctaaaacatggtgttgtttaatggatctgtggggctcatgctttgagcttaagcacgtttctcgtgggaagcaaatgacggctggacttgaaaagatgccaggtttctagcacgttggtgatgctaccacaaaatgagtaatgaatgccttattcttattctttaggcgcattaaatgtaaacccttcaaatccccaatcgtttgatggagcaacttttgattgatttaatatgaatcgtatatttcaaaaatactttgaacggtcaccacccatataaataaaagccttggagactgaattcactttttgttcctcaccttaagcaacgatcctttgcccagaaaactccctcagacaaaactttcgacccctacttacctttctgaaccagaaacttcgtctcctcttcttgaccttgctgtcgtatttcccaaggttcgacacctacccaaatggtgagtccactattagagcagggtgtgaccagatcacaaagcggcttatgggatttcaggcgacaacgagcgaccaacatttttttccttctaatccatctacaagtaagtatttcttccacgcaaactgtcataacctattttgattgtgaaatgtggtcttgagctcaaagaaatttattgttttgcatgcataggatttaggttcgaaaataagggttgctatatgtgaactttttctgaactttggggtaattattgaaacttattttagcaagatctagatttactaacatgtatgttgttggaatttattttacaaggatct

SEQ ID NO: 119397 - DNA, 1857 bp, Cannabis sativa
  modified_base (251)..(259): a, c, t, g, unknown or other
  modified_base (1401)..(1409): a, c, t, g, unknown or other
cccaagcttactttaaccaaagccttggaaatgacatagcacttatccaaggtgtaagtaaactacattgtagattatcctatcagctaaatcatatgtacagataaatcatagggatacatttaatcacacattctcgattactttccactgtgttgacaacacaataaataagaatatcaacgtgataaggatttgggtggatttataaatcaaataaataaagaaatgatcacatgaaccaaataacnnnnnnnnnaagtaatgaaaataaatctgtttctttaatgataaatgaatataaaagattacattgaaaaagatttttatttagggcacaaagcgcaacagaaacatccaccactagtgctttttcagtcatctgcattacttgcccgatcagcatcactaaaacaaactagattagaattagtgtctttaagtattatctctactattaatacaaccagaagggaatcaggtcgttaccctctaactaagggggtcgaacctctataaaaatattgtctcttttactttcatgttattattgtgtacacgtggtaagtatcagtaataaatacgactccgctatcggttggccaaatctgaggtcaacagatgcgaagttgaagtcgtaataatttaattactctttatataacaaatattttagttagctacgttatatatgtttattaattgaaatatttataaattttgaaaacagggcatacaagacgttagggggggtcaaatgcgtttattgaggcgtatctaaaaatatcaatagtaaattacccaaaacaacctaaaaagtaagaatatagtttttatgtattgaaatacatcgttgacatcatcgtacatgaaaatcctaacaaatactcaactaatgtaaaagttgtaagttttaattattaattatcttatttattatattaacaaataatataatatataatctcataaaaatatttacctctttttacattttagggaaaagaagacatatgatacaaaacctgtgttgttaccgttacaacgatagtggatagaacaattgcatgcgataattcacgaaggcttacaatgatgctgaattgtatgagagtttttttctcttatttttctatgtttaattagataactagcaaacttttttttcttattatgtttagttagataataacttgtaagcacttagactaattttaaaatatttgtgtaatatatttacttagaataatgtatatatatatagttatatagttaatttaatttttagttatataaaattaatttaagtaaactaataaaaataaataaaaacatattatataatacatttttgaggaattatcccataattatttttaaaattttttttttcaaatttannnnnnnnntttctaaagtggttgcagtgctagttgcaataggtgtttctatacgatttttttgttgcaatttaggttgcaacactagttgcaataggggtttccatgtaaaatttcgtaaaaatacaaaaaaaactggtttgaagtctaaaaatgaaaaaactcctactttttttagattgtgttagaattctttaaattgatttattatttttaatatataatatatttttaagatatacataaaaatattttgaaaattatttaatagaattttattgttcaattaatatttatatatataatttaaaaattttataaacaatctcaaaacggaatttgtttactaattaaattaaaagatctaatttattttagggagaaaaacagaaaaatataaaaaaagaaaaaaaaaattacaaaaataatatgggccggcccattaaacatttataca

SEQ ID NO: 119398 - DNA, 1134 bp, Cannabis sativa
ttttttttttgtataacaaactataaggtataataaattttcaaactcctggtttattttggtcactccttaggtatataatttgattcctatttttgttaatagcactaggcaatgagttattcatcttttacaacaatacttttaataatttgatgtcgatggtattttaatgaagctattctcacatacaagattgccatcaaaagtgttgttgaaggaaacttgacaactcaaaaaacaaggattcgtacatgttatcaaggtttttggtttaaggacatatgcactttcaaggcccaatattaaccaagatggacctattccaaggcccaatcaaattaataaattagcccacaaacggagtcaggctacagctctagatccgaatgtaagtccaacttatagactcgacaaggttggaccactttggttcagaaaagactatcctgcccgaaagctgaaaggtccatcatgacaaatttcgatatcctgattgggttctaatgaacgggaaattgaagagacatccgaaaccttccgaataccatcctacgtggcatcctccagacacaaggttccactatataagatatttgttgttagtttttatggtccttagcagagttagaaaagtgaaagcatatttttttaaaaaaataatttagtccaatatgaacaataatcccaagaacctcaatatattatatatgaattaaatataaactacaagaaaagagaaacaatacctcttgtagcctatcaagagatttttggctatctttacgtgttaatttatcgaacatttaatccaagaacttgttgaatagttcacacacaatcttccaagtcagcctcaacaatcaggaatagagtggactataaaatttaattggatgattataattttgtaatcacagtatattcttaactcatgagatattttgatgagataagaaagaacaaaaactctcacaccacactataatgtagggcttatatatgtactatgtactgtgggatttgttttgattatttttttatcatataaataattaaaaataaataattatttaattaaatattttataggataaaatatttgtattaaataattaaataaataaagatata

SEQ ID NO: 119399 - DNA, 659 bp, Cannabis sativa
tagaaaagattacattgaaatagagttttatttagggcataatgcccaacacctgggacccaaacttgaaacctggacccgggacccaggaccaggacctagacccggaccctgactcgggaccctgacccgggacccggacccggaccttaactcgggactcgaacctggactgagactcgagacacggatcgggacccgaaacccaagactaggaccgggactaggaccctagacctagacctggaccctgacttgggacccggatcctgacccgggacccggaccctaacccgggccccggacccagactgggacccaagacacggaccgggacccgaaacccaagaccaagactgaaccctggacccagacccgtactgggactgggacccgggacccaaacccggacctagaactcggacctagacccgaacccagacccaagacccgagacccgaacctgggacccggaactgctcccaggacctagactcggacctacgaccccggaccctgaccttgatttgagacccgaaccctgacctagacccgggacccagaccttgacccaaacccgggacctagaccctaacccaggacctggaccctaacccgggacccggacctggactgggacccgtgttggaaatatttta

SEQ ID NO: 119400 - DNA, 3250 bp, Cannabis sativa
  modified_base (3191)..(3204): a, c, t, g, unknown or other
ttttaattaatcacgatttttattaaccttgttgattagcaacgagctgcatagtatgtttaaaatcacgttaacacgactatgctagttagggtgttacaattctccatgctactatgacaaagaagctggacgacttttgtcagaggtacatgatggattatgcggcaaccacgcagctgggcagagtttatccaagaaaattctaatgcaagggtatttctggccaaccatgattgaagactccaaggcctacgttaagaaatgtgataagtgccaaaaaaatttaaagatacctcgtgcaccgcccaacgaattaactgagatgcaaagtccttggccttttgctaattggggattgacctgatcgaacaattgcccaaggggaaaggcggagtacaaaactcaatagttacagttgattattttaccaaatggacggaggccgagccactgacaacaatcacgtccataaaagtgcaagagttcattgtgaagaatataatttgtcggttcggattaccgtacaagatagtctcggacaatggcaaacaatttgacagtcagtccttcactgatttttgcgctaaccatgggatcataaaaagtttctccgcagtggcacatccccaagaaaatggtcaagttgaagcagtcaacaagacactcaatgatactctaaagaaacgacttgaagatgctaaaggaaactggccggaggaactccctgaagtattatagtcgtaccgcacaactgagaaaatagcgaccagaaagactccatttgccatgtcatttggttatgaagctatgttgcccgtagaactcgaaccaccgtcccacagaagattgacatataaccaagaggttaatcatgcactcctcacagagtcacttgattaaatcaaagaaaagtggaccacaacaaacttgaaactggtagcccactaacaaaccaaagatagcacgacatgtgtgctcagatcgaactgggaagggccatatcaagtggtcgaagttttagagtctagagcgtacaaacttggtaagtatgacgaacaaatgcaactcgttcaagtacataggtactgaaacagggaacacttaagaaaatactaccagtaaaagtaccaaaagtcagatgaccacgtaagtatgagataaaagaacatttactcttaagtgaatggccttctgggcggaccactctcaaaggttcggataaaattacaaagtactcaggtcgagtgaccacttatgaaaggacaatttttattttttacaacttgtttagtttatgctaagctaaagttcagactagatcaaaataatagctttgatttaagttactatggaaacaaacatattcctgaccaataaatgaataaagatgtttatttcaattcaaattgagtcaagttcattagcatgttataaatttaccattaaatgcgtacaaaaggtctgctcatacccaaagctttgaatagacaaaaagcatacttgtgaagaacaagtaaccaagagtcaaaagtctgcttggtcacttggggggcacctatacctgtacaaagcattttgtaaaaacaaaataacaaacataaaaaagaacaaaaccagcacaattgcacaatgattataaacaaggaatgaaattcattaagaataataaagcattcaaacctgggattaacggctgcccagtcagctagttgttctaaaaaatgaaaaatattccaagtttaaagaccgcttggccggtcactttgtctcaaaagaaggcctattggttgaacagacatatatatataataaaaaaagatagtaaaaagaaggcaattaaacagcaggagtcccaggctctttgtacgggttagctgggtccaagggggccggaggatcatcggtctgggcggaaggggcctcaacactgtcatcggtaggagaagtggaagtggtcgcctcaggattctcattggccgccttagccatgcagtagtcgagaaacatgtctttagacgtgccaagatattcaaaatttgctttgggattggccttccaaaagtcataaaaaatctcaagaccatctctttccaaggcatccactttcttcccgagcttctctacctcggatttctggctcttaacctcagcctcaagttcctcctccctggtctttttgtccataagctcatcttccaacctgcgaagaagagtccagataccctctcttaagtcttggagaggagcaatatcctgagacaaagaagcattatctgcctcaagctgctaggttgacggcatgtcctgcagctccttggtcagctcggtaactttagtctcagcagtgaggacttttttattgacctctccaagttctgtccgcacagtctcgagttgggtcagcgcatcttcaacatcctttttggccaagtccacttcccttcgcattgtgttggaagtggcaaggttcttcacaccagccgacttagcttgggaataggcataggccatcttcacaccagtctatgccgaaaatacaattaaatctaaattatccaaaggagaacgaaagggaagtgttaaagcagacttactcattaaagttccttcaaaactcctcctaagacaagctccaaggacaaatcattgtccgccccagtcaactgttctttcacctcctggagcgaccgagtcacatagtggttaagcatgtcttcgcctctcttgttctccgtgcacaataccagaggtgggccagggaccctaacttgtttaaatccgcccctcactacctttgatccagtcttctcaagaccatccgaactccctcctcgggaacctttggatttggcgaccttcaaggtagaaggatccatagcgagttgctcctcagagagatcaatgacctcttcaacttgtgccttctccttggatggagtctcgccacctttagacttcttggccggaggggacacgctcgaactccccctactctcttcttcatagcctcaatcatcttctgagacattttgccacgaaaaaaaacaagactgtcaaaaggaaacataaagtatacgaaggcataagaatcaagaaaaataaatgcaagttgaagtactttgcacgttggcatgacaaaaatggatgtattgccctgaccaaaaatttggcttaactaacaaatcaannnnnnnnnnnnnnactcttgaaattgagcctaaccgtatcaggatttcgatcatgtgat

SEQ ID NO: 119401 - DNA, 1241 bp, Cannabis sativa
ttttgtttgtctgtgctccaataagcgatgcagtcactccacacctcttgagttactccgtcaggaggtaacatgtcagccctctcttgtaacgccctgactctcaggaacgtcacgtgtgtgcttttacaaacttattaatactaatcatttagtttagtaaaagtgtggtttaattaaaaacctttaattaaatatagaataaaactttacaaatcaaatattattggaatatgaggatcccctactaataaaattcttttacaaataatttacaaaatgaataatataagagtaggttatacattcagtcatagaaatgggttgatcctgcttctcgaaagccaagacaacaaggttgatatgtacactgctgggagacctctggctcatggctaaacagaaatgctaatcttcttacctgcatcatgaagcacccgtgagtcacaatgactcatcaagaaaagctactagacaaaagtatagtaagtactagcgtacaacataatatacgtttcattgattcattacatatctagcatgtatatacgtatcagtacgtctatgcgaacatattcataacacatgtaagaacattcatagcaactcataattaacaattttactaaataaacattcattcaatccatagctctataatcttagtgctttgtaaagcactctattcatacatcattgtaatcacattattttagtgttatattaagcactctacttacacaataccataatcacctgaactcggtgctttataaagcacccttcccactcgttatcaacgagctatatatgtcactatcgttgctcgataacgggaacgataagtaataagaaacctatctttggtttcaacaattaattactcataacggtaatgaccgtatcttttacttgatcataatcgagtcacaacgatattaatcgtttcatatcatttccctcgatcataatcgagtcacaacgatgataatcgtttcataagatttcccctcgatcataatcgagtcacaacaatgataattgtttcataacatctttcctcgatcataatcgagttacaatgtacacatatcggaatcttgattataatcgagactatcgcatttataattgttaactacaaatggtgtatagtacttttcttacctcagtccaatagtcaagtatgcgggccagcctgagagaaactaccctcgatgatcctgggtcctatgtcacga

SEQ ID NO: 119402 - DNA, 1876 bp, Cannabis sativa
agagagttaaacttaaacatttatgccgtaaattaattttaataattggtagaaaatatttttcaagggagaaatttaatttatcccataaaagaaattaatctttatttttttatatttatttatttatttggttagattaataaaaactgaattcaaatgtgtttgatgttcttcaaatattttttgttttcttttaggagatgtcatcctattttaccttacaatcctcatatataaatagagtttttataaaaatattgaatttcgaataaaaatttataattttattgtcacacgaatttttttataaaaataatgtctttttatgaaataactgtaaaataacaaaacaaaataattaaaacaacagtaggacaactaaaaaataactatgaaacaacagtaaaaacttaacacagtacacactatttttaaaaaaaaaaaaaaaatcactccacaataaaaaagtaaaaaaattaaaaaattcaatacatagtataaaaatcatatataaattgatgattgcactattccacaatattgatgttatgttatcattaaaagacttacatataagtacttaaaatgaatttccacgtaccaaaaaaataaaaagtacataaaatgaactttattgtaacttataattagaaaccaccaaattaacctactaaaatacatgatatcatcgcctaattaggacacaaaaagcaaagctacctatatatatagttagagtacatcttttaaaatggtatttgggtaggctcttaatttatttcaacacccaatataattttttagtctaattttattttcatgattgtatatatattatagttatttaagagcacttgtaaattttcaaaaaattcttaataatatacaatactaaaagtaaaatttatatattttgtcatacgtaggattgctttttcttagatattttataagtaactgtttaaatcttattttcggtattgttaactattcagaatacaactaacaaataagggagatcgatcgattacaaaatgagacatagttctcaagtgcccaatgagactccttcccattgaaagcattgataactaccttcgagtcactctccacaataataaacttggactcgtgttccttagcagtcaccagagtcgagcagtaggtcgccgccacacaacgcatcagaaaagtccaacagttgtttgaactcaaaccaccctgccaagatgattcctagctaccactgttgtacacatgctttccaatcccacattaacatcacaattcagtttaatcgccaattctaaggtggaggatgctagccatccaccaagctcggagcctgaaaagggaataaagaactatgctaatctgcaaaagaagtacgaatagagtcaatactcttttccacatcaactggactattattgtgtaccttgtcattgcggattcactagatggagtcaacaacaatcgaagcataaacggaaatatcctcagcatgcctttgtgtttggggtcccaaatgaatatatacctaaactaatttcttaagaataattgtttctctttagggatctagatactcaaattgcacatactttatacgtacaataatctgcaattaatctcaatcatacaattaaaaaaattggtatggtctcacttaaaaatataaatgactaataaaatttattatacacataattactgtgtaaaaagagtatacaatttgggtatgtatctagtattactctttttatatatgaatatgtatatgttaggtatcaactcaagtctcatatcgaaaaaaaaataagcaaaagttgacttgaacacaggcccgacctgggcataggcgggctaggcc

SEQ ID NO: 119403 - DNA, 2619 bp, Cannabis sativa
  modified_base (40)..(65): a, c, t, g, unknown or other
  modified_base (795)..(803): a, c, t, g, unknown or other
acttttaaatacttatagaagctacagattccatatctannnnnnnnnnnnnnnnnnnnnnnnnntatcatgttcccaagatgtaagtattcgtccaaactattggttatctttcacgaacaactctaagaacataaaaaatacaattcagatcgaacctaaccatctcaggattaagatctattgacctaagatcaaccagtgatatttacttagaaagatataacgttatatttatgatatcttatcaaggttcaatatcggtccaatccgatgtatactccatacattcgatactagcatactttcccaatgccctagaaagggcataatacttatccaaggtgtaagtatactttattgttgattatcatgtcagtcttaatccagtatactaataaattatgagacttaaactttgaaacatataatcatgatgatatttgactgtgttgacaacactataatcatgaatattcatatgttttgaatttaatagaatttatacattaaacatataactatgaaataattcatgtgaatcattcaacatattaagatttctttaattatttaataaatctattatatttatattggttttatttaaaacacaaaacccaacataaaatacattggataaactatttaatgaaaattacatcacaaatattaaataaaataaaaataaaataacttaagtactctctttttatgtaagaataaaaagggtaaataccattttggactatctgtcttgcaaaagttaccaattggaccatctgttttgttaannnnnnnnntagaccctatattttctaaaatggcaaaaataggaccctgagcttaatttttgacaacttttttttttaatataactaacttgaagacaattcctaactcgaacagatacaaaaaagagaaatagttttgtaataacaccttttagatcggattattactaacttttattttgataaaaaatcagttcagggtagggctgagcatttagcccgatgggccgaccaaatcggccgacccaacctaattttgggccgaaatagcccctttaatgttgggccgaatagcaattggtttaaaaaatgccaacccgtttagttttgggtcggaaatgggttgggcagtttatgggccaatgaacccaacccaacccgactttttgaaaaaaaaaatacataatattttatgggctttagacaatttgaattgggcctgctactttgctcacatatatgtatttatatttattatctaaccctaaccctaaaaacataacaaatcatcaacacattcccctcattcaccagccgccttcaactttctctcttttcaactcattgctctatctctctctctcaactcatttctctatctctctttcacacagaaagtttggatccgcctcctccgatgcacgcacacagctcagacaagggtccattctcatcccatttcgttctcgccagaggtaactttttcttttcttcttttttttttttttgttcaatgagattatttctcacttcaaatttctaatctcaatacttttagtcttactatttttttttctgtttgtttgctgaaagtgtttaagcaaggactgtcgcacaccacgctactttggctctcacttttcattgtcacgttatttcttgactcttgatctcatttgttttttttttttttttaatattagtgatgaatatttagtaatgctgactttttattttatgaatatgtagtaataattttttttccgagtatttttaaatttatattgcaataatttagtaatagcgatttttcattttatgaatatgtactaatcttatttatttgatttttataatataattattttgataatttttgcaactattttgatttgttattgatttttgtatgtttaattctaatttgatttttgctaattttaataatggttattttatttgataaataaaacagtagtgtatgttatgatttttggtgtctttgtgatttatgtaaattttttacttgttagttttgtttttagataattagtagttttatctagattgctaagttgttgattttttttaattattattttttttcttttataataattgatttataaattaacaatgttctttattttattttggtaatttaatacaaataatttgagtagcttcattttttgaataataggtaacaaaccaaaggtcaaagcatcaccaaaggtgaagattattggcattattaattgatgtattttttttaagttggtaaatattttggacaatttaattaactttagtacttattttgaatttgcaagactgtaaaaattgatttttaatgtttagacttttgatgaactattgaactttacatttaatcatgggaaattttgctcaaaattttaagttttaattataaaaaaataagggttttaacccaacccaacccaatccaacccgatttaaaatgggttggattgggttgggttgtaaataaaacttaatatgaatgggttagaatttaataggccgatctcattgggttggctcattaaaataccttcaacctggccaacccaacccatgcaca

SEQ ID NO: 119404 - DNA, 2915 bp, Cannabis sativa
  modified_base (268)..(276): a, c, t, g, unknown or other
ttatcataaatatagacacgtggaaggctcaaatgcattatatttatttattttattttaaaattcaatattcttgatatcaaaaactaaatactagttgtttaaaaaagaagagatgcaatactaaattatcatagctgagtgaaccagtgcaatatatagaacatgattattgaattgaagtgccaatatcatgtgaaaatttttatgagaattatttttttttttggaacaagtagcatttaatttctgatattaagaatattannnnnnnnnataaaataaaaataaatgtaatgtatttgaaccctccacgtgtctatatttataagttaacggaaatagtagtaacgggtgtaagagaattgtaacattaggcatttttgcctccaaaaataaacattaggtatttaagtatataaaatctgaaacattaggtatttatgccgcaatttacccaattttttttttacatgattaataaaagtagtattttttttttgaatattttatagtttattcgaaattgatttatgaatgattttcatattttaacaaaatttgatgtcttgttatttttctattgatttatagctatctttttttgttatttataattatttgtatgtatttttttttgtacaattgttgtttagtttatgtgtattttttgtggtgtatatttttaatttattttacacaatttttttgttgtatacatgtgtatttattttgttatttttatattattttttttaattaattttaagtgattttcagaatattttttgttcaacagttattttttagttatttttatttatgtatatttttttatggtgtatatttttagtttcttcataatattttttttgatgtatgcgtgttgctttgcaatttgaatacatatatttagtttttttttttttgacacattttattaaaatacaaccataagatttttttatttaattgacacaatgtgcagtagatattgtcatattaattgtatattacccattatatacccattatattatattatgtattaattgtatattacccattatgaaatcataagattttattgtttctactattaatgttattatgtatttaactcttaaaaaataaattattattttaattgtcaataacttaaaaaggaaaagagaaaaaaaaagttgaaagtatgaaattgtaacaataaatttcatgaaaaaataatgtactaatacaaaaagataaatcaagataaatttcaaaataaatggtaaaaatatatgacgatatatgcttaaatgaaccaaaaaaaatgcaacactattaaaaccataatataatagaataatataaattattcattaatttatatgagtttaaaagtttaaatataagatcctaatcactatcctaagatgttataaattaggactaaatttatttaataattcaactaaaaagtaaaacacatttaatagaactatgaaattgtaaaatagatggtgttattacaatgaacatttttaaaagaggtgtacaaatatatctctatctattttggcatccaaaagaaatttttagtttaatttagtttttttttttctatgtcatgtatgctgtgattaagacatcctgcaaaattttaaaaaatttgaaataatttacaatataaaaaaatagtgattaaacaatatatttcacacgcgtataaaataaaagagtcacatgtgcaatagattatttgaaccctatttttagcatgttaaattttttaaaattttgcaagatgtgttaaataactacaacgtacacgaccataaaaaaattgactataatttatttttgaatgctgaacaagataggggtgtatcgatacaactcttttaggagagtgcattgtagaatttctaaaataaattactgaaaaagatagcttttagtaatttttaaatacttaattttcatatataacattgggtaagtttatagtgcacccccctacagggatattagtagatcccttatttgttttggtatccaaaagagcttttttaatccaaattttttcatgatggtgttcattatagttaattaagaccacctataaaattttagaaaatttgtaattgtttacaatgctaaaaataaggtttaaaaatttggttgcacgcgcgattatttttcttatatgtgtggtaagtaactatttgaaccttattttatgcacatttagaatttttaaaatttacaagtgctcctatatagctacaacgtacacgatcacaaaaaaaattaaactaaattttttttctggatgccaaaataaataagagaatttaccagaacacctctttaagagggtgcactacagaaatttcttataacattatattgtttgggcttttttttttcttcagattttaatatattatattgggtaagtatatagtatatcctcgaaatggatgtttaagtagatcctctatatgtttaagtatttaaaatagctttttagttttttttttaatgattatgtatgttatagtattctaggactgtttgtaaatttttagaaaaatttaagtagtttataataccaaaataaatttgaaagttgttacacacgcaatttttttttataagcatggtaagtaactgtttgaatctcaattttgacattgtgaattatttaaaatttttaaaaaattttaagggatcttatataactacaacatacggaatcataaataaaaaaaaataaactaagaatttttatgtataccaaaataaataaaaagtttatcaaaatacttcttgagggatgtactataattttttttttataataatacattttacataaataatattacattattaggaagaggtttcaatggttacatttttattgt

SEQ ID NO: 119405 - DNA, 1731 bp, Cannabis sativa
  modified_base (1672)..(1675): a, c, t, g, unknown or other
tttttttttgctgaataactgcatattagcttttgggctgtgtttgataacaaaagtgaggaatgagagttgtttgttaaaagtatgagagaatccatttaattatggaagattataactctctcctgaaactgaggattaaaagtgtgaaattaaagtttccatccccaagttagggaaatattctgtgttttggttggttttggagtcgtgaatttgggatatatattttatgatttggttggtttggctggataagatcatagaagatagtatagtaccaatgtctgtggctactatatactattggctatgtacaaaatcaatcactctagcaaagatcgaagctttgctacttcaaaactcaaaaacacagagctagtggaagctgtaggtgcccctcagtcagtttgtctcccctctcttggagagagaaattttccctttaatataattattttactccactagttatagatgtgtgatttgtcatcttctcttttcgttttgcattatattttagttggccatttagaagtcgacagaggaaagctatatccacattggtttggttattttggggaagcatatttggtttggttagttttgggggcagcttttgatgtttgagaccgtgagagagattgacactagtccaccctcacctcaggtgtttccaagtatagaacgtgtcactaggaacgtgtaacctgttatgttttaatttttatgggtttgtttggtacgctgtataaatgtcatatgtttggataaaacaatttattgtattaattattacgaccaaattttttatacaatataagttgtattatttaatacataacaaatggtccatattatagtttgtattatgtaatatttacaaagaattcagggtcaattccaatctccgatccggactcgggacatggtcttgaacatggacccgaacccgaactcggaacctgaacctggtcctaaacccaaactcgaatctaggaccggacttggacccaaacccgagacccaaacccggacccagactcggacctagactcgggacccagatctggacgtggacccagactcggatccgagcccagaaccgggacctgaacccagacccaaacccaggataccgactcgaactttgaaccagacccaagactcggacccgaactcgaacctcggacctcaaactctggactctgactcgtgtgccggacccggacctgagtgccggacctggacccgggtgtcggacccagaccttgaccccaaacccggacttggaccctggaccccgaacccgggactgggaccctaggacctgggacttggactgggaccctaggacttgggactcaaacctggacccaaactcgggacctggacccgaacccggactcgaacctagacccaaacctagaccttcaccttgaacccagaccccgaacccgatcccgaaccaggacccggacttggacatgggacttggacccaaacccagacccggacttaaacctggacccggacccagacctgaacccgaacttgagaccggaccgagactcgggacccgaacctagaccccggaccctggacctagaacttgaccctggaccctaagcaggactcggacccagacccaaactgtgacagtcagtagtcnnnngatccgtaaggggaaacaccgggtaagctgtacaatcccacaccgcctggggaagg

SEQ ID NO: 119406 - DNA, 3548 bp, Cannabis sativa
  modified_base (3458)..(3460): a, c, t, g, unknown or other
ttctaccaaaaattggcttttgtatcaatgaaaaacgatttttgaatcaaaagatatgaagaaacaaatttgaggcacaggggtatgcaatgcatacccctgcgcgcgcggaaagcagcatagcttttatgtctactctgattaacgagcatttgtgctctaatcttatccattgcctcacttgttctctggacaactttgagacccaagaactttctctcacctacttcatccaagtgaataggtgatctgcactttcttccataaagtagttcataaggagccatcccgattgttgcctgatagctattgttgtatgagaactcgattaggggaaggtattttacccatgatccttcaaagtctaatacacatgcccgtagcatgtcttctaaaatctaaatggtcctttcaaactatccagctgtcttaggatggaatgttgtattcaatttcatttgagtacccatggctcaatgtaagctctctgcgaatcttgatgtgaacttcagatccctatcacaatactatggactttgggacaccgtgaagacgaactatttctctaacatatagttctgcatactgatcaattgagaaatttgtccaaacaggtaaaaagtgtgttgagtttttaaacctatcaactatgacccacatagagtcatactgtcccgtagtcctaggtagtccaaacatgaagtccatggcaatgtcttcaaatttccatttcagaaggtttagtcactgcagcaaacctgcaggcctctagtgttcagcttcacttgctgacaagttaaacactttgcaacatactatgttatagcgttcttcattctaggccaccagtagatagacttaagatcttgatacatttttgttgtccgtagatgaacaaataaagagtagtgtgagcctcattcaaaatttctctcttaatatcatcatccataggaacacaaacacgattcataaaccgtaatactctattactatccactaaaaagtcagtggtgtttcccgctgaaaccctgtcttgagattttacgaaatctggatcttgatattgcatttctttaattctttcaaaaagagtggattgaagggtaatgttagctaaccgccccacaacaaactcaatgctagccttggtcatttcatctgctagttgcttggaaattttcttcttgtattcatctggttctggcctttcctacttagggcatcaactacaacattggccttaccagaatgataaaggatttcacagtcataatcctttaccagttcaagcgaatgcctttgtcttgtggtaaggtctttctaggtaaagaagtatttcaaacttttatgatcagtgtaaatctcacatttcttgccatataagtaatgtcgtcaaatcattactgtaaatactattgctgcgagctctacatcgtgagtatggtacctctatttgtattcttttaactgccaagaagcataagctattacctttcaagttttcataaatacacagcctagaccttgtctcgaggcatcacaataaatgacaaacttttccttattaaaaggaaaaattaatactggagcggtaatcaagtgttacttaaactcctgaaaacttttctcatagcgattagtccaaacaaacttcatattctttcaagtaagttttgttaagggtgttgcaatttttgagaaaccctcaatgaaccgacgatagtaaccagctagacccaaaaagcttctaacctcagtagctgattttggtgttggccaatctcgaacaacttcaattttggttggatcaaccataatcccatccctatcctctatgtgctctaagaaagggacacgtgataaccagaactcacacttcttgaatttagcataaagcttgtgatcccacaatcgttagattactaatatgagatgtagctcatgttcttcttccaatatagaataacccagcatatcatcaaggaacactatcacaaacttgtccaggtaatctttgaatacccggttcataagatccatgaatgcagctggggcattggtgagtccaaacgacatcaccagaaacttgtaatttccatacctagtacgaaacgcagtctttgggatatcctcttccaaaattctcagttgatggtaacctgagcaaagatcaatctttggaagaccgtcttaccctttgacaggtcaaacaagtcgttaatttagggtagaggatatttattcttgatagtgagcttattcagttcctgataatcaatacacattcaaaacgaccaatccttctttttcacaaacagcactagatcccagggagaataacttggtttgataaatcccaagttaagtaactctaggagttggatcttcaactctttcaattccactggagccatttgatactggttccgctcctggaactaactctataataaattcaatttctcaggaaggtggtaatcctggtaaatcctccagaaatacattaataaatttgcacaccactctcgtattttcaggtccagatgacatgggttggctagtatccactacagttagtagggatcctagacaacctttgcgcattagatctttagctttcaggattgttattctgggtaggcgcgatccttgtaccttacccgcaaacactactggattggcactatcaggttcaaacaccaccatcttttgcttgcaatcaatcattgccccgtacttagacaagaaatccattcccaggattatatcaaaattagacaattgtagctcaattaggttttcagttaattcataaccgtgaatccaaaaagataaagacctaatccatcgagtagatacaattaggtttctagagggtaatatggtactaaagcccgaggcatacacatcacaggatttatgaaaactctctaatactctactcactacataagaatgagtagttgttgaatcaaataatagtgaataagaacaaccatttatggacatttgacttgataccactgacggcctagcatcagcgtcagcctgagtcatactaaccaaacgccctggattctgattgttgttcttctttggttcctctttcttagcctttggacagtcccagataaaatggcccaccatactgcactagaaacatgttttaacccgacgctcaccctaatggtgcttcttgcatttaggacactccgagtaagatctaaatgtagacctgtgaccttgacatccacctctatttccccaaaacattctattacttcctgatgttccgtaagctttagccttttgtttgtgactcgagttgccactgttggttcccttactgacactaccacccacactagggttcgatgccatgacaacatctctttaatcacatgctattctgccaatttagcaaccaaggctatgttggatatattttaccaggnnntagatttactaacaagtgtgtttcataacatcctaatattaattctaaaacaatgaaataaacacatataaagtttagtaaacattac

SEQ ID NO: 119407 - DNA, 2784 bp, Cannabis sativa
gaggtatttcgatccttaagttatataatgtatatattcgtttattccgcattttatatacacatacatatatttcagtttatacatataaaagttctaacatactaggctttcgaactaaaagaacatatgaatgaatccacttatcaatgactatcagtcaattatcttccaattgaaaataaggacataacaaccccattattcaatttagaataaatagaactaagcaaacgaccaaccatagcgataataatcgtaggagacaatcgcaccataaactatggggccaatagaaatataaaaaaccctcagatctaaacatggataagaagagtcatgctactaacactaactgctttgagccgatagagattccctcattgcctaaaaagaaacaagacaatccactgtaattactgagaaaagccctactatgataacaatatatagtaaggtggtgtatgaacaccattattgaaatttaaaaagaacaaaataaaattaaacttaaataatgacatattaaaaacacaaatgccaccattgaaggtgtattctttcttaccacgtgtcaaacattgatgtccacgccactgggatcaatttcctggtcaacactattaaccctgcagaaaatgttgaagcagttaatattcttaatctcctactataattaatcaaggtgaaacgttcaataattaaatattttacctaagcaattattctatgaagcaattttatttaacttagataaagcattaaattctatggagataaattaacttaggtaacaaatcaataaagcatataatttatttaaagtaggctctatttctcatcacaattcaaaatacttttgacattattaaaaattataattcatcacaaatacttagaactagggtcgaacctgagggtggggagagctaggcgtgcacctcgggcccccgtacgctcacggcctcaaaattatgaaaaaattattattattattatatagataaaatattaaaaaataatatttagtgtagtggtaaagagtcttactttatttaagttaaagggttaagggatcgattcccccaacctctctctacttttctattttttaaaaaaatatttaataattattaaactatatgtaggggcccgacaataattcatgttttaggattttaaattaacctttaactaaaaagaaattactccatgatcacaacaattattataattgaaaagtaaagagattagagagagaataaaagaactagaatgaagaataattaatgatgtattctttcccttttttactttctcaaagtttctctctaaaaaatgtaataaaaaccccttaaaaatgaagcttaaaagtcctatttatatacctaaaaactcatttaaacataactaaaaaattaatttttcgcaacttgtacagatgtcatacgtcctctggccgcctcagcggttcttaagtgtcgtcggggcaatggttgctggaaaagttgcgtcgtgctcatattattattttggccataactccttcaatacaattcgaaattagacgatttaaaatgttacgataaaagcacgagatctacaaattttatgttgagcttcaattccaattctgcatttaaagttattaaaatttgaaattatgttcagacagttaaaccgagctcttccgcctccactattttctaccaaaatatgctaaaactcctccaaatgactctaaatgcattcacaatatcctaacaagtaaaaattatattaatcaattatttaaagaattaattttaaaatattaatatataaattgtatcattttttaagacaaatatggacttgataattattaccctcgaaacataaattttacagtagcatggtccgtccatcatattctgtttaattttatcgtgaaacgagtgacacagtgaatgatagttgataaattgatgtaaagtaaatacctttcacacttttttacgattaaaaaactaaaaatataaatataaattattataaaaaagaataaaaaacattttttttacaatttttttatatatttttacggaaatccacatagcaactcacataataaccaatgaagcaacctaaatcgcaaccgaaattcacataacaatctacatagaaaccaccggagcaacccaaaccgtaaatttgaagaaaaaaaagttaaaaaatagtatgtaaagtaattcccctttattctattgtttattattgtataaaaacaaaaagtaaatggtatttaatttgtatctatttatcaactaccatccaccacttcacttatttcacaataaaatttaataaaatgtgatggaaagattcattattataaaaaatatattctgaggggtgtattattaataagttgtatattataaggaacacaacttgatagtgtaaaaaattaattagagaataaaaatattaattattcatgaaaatttactacttataaaaaaatatttgtataaataattacatggtcagataaaataaaataaaaaattacctcaaattacaccaaaatttaattacactaaagtcttgcacagtgttaactttctatgaaaatttacaactattaaactattacttggcaatattttttcccaaaacaaaaaagaaaaaaaaaacattaatttatctcattaattttgtatgaaaaaaaatcactagctttctctcattaaatatacactctcactattctgataaatatataaataataaaaaatattt

SEQ ID NO: 119408 - DNA, 1854 bp, Cannabis sativa
tttcccttccattccatttcattacctccaaccaattttttctaaatggaagaaatctcttcactttatacctcttgaagttgttttaattctttaacccataatcgttaccctaaaaaaacaatctaaccacaaaaaaatctagtagtatctacaatgaggagaagtgtgaaggcatataatagaagccaccaattccatgttagaaaacaaaatctctagtcaaaaagcaaccaaaatttcggagaagaatattaaacaagttgatgtcattcgtagactagtacaaaaatgaagtctctggaatgtattatcaccacaaacaaaacaatgttataatgtttactatcctaaaggcattgacttttgtgtcaccttattaaatagagttgttgacttgatgactagcataactagttaaatacttcttgagatttaagaacattatttcgtataatggaagctcgtaataatctcactctgttcatcttgatgatcataacaactatatttcataaaaccacacatagtacaacttctccttgcttttcatcttgtggaaatatacacaatataaccttccctttcagactagataccgattcacccagttgtgtatcaacggggctctaccactcaaataaagcttttgttctttcttgtaaaaacaaccacactaccatattgaaaaataatggaagaagctattaccatgttgaggcaatcaattacaacaactacacaattaggcttgtggatccaaatatccaaaagggtaattgctcttccatcccaactacctattcatcatcaaatactctcccttcaccatttgaattacaaattacttttcgaaagggtgagaggttttggtccacaaattttgtaacatatccaacttcagagcgtgtgttattcttgagctgtgaaaacaaagtgtacaataattctttatacatagacacagctccttgcataaacacctctgatttgtctggaaatcccaaaacaaggttcttgtacgttgcttatgctagtggctttaagtactctgatttggtcgagtcttgccaaatttaccaaactgccctcgtatcatcgaagaaagataggaattatacgatgatgactatgtcataccaagatgtacacgatgagttctggtatggtttcgaggcttcatggctccgaattctgcaaaaaaatgttgaagaaaatttttgctacattagtgagagttacaacaagggttattgtctttatcgttattgcagagcactaaaactggcacggaatctagtttgtagtaaggacttctttgcttaaatcacatatatatatatatatatatatatttatactgaaattaatatgtgactttttagtaacaatagatagtggattacgcaggattctggtttatattcgagaaacgtctaatggtgtcaactgttcatcttactggtgagggtttctaatttctctagaactctattttgtttggaaagtaatatgttgctcagtatctatctttgaatttttcttcctggatgatttactcttcgatctcgttgttttaattattattaataatttttattttggttcccttgtttttgttgcagattttatttgtctacgatggagaaacgtcggtaattttctttttaatagtacacataaccttctatttttcattctaaaaaaaatgacaatactattttttctttgttaactagtaattttttatccgagctttgacatataccaaatcatgcccttgaatttttttagctgttaaaaattctccctgaactattgaaattgttggatttaagaacttttgtctaattt

SEQ ID NO: 119409 - DNA, 1381 bp, Cannabis sativa
  modified_base (1331)..(1351): a, c, t, g, unknown or other
ctagtaaaataagttccaacacttggagcctcttcacctgcctcatcaacttctctccaccaatccacatcagccacgtgtgatccgttagcctccccttccaacagcagtgcgccaagtggcatgtgagaaggaaattaaaagaagaaaaaaatgggttgttatttggttaaattcccatccgaaaaatacatccacaaaagacaaaaatccacaattttctcccacactttacacataaaaactcatttactcttcccaatttatttcacctaaataagcattgccattttatttttaccctacctttcattacttttacatccttacaaaatatttatttttttcaatactcttatatttactctatttatctctttatcatccattttgcctatagatatagtgttggaagaccatttacaaacacttttcattccaaaatcttccacacctcttccataacctcttctactcttcacttctaccatttcttttctacaccattttctttctaccatttttttttacattttgaagagcaagtcaagtatattattttataatttttatttcaatatagttatgagcttctaattttttttttcaagattattaaaataatgatgaatcaagatgtaactagataggatttattcttgtatgttaatttcccatttgtgcaacattatccatggattttgtcataaaaaatacattaaagtatgtctccacttagttcttcattatgcaaaagtataatactttttgattaaatgtctttcattaaattttttacatttaattcttagaacataaatattatattttgactacacataattccttaattttttttttaatttcattaggttgtaacacaactaatacttagaaattacattttatataagtgaagaaaatcctacatttttgaaaataacttgtgtttaaatagaaaatatattttaaaaaatatagtgtgatttatttcaactatatttaaacttgggaatcaatatatttataaataatattgaacttgcattttgtggattcttatatcttaataatcttattttgcatatctcatttgaaaactattttatattcactcaacttttattttgaatttttttattacttgtcttttacttttctacaacaaaaactcatcaaatatttggaactaggttagaatattcttactttgtttgaatcttttgatgttagtcaacttccatgagttcgatcttgtacttatatgaacattacattctaaaacgattagtgcacttgcaagtataaatacaaatgccatagattaaaannnnnnnnnnnnnnnnnnnnnatgacttaggtttataaaagaattcttaga

SEQ ID NO: 119410 - DNA, 3653 bp, Cannabis sativa
  modified_base (1195)..(1207): a, c, t, g, unknown or other
  modified_base (1531)..(1537): a, c, t, g, unknown or other
aagaataatgattggggaccaaaacttttatatgggttatccttgaaaaaagaaatttggtcaaaaaatgccaaagctgtgattatcatcatgatatttttctcttgacaatattttaaatattatataaataaatacttaattaccaaaaaaaatatatatataaataaataattatattgtaattttgtggagtccattttcatgagggtgtgagttatgttgttgggtctcatcaaaatattgcaactaataataatcaattaataaaaggacaaatcatttatgcaagtaacaactacatgggaaaataaaccaaacttgcactatattttgaaaaaaaaaagtgatattttattataagaaaaaaagtgtgaaagatatgtggtgttcctccatagaattcttaatattatttattcacaactataatttgagatttctccttttggggagtacctagttttgtcttgttctttatactttcaaaaatcttgagaagggcttcctcttattttctttttgtatgatttttataattaaaataaagagaaaaagatatttcatgttaggttaggttacatataataaactaataatgggaaaatttcttggtccaaattaataatgggaaaagatatttttcaatataacttttgaattcttctctcaactagaaagagcaaatagtttttcttctatatgtatcactaatttttgttttaatatttatatatatatgggtttatatctcaccctgaagtataataagtcataagaaaaaaaaaattgagcacttattaaaaaaaatgatattttttaaaattaataaaataaaatatattataatattaaaaggtgaaaaaagaaaaacagatgaactatgaatctgtttttttgtttgtaaatttagatttattaagtaaatttattttttaaaaaaagaatgaatcttaaatattttaatttaatttttcaacaatttttttagaattaaaagaaaatttaagtttgaataaaaatggacataattttgtgcaggtcaaagttttgggataaaaaaaactaaactaattattaatcatttaacgataaaaataaatgggctttttcagttttaacaaaaaaaaaaataatatttaaaaaatacttccagtcggctaaataaacaaatatacagcctaaataaaaaaannnnnnnnnnnnnccacttacacacaccttcaacctaggatccatgcttcatgggcaaccatcacgtaactacgcaacaacccaacacaaccgaaacgaaaatttaaccagaaagagaaccacgattaatttcgacgacttaacctcagaagacaaccagaatcaatcaaaacggtggttgttttgaattcataaaaaaagtgtagaaaaactactacgaaactaaaattcaaccgaaaatccagtttaatttgcataaaactaatgccttggcttcaattttcagatccataaaatgcagatctcaaaaagttgaactggagttctcaaacaatcnnnnnnnaagtataatccaaaaaaattacatcaatactatagtaaaatatttatcctgctgtatgttggaacgcctttttaattcaagggttgtttgatgcggttgaagctagtgctattttgtctatttcatgttcggtgattccttgataggataagcttatttggcacttttcaaataacgagatttgttcggtgaagagtggttattgtagcacagtttcgagtttagggtggggtcaatttgtaagctctacggggacgtcttgctggtggaagattctttggcgtcttaaccttccggcaaagataaaaaattttgtttagaagcaaggtaagtctgaattttctaccggcttatgctaatttgattcgccatagtataaaagtgtctaaggtttgccctatccatttctaagataattaaattactattcatactctttggctttttccttcgcttaagtctatttggttagggtggaccctaaaagggctcaactccataaagaatgcttcttctttttatgaattattgcttggctgtatggatattttaagtaaacaagaattggaggagttcattacccttagttggagaatttggcaaaagcgtaatacttttgttcatgacgacaaacttcttgctaatgatatgatcagttcttgggcaaataattacctttggagatatgagaaggctaacgtgggtcgacttttgtctcatgatttttgtgcaggggacgatgggtatgcccacgaaaacagatctagttttaagtgatgtgaacttatttgtgaatgctgggattcgtattgatgattgcaaagtggggatggaggttgtggcgtctagtcctaatgggcatgttttcttctctagtgtatttttgagtatggggtctcttgagcctcacgtggcggaggccaaggctttgctcacggtctctccctttgcctacaactaggttataagtctgtcactaattttttgaattgcttgtttcttgcagttaatagtcatgacactcatttcaataagtttagtattatacttaatgatattgctcaagtttggaagtcttttactagtatttctttatctcattgtaaaaggtgtaagaatcttattgctcattctttagctaagagccaatgactcttggtctagatgaatcacgtgtctggtggtcgggccttcttacggatatagttgttcaagtttttaagtttttttgtactcgacttttatttggctttgtgactcttaatggaattatttcatttcaaaaataaaaattaatatcaaatttattatttttgtttctttattaaaaattaataattatattgattattatatgataactctgatgattaaatttatgcgataagtggtcatatgcatagcgtatcataggctaataatgcatgccaaattcttgttgatcacgatgcttttacatcgattaagttgctctttgatgtacttatttttttcaattcgatagagttaaccaaactctatcgaactctctcaatttgatagagttaattaagagaattctcacatttgtatccatcaaaaaaatattaattgttttaagcaaacaaatcaattttcttaagaaaaaattattcaaaaaattgactatatatatgataaaaatattgaagatgatgatctagtatatcttttggtatttaagccaaataataattaggaagaaagaaaaccatagtactagtacttgtactctagctagtagctactacgagtcattcgtccttaattaaactccaatcatttacataattaaaaggttttttttagggtttcttgtttgtcttttttaaaaaaaatggaagaatagaaatcaacaaaatcataagaaaatggtaaaagaaatcacacgtgttcagtattctttttggtatcatattattgttagtgtaattaagtatcgagtctcacataatttaagacaataactcttataaagaatatcactaactaagagaaatactcgaggacaattataatgcctaacactctttttaggaatgacaaactggggctttttcgcggatcggatcgggccccaaatcgatgggccagtccc

SEQ ID NO: 119411 - DNA, 1893 bp, Cannabis sativa
cccgggtaggttggaaattcccaagtttctcaccattgatgaggaccgagaaggaaacactttccacacatctcatgactttttctatccattgttcgtcatatcccaatcccctcatcattgttcgtaagaagttccattccactctatcatatgctttggacatatccaattttagagccattttccttccattcccaaaccttttagtcttcatacagtgaaggctttcaaatccaattatggcattatcttgaatgagcctaccccccacaaaggcactttgttcctccgaaatgacttgatgcatactttgcttcattcagccagcaaggcattttgccacaattttatagaccacattgcataggcttatcggtcggaattctgacattcgagttggctttgggatctttggaatgaggcaaatgagtgtgtcattgatgtcctttacctgcatcccttcattgagaattcctaagcatacttttgaaacttcatcaccgataattgaccaatatttcctgtaaagtaggccaagcaacccgtcacttcctggagctttttggggatgaatgtcacgcatttccttcaatacctcctccttggtgaaaggctccaacaggtaggcatttgtagctcgggatatacgattcgggataattctttagaaatcttccaactcatctttagtagtcggattggaagtgaatagctgcttgaagtagtcacacgccacccttcccatgtgtcgatttcccgtaacccactgaagtcgatcatctatcaagcctttaacggtattctttgctttcctattactcgccttcctatgaaaaaactttgtgttcttgtccccttctttcagccataaagctctactccgttgcttccaaaatttctcctctttgtcaagccaaacattttgttttctttccaaatcccgcatttgttgccaatccttagcattagtacttcgggatagcaaagagattttatcttcatattcctttaagtgccttgtcatctcttgcttctttgtcttattccattgttgaagagccaccccacaatttcccagccgagtctttaactcccaagtgttcataatcggcttgtcttgtagccaagccgagtgcactatttttgtacactcttcatcctcagcccaagcgctctcaaagtggaatctaattcgccatctagtcgtgttatgcatctttaagtggggatcatagcccattagtagtagagggcaatgatccgagtttgtacaatccaaatgacgaactttcgtggaagggaacatgtcaaaccattctgaattaccacaaacccgatcgagtctttcaaagatgagatcattttttctaccattgcaccatgtataatcacttccctcataacccacatctcgtaattgacaaccatccaaagccttcctggaattgttaatgaggtaacccggtttaggaaggcctcccattttctctctttggctcacaatttcattaaaatcccctccaacagcccaaggtccggaatacattcggctaattcttttcaaaagcttccaagattgaaatcgttgactaggatccaggtcgccatagaaaccattaaaccgccaccattggccatcctcaattctaatgaaagaatcaatatggaaaggagaaaaggaaagtacatgggtttctacatccatagaccacaataaaatgagacccccacttttcccacgggcttcaaccgcaaagcacccaacaaaccccaacttgactctcaaggactccgcacgcactttactaattttagattcagaaatgaagaccattttaggagtgtattgattcactagggaagttaaggaacgcaccgtccaagggttcc

SEQ ID NO: 119412 - DNA, 920 bp, Cannabis sativa
aattaaaaaatttacatttaattttttaaaaagttgtatttttgttagtgggggctatagccccacattattgtgaatgggtctgtccctgattctgttatactgaatttaaaacaatgaaactgaaacgaattgccgatagaagattctggttgagtcgcagatagtgttgttttttttaaaacgttttgcgactctgtccgaaatgtgcacaacagtttagcaactacggcgtcctcgggataaaacagtctctgtatacgatatgttctgcaccgaactatatcgttcgattacaccctaaattttgttttgagaaaaatcgtaagggagaaagaattatttttttgttgttgaaaaggatgtacctgtaccgttgttctaatacgatttatatagagaagtcgatctaagattaaacgataagaaaacggtaatgtaatcgtgaaggagttggatcatgacaataaaaagaggatcattgactgattgctttttactacttcatttaacgttaaaattaattaattaattaataaataaaaaataattaaataatttttctttaaaaaaattaagtgacacctcacctgttgccacggattggtcggtcggacggcggcggcggcgcgcgcgtgtggtgatccaatgtgtgagtcctcaaacatgcactatatatacacttctaatgaagtgttcctatcccatgtagaactccaatcattcacacacttcacttttcatttttacacaatttcacaaaagttccaacagattctctttgaattcttctgctcgcctcaaggtactaaagagagaatgttaggatgttcaaaggtgtcctttaaccttgattgtaatgaagataatcactagaggttatagctagaaattcactcagaaagaaataaatttaacaa

SEQ ID NO: 119413 - DNA, 1343 bp, Cannabis sativa
aaatctagtctagctagctcattaacaacacttagcacactctttagtctttctttgctttaaatagtgtatttactttataattactagcttcaatagtaaatatacttaatactcatttacaagcattaatttccccaactgcctacaaataaatagggttgaggtctcactttacatgaaaaaaaaaaaacattgttgaatttgcaaacttaaaagtcaattgaaccacctaaaatccttaatctttcacaatttagtagttgacaaaaacataagttaatagcatcatatgttaccaaatgagtaaattttctaaagcaaaataaaaagctcacttcaatgaggaaaaaaataaaggatattattttgattagaagtaaagaattttttttagatttttatccaattttggtttgtaatattaattaaaaacattatgtttgatccatatatttcatgtattgccaaatggtaataccacatcataagtacatgcattttaaataaaaaaataaaaatttaattaaataatcgtataaatttaatattttttatattattcagaatatttataattattgataagtatgatatgctacttgttcatttgggatataaatttagtgttcttcacattattttgatattttatatttatagtagtttatgaatcatttagttttttttttttcagttttaataaaaaaaaataacaatattacaaaaatactttcagctggccaaataaataaatatacagcccaaataaaaaaaatcacacaaataccacttacacacaccttcaacctaggatccatgcttcctgggcaactatcgcgcaaccatcgcgcaactacgcagcaactcaatgcaaccgaaacaaaaattcaaccagaaaaagaaccactattaattttagcgacttcacctgagaagacgatcaaaatcaatcaaaacaagggctgtttcgaattcataaaaaaaaagtgtagaaaaactactaagaaactaaaattcaaccagaaattcaatttaatttgtataaaactaatgtcctgacttcagttttttagatccatgaaagacagatctcaaaaagttgaattggagttcccaaacaatctaactcaagtataatccaaaaaaattgcatcgatactatagtgaaatgtttatcctggtgtattttttgttgttttccaaatctctaatggtgaatttgttcatattaaatcataaaaagaaatgcagataaagttatgtacgtggaaatattgttttgatttttaatgtttcacaacagttgcataaatattttgctaacagttatttcgtttgat

SEQ ID NO: 119414 - DNA, 2274 bp, Cannabis sativa
  modified_base (2207)..(2215): a, c, t, g, unknown or other
tgatgccctcgccatacccatttgcaatacgggaaattgacctgattggggcattacctacaaagtaaggaggagcaaagtacgcggtagtggcagttaatttcttcataatgtggacagaggccgaacctctagtttccataacgtgcaaaaaagttctctattttgttgtcaagaacataatttgtagatttggaatacccattgaaatagtatatgacaatggaactcagtttgatggagaattattcactaagttctgtgaaaggaataaaattattaagagcttctcgtcagtttcaagatcccaagaaaatggacaagtagaagctgttaataaaaccttaaaggatactattaataagaagttagacactgcaaagtggagatgggtagatgaactaccacaagtactttgggctcacagaacgacagagaaaacaacaacaaggcacactccaatcttgttggcatttggcccagaagaaatgttgtgagtagaagttaatattgcgacccacagacgtgaattctacaatcaaaaagaaaactaagaagttgttaagttgttctttgatttacttgaagaaagacatactaagttgcaaattactaatgcagcttatcaacatcgaatcacgaggtacttcaataaaagagttaagaaaagacacttcaatatcagagatttggtgttaagacgagtatttacaaacacacgagatgtgtctactggagtgtttaacccaaactgggaaagtccttatgttatcgaggcagtagtaggaaccggggtttataaattggctcagcttaatggctcgctaataaaaaaaccactggaatagtgaacatttgcgaccctattatcagtaaattttaaatgaaatgttgtctttatctctgtaacatgtaaactcttattgttaataaagttaaagtttgttcaagtaattacaaagtcttctttaaaattacttgaggggaataaatatgtgtatatcaacaagaatttatctagaaatacatgttatattgcaaacccaccattttataaaaaaatccaagaaaggataattgattaaaattatctatggaccatataaagtcaaaaaagtaaaaaaccttttcttcagataagaaaaacaaagtagcagttgcaaatgagatcaagtcataaaacaacacaacgctaaatgtgaagttgaacatttaatggctcgcatcgttcagctatgtattataaacgaggcatgaaaataccttaaaaaaataatacataacctaaaatataaatagaaggcttaactttcatataagcaatcaaaaaatgtataaaataattcataaagtcaattattcaaagtatgtttaagttttcttttaagttatatatggcagatttaaactgctccaataatattggataaatagtaaactattcatgtacaataaggcaggctataattgcttgagaactgaaaagcataggtagaatgtaactgctcgcacacatacatagtagattaataactacttaaagaatatcaaaggaaaagtgagatcaatggaaatgctttcttaaagtatcttaaattggatcaaattataattgttcatgttgtgaattaagaacgcaaataaacaatcgtattaagttcaaacataaggtacaagataataaaagtaaagatagatatataaaagtaaagttggacgtccaacaatgtaaaattgcctttacaacaaataaagccagaaggggcaaactattgtctcggccaaaaggtcatttttctaaatacaaaaaaacaaataacaagttaaaaatcaagtctacattgtaggagacttggatggatcttcttcttcctcggagtctgcttcctcttcatcttttgtagtctgctcacaataagccaaaacctcatcggcacctttgcctaagaagctcaagtccatgtcggggtttgccacccaagctctataaatggatcgctttgcaacaagtttgcacgtttccttagaattagccttggctccctcaagcttcgcattggctgcattaagctcttcttggagtttttggtaggccttgcgtttgtccttggcttctttttggcatgcctcaagttcagtcttttggcccctttttgactccttagcatccttggtcagtcgcgtgatctgtaaagcccgcttagttnnnnnnnnnattagcagttgtttatgtttaattatgaaattatttatatctatttaaataatttatta

SEQ ID NO: 119415 - DNA, 2116 bp, Cannabis sativa
tcatttaatagtaatccaataacttaaaaaatgtaaccacgatggttacaataaaaatgtaaccattaaaacctttttcttatacttatagttttaagttagttggagatatacatatttaaaaataataatcttatacttacgttttatagatatttatattttttaaaaatcttgaaaaatagactaattttttaaaaaaattcattatgaattaaaaacgtgagttgaggttttttttattacttattgaattaattaatagctaatgtgattaaaaatgtgaaaaaagagaaaaagaatagaatataattaagctattttagacggccacatcaccgtctcatgatctcctttttatatatatatatatagattctatactgttattaagttgttgaagcagatcagttctatcattctgccattctatcttggcatcagaattcagcatgaggcacttttagggctcatttagtatgtcgtgtattgtattgtattgtgttagattgtattttattgtattgtattgtattaatattatttaatacagtactacgtttggtattgacttgtattaatagattgtgtaaagttgtaatatattttcaataaacttgaccccaacaccgactacgggtcggctcacgggtcctaggttcgagttcagtcttgggtttggatcttgggttcgggtctaggtctgggtctgagtcctaggtctcgggtccaagtctgggttcgggtttaagtctgggttcgggactgagtttgagtcttgggtcctaagttcgagtcttgagtctcaagtccagtacggagtttaggttcgaattcgagttcgggttctgggtttgagtccgattttgagtccgagtctgagttcggattgggtcctaggtataggcccaagtcccgggttcgagttcgatcccggtctggctccctggtcttgggtcctaggtctgggttcgggtccctaatctggttctgtgtccaggccccgagttcaggtctggtttgggtccaagttccaggtttgggtcagggtccgcgtctgggtccaggtctgggtttgggttcgactcaaagaatggggttgaccggaatcttttgtaaatattataatacaagctaatacaaaccattcgttatgtactaaataattcaacttacattgtattaaaaattttggttgtaataattaatacaatatattgtttcattcaaatatagtgttatttattatttaatacaatacgatccttatatagcgtaccaaacgagcccctaatgtaattttttccaagaaattttgtttaagataatggctaagtgtgattttgttaaacaattcactagttatattattgttggtgtaatattgtcaacttcaccgctcttattaaggttgggcatatgatccaatccaatatttttctcttcatctgatctaatccaattagtaattgaatttagaaaattatcatccgattcgattcaattagacctcaacatttaatacaatccaatctgattcaagtactaattagattagatcggttttttttaattgaatatctaattacacatctactttttaatattaacttaaaaatatgaagaaaagtacgtaaaaattgaatatcacattttatttaaatttaataccctataaaaatatcattgttacaagtgtaatgcaattaaaagtttgaaataattaaagtaatattattaagtaataaaatagaaagattaaaaaaaaataataaaatagaacaaaacatcatgaaaataaatatataaagtaaatattacaaattcaacccagaaaaaccatctagtaaatatataattaaaatatgtatttttgttatacataaataatttttttaatatatataaatgtaagggtgattacttaatgtttacatttttattgtaaccatcatggtttattacaatttttttttacttataatagcaggttacccatatgtaaaattttcttttttacaatcaattaattataattaattattttcttaaaataataaattgaatatttaataagaccttttagcaattaataattatatataattttttatat

SEQ ID NO: 119416 - DNA, 1033 bp, Cannabis sativa
  modified_base (41)..(56): a, c, t, g, unknown or other
  modified_base (977)..(985): a, c, t, g, unknown or other
caaagttaataaacaatttccataattaaaccctaattatnnnnnnnnnnnnnnnntaaagctaagcggtctttacagaaaatacctaacattcagagatctaaagaaaggaacaaacaaaaatctgagaaatatgtagagaattcaccataaaatatcaaattcaacatgattttttttttcgtttcaactagttacttggaaagtcttagaaactatcataacaccgctattttgtatttttctagatttgtacaaaattgagtactatttatatagtacgattggtacttgtgtacgtcacacgaatgacctcgtgatatgaaaagtagtgtgttggatacattgcttggagattcacacaattccacatatacctatcaacatatatgttgattagtaagcaaaggtaaatcaatatatgatgcgtaacaagtcaataatattaatagtaccttgttttctaaccatgtactgaaattttgataatgttcatcttgtacccatttttgattccgtgccttagtcagattagtggtcttgatccaattaaaatgttcccttcaagtattcgatggattaattttggttacaatttaatattattattttgttttaactatggaaagttaacttaaatttactcaatgtacagtttgaccacgtcagtattttgcaacacaagttggtgcgcttcttcacgaccagctcagcttacaccacaaagagaaacacccctacgccctctacttatttcgctatggacccgagtagggcaagagccaacgatggtaacctctgacaagtagtatgagcagaattcaatcgtctcttcaacaatgtatgattcaacaatacaaccctcaggcctacttctatttctaacataacccttcaagattttcttgtatcgttcaagtgggtacatccatctcaagtacacaggtccacactattggggattattttaccaggannnnnnnnnactaccatgtatgttatttaacattcttaatatgaatttctaaaacaa

SEQ ID NO: 119417 - DNA, 1716 bp, Cannabis sativa
acttggcgtggttgagccaccacggtaagtttgtttttcaggtactcgaactgttgaattgagatggcttttgtgaatatgtcagcggtttgctcagaagtgggaatgtgcctgatttcgatttttccttgtttcacttgatcccggatgtaatgtacatctacttcaatatgctttgtgcggctatggaagataggattggaggcgagttgtttggcacctgcattgtcacaccagattacagcaggtagtttgtgtgctatgccaagttctttaaacagagaattgagccaagccacttcagtggcagtttgtgataaggctctatactcagcttctgtggatgattttgcaacagccttttgtttctttgagctccaagtgatgagattacctcccaagtaaacgcagtaaccagttgtggattttcgatcatcaatggatccagcccaatcggcatcactaaagcattcgacattgaggttgtttgattgtttgaacataatgccttgtccgattgtcccttttagataccttagcagtcgcttgcacacattccaatgatgttgtgtaggatcgtgcataaattggctcaatttgttgacggtgaatgcaatgtcgggacggctaagggtcaagtattggagtccccccaagacgcttcgaaagaatgtaggctgatcgaatggcttgctgtcattggcactgagtttgtcactaactgagatgggagttggattcatgatagagcaacatgtgtgttttgttgagtaaatcagtagtatattttccttgagataaatgaataccatacgcccctctagtgatttcgaaaccaaggaaataattcacagaaccaagagttttgagagagaaaaactgttggagctgggagattattgttttgacctgttgagtgttgttaccagttaatagtatatcatctacatagacaagaagatatagttcagcaccagaatttttgtagtagaacaatgaggagtcggacacagaattgctgaagccaagagagaagagtacatttttgaggcgatcaaaccaggcccgaggggcctgacggagaccatagagagctttttgcaatttacacacataggagggatgtgtggggctgacataaccaaatggttgttccatgtacacatcttcagtgagaatcccattgagaaaagcattgtcgatatcgacttgttggatatcccaattgttagttgcagctagagaaaggatgacacgaatggtggcactcttgacaaccggactaaaagtttcaaagaaatcaacaccgggttgttgttgagagcctttggctacaaggcgagctttgaggcgttgcacagtcccatctcgattaagttttacgcgaaaaatccatctgttgtcgactacactcatacccggttgtctaggaacaagaacccaggtcttattctttcgcaaagcaaagatttcagtgtccatagcggacttctagcgaggattctgaatggcttggagagcattatcgggttcatactcggtcataaaagccacgggtgaaggtgagaaaacagagaagatgcgaggttttctaatgccagccttggcccgagtgatcatagggtgagaaggttggcgttgcataggtggtggaatggtatggggttgaatggtggtagtcatttgaggcggttgtgtgagctgagtgagaggtga

SEQ ID NO: 119418 - DNA, 2931 bp, Cannabis sativa
gaatatccattttaagagggtgcattgttgaattttccatatatttatttcttattattttaatatcttttattttaacatttggtatcaaatgttaatacattttgcatgacgtttcaacatcattttcactgtgatattatcactaaaaggagtgaacatcaacatattagattcttacatggttattcaaaattgtctagtgatgttattcttttggtaatttccgctatctgaatttaggtttgggaaaatcaactctttgaattaaaattttggaaaaaacctttcaaattttatttttattttgattaaggtagactgcattgtatacacaaatgtacacatgctaaattttttttgtccacttattattaataatttaaatattaagaaaataatataaaaatacattaattattaaaaaaatatataaataattaagaaaattaaaaaattaaataattaattattgggttatttacggcataaatactaaatatttttaattttatacagttaaatactacatttttttttcaacagattaaatacccaaatatagttttacttacacccgttactacttttctgttaaatataactgagaatatttctatgccacgtgttactcaggtatcggcccacttcatacttgtcttaaaaaaatattaattaaatttaaaaataagaaaaataattacaaataaattattatttttataaatatttgtaaataaattttaaaaacaaataatcattttttttttcaatctctcgatcccacattgtaatcctaagagaactaattagatctcgttatcatgtgatctaagtagtattatccatcagtatcaatacaactaaaaggtaggtcattacccgttaactaagagggtcaaaccactataaaatcatgtgtctatttactttattgctctaattgtgtaacatgtggcaagcatcaacattaaatttgactccgctatcggttggcaaaatgtgaggtcaacagtcttgaggattgtgttagaacataacttgacaaatcctttcacaaagacgctaccagtgaaatcttttataggtcatataaataatatgggactaagggagatgactaattttcttttaagaaattgagagattgttagggtttatgccttgaaaagtctttaaagacatttctaattatgaataagaattgaacattttgatatatgcatgaatgttaagttattaatatttaatattgaaatataaatattaaaaaaattcattttcatagatgaggccatgacttgtattgtacgaaaaattaagatcacttagccatgaataaaacaattagcaatatattaaggtttaggaatctttaatcaatagttgctagtgtgattcactgatgctcgttattcggtgcaagtaatctcgattcgaatttactaatgtatcatgacatcttagtgaagcaactatatataatagagattataaatgaaaataattgatagataattaagcattttttatcaaacaaatcgtttactataaagacctcattcatatcataatgatgatcaatggtaaatcggcctaaatcttaagtaatcaagaactcatgttcatattattagttgctctgattcactcgttaaagtttctcagagggagatgattcgtacaacttttgttttgggaatctaataatgcggatggctggaacatgatctacaattatggaatcctaactttcctaatagatcaaatgtcggttctctttatgtgttaattctgaaactaaaaagttacgcacaaatctagattggatctaaattatactttcactagtaaattaacgaaactaaatgataaagaagtaatcggaacagtaaaatgataatttgaccgaaactaactacgaacagatacaaggagggctaatcattagaattgattatatcaatagacactgtagtaaaacttaattaatataattctataataacttagagttcaattccatatttattgtggagtaatcatggaattaataaacatgattatttgatttatgagattcaataaataatcttgtttattagagtttagagttatagtttcatggtctccggatcgccaccttaaaatactgtcaaggagaggaataaaagttgtatatgaaagtttggaaaaatctcttttgaattgtcaaaatagtatttttttttgattttgtaataaatagtttatatttcaaattaataaattgggaaaagacaaaagacacatctcttgacttagaggcaccacatgcattgtgtcctgacacagtgcatgcaccacctatatcgggtgtccccaatgattttgtcttttttagttaattaattaattgaaaagataaatatttgaatttgaaaagtagttgagatattcgctcaagtggttaagacattccctcaattggttataagatataaatatctataatagaatttggttatattatttattcaaataattaaatatgatttaataaaaagatttgaatttaaataattaattaaataaaattttattagatttatttcatatactgtataaaccaaaattcaagacagtttttgaaacaaaagaatttgtatgtaacttttctaagaacctaaaaatgattaaccaataaatatttttctctctattactacaccaagattgttcttgcccattagttgagaatacaagaatttcatatacactatcatcctactagccagccaacactagtcttgaaagaaagatctagaagatcaaggtgtgagttttatcattaccgttttgagaatacaacatacaaaaagactcgaggatatcctgataggctttgagagataaatattctttttatctatttactttcaatttaatata

SEQ ID NO: 119419 - DNA, 930 bp, Cannabis sativa
atccttaaaacacttagctacgtacctataaatgatatttcagtctactaatataattactaaaatgaggcctcaatcatttatctctattaagctaagcttaaaaaaagtgatcttcccaagcagacaagtctccagaaacacatgaccatggtagatggacccagaaaggacggacagggtaaatgagccttgatctgttcttcaacagcctccgtgaatatctccaaccgcatgctacgtatgcaaattcaactcctatatccaagattgtaggagtttcaacgaattgtaactgcaccctagaatatgggattatttactttctgcttcttcctttaaggagctaattgtaacaaactttcctcttataattagtgaatgaattcacagggggaaaagactgaatctttgtgatttctactctatttcttaagagcacttctctgaatattattctctataaacatactaagagctagttagaaattactttgtcttccttagtgatttgttcagtactacctcaagattatagaggtttgacaccttacatcttgggtgttctttttatttctttactatttttaatcctttattggtgattggttaacatttattaaactccaaaccatttggcgaatttcttagtcaatagtttcccatattttagtttttatttattttttttttttgttcctatattttttttttattatttatttatgagtaaataccattttggaccatgtgttttacaaaaattaccaatttgaccctctattttattaaatgacaaaatagaccctatattttccaaaatagtaaaaatcagacattgagctcaatttttaaaaattttatttttcaatataactaactttaagatattttgtagcccgaacatatacagaaaatgtaactagtttt

SEQ ID NO: 119420 - DNA, 1238 bp, Cannabis sativa
cctatgaagcttcactgttccctggattggctttgggcttttcctgtgcagcttgttgacctttagccaattaagtgaggcacgatcatccgtatgagaggggaccattcgaggatgcaaggtgtcattcgcaaccatgtttgtactgagaatattagagaatatggtgttagacaaaaaggttgtcttcttttagtggtgcgcacactccccgagtttgacatagaagacaaactctgacactgtgggatcctgtgtctggaggactctgcataagatgatatttggaagctctctgattgcctctttgactatccgtgtctggattatcccatgagggtatccagattagtcctattgggcttttcttcttttgatacagacggtatcccccatactagggtggtccaacccttctatgtatgtaacaagggttgcatctgagtccagagccattgcttgactttgtttatgggctaagttattaatctggttgggcctagggagggactaccttcgctgatagtgggattcgttagtgtttacgtcactgctccagaaacacagacaacaacaagaaattcttgagaaattgaaatttctactatgattctaggatagttcaatcttacacacttcttggtaatctgatccacaacaagagattttccaagtagactcactattataagcaacgcagtctcttcctagtatttgtggtccaagctagcaagctaaatccaaattgaaattgctctaatatatatatactttaaaccaattgatgcatcccgaggcttcataattagaagcttcttattaaaaaaacataaccccaactaatatagcatctctttgctccatggattgaaaccactttacgtggatattatgaaacaaaaaatcaactttatccacgcctttcaattttcatacacgacttacaaaaccttccaacaaatcatagaagaattttaaaacatgacttcatcctcaatatcatccatatctattttaatccctttaactcttcttatttttctcatccaattcttgaacagatttagagctcaaattttgaaaaacatgattgtaaaatcagtggtgataacaccttaccttgcttagcttcctcaaagaacttctgatttgtgaacatccaatgtgaaaattttcgttgaatcactcgttctctacaaatgttgaattgtcgacctaggagagagagagagagagag

SEQ ID NO: 119421 - DNA, 1573 bp, Cannabis sativa
gcctataaattctaagatggagtcatatgagagcatgttgaattttgtctgaactattttagagtgaaagattgctctaagaagataccgaactgtctcaaaaagtttggaaattgcaattctttcaagacttggattggaacaatagtgtatcaaattcctagtctgaaaagatacatgccttgatcatactcagaacccactaaatcattttcctttctttgtttctttctttcaagttttctatgtaaattataagctatatgttttactattctccttccaatacctttttttttatatgcagaaatgaaacatttttggagttgtgtttaggagacatacacaattttctggtttgaaccaaagaaataatatagtactttctttagttctttaccgagacgaaaactgagaaaataggtttcgccgaaacgctgcagcatttgagacaattggattctgttcaactcatattatcattgaaaatggcacaagttttcacttctacagctataacacagttgtctcagatgttctttgtagcagtaatattctttcatacttctgagtacctattagcagttgcctttcacggtagaccgaatgttacactcggatctcttctcataagcaaaggctacatttttgcgatggttttctcgatgttggagtatgttgttgagatccttttagtccccgagttgaaggaacattggtggatttgctacacagggctcgtcatggttgttataggagaaatcatacgtaaaatggcgatcataacagctggttatgccttcacacatcttatcaggactaatcgtgacgagcatcacgaactaattacacacggagtctacagatttgttcgtcatccaggatacaccggttttcttatttggtcagttggtactcaaataatgctttgtaatcctttgtcgacgattggatttgcaattgttgtttggcgattcttttatcgacggattccatacgaagagtatttcttgagacggttctttggctcgcagtatgatgattatgctcgacgagtttgttcaggagtgccatttgtaaagtgattttcaatgagaatttatgcatagctgagttgaaagagctaaaacttcttactttgttaagaaatgccaaactgaatgaagtttattaacataagttagtagaaatggtattatgtttcatcactccaattgcttcaaaaacaaaatatattaattcaagtaaaatcttattttttctcaagttagaatatttagaggtcatatttattttttttagagttaaacgccattaattacaagttgttaatgtaatgagatttaaatattttatgaatggttactatgaatccacatagtaaatgaaattaataatctactttttgggataagttgagaaatacctcttttttgtatcaattaattaaaaataccttcatattttatacaattaaaatctacccacttgtaaagagtataataggcacatcatctataaaaatgggtatatcttaaagaatatggaaataaaggtaaaaattaaaacaaat

SEQ ID NO: 119422 - DNA, 522 bp, Cannabis sativa
aaatccgtggatgaagaaacatttgtctaccaaatggcctagttttctacatttaaaacaagaagcgcgtgacttcttgtttcttggagaattggtaaagtatcgaacagaggaggaaagaggggaattatcagaggatccaagagtgtgttggcgttcttcttgaatgatcatagcaaagactcttgacaaatttggaataggctcattgagcaagatctgagcacaaacggatgcgtatgactcatataaaccagtcaagaattgtagaacttgattctggttggaatagtcaaggaaatgtttcattgcaccacaagtacatgttgtattgggttgaaactctttcaactcatcctatagggatttcaatttggtgaagtaagaaatgacagaatgatcaccttgttgcaatctagtaagatgagtttgcaatcgaaagattcgagggccattttcctcattaacactactacaaaacaagcctttagagtcgcttttttcagcataataattaataac

SEQ ID NO: 119423 - DNA, 1808 bp, Cannabis sativa
  modified_base (1777)..(1779): a, c, t, g, unknown or other
taactaattcaattttatccttaggaaaaagaacaatgccattgtgaataaagctaaaaaaaaatctgtatgagtggaaagagggttacccaaattaaaatcacaaagctccagagtcaaaaagctccttaccccataaagtgtttttccacataaaagagccttgtttggattgaactatatcaccaaagtttcgattcctgagatacaaaccttttaggactcgaccgaccaaagaagtgggagcattgtagatccttgccgcttgcttcgcgagaagagcttggttaaacaaatgcaaatctcagaaacccatgtcaccatcttctttatgcatgcacaatttattccaagtacactaatgagtagcatcaactactaataagttatgaatacaactaggataactcggccaccaaacaatgctagaggacgctgtaatagcgactttagctatcgtgtgggcaacaatattaaaatctctaggacaatgcataaaataaaaatctttaacacccttacaaagtttaccaatttcatccaagacaaggcccaaagagaaaataagagaaactttgttcaccactttttgtacaacattcaagcaatctacttcaaagatgatattgtcatacccaaagcaatgacattagaccatgaccttttgaagcgccaaagcttccgccacttcaggatcaagacaaccttccagccgccatacagcaaaagctagaacaatacccaagtgatcacgtaccaccataccaaggccactacaagtacaatttttatcaataacatcatcaatattaaccttgatagaaccatccaaagaaggagaccatttcgaaccaatctcatcagaaggtaaggagttcatctatccctgagagagaggaggcccagccggagcctggctatgttggaagttctaaagaaattcttgagcccaatgcaccactacgtcaggagggattttaatattattatgcaccattttatttcttttgaactagatatgccacaaaataaccataactaattcaatttcatccttaggcaaaggatcaatgacattgtgaataaagctaagataatctgtataagtggaaagaggattacccaaatcaaaatcacaaagctccagagtcaaaaagctccttaccccataaaaaaaaatttcacataaacaaaccttgtttggatcgaactctatcaccaaagtttcgattcctaaaatacaaaccttttaggacctgagcggccaaagaagtgggaacattatagatccttgctgcttgtttcgtaagaagagcttcgctaaacaaatgcaaatctcagaaacccatgtcaccatcttctttatgcaggcacaatttatcccaagtacactagtgagtagcatcaactactaataagttcttaatacaactaggataactcggccaccaaacaatgctagaggatgttgtaatagcgactttagctaacatgtaggcaacaaaattaaaatctctaggacaatgcataaaacaaacatctttaaaacccttacaaatattatatatttcatccaagacgaggcccaaagaggaaatgagagaaactttgttcaccactttttgtacaacattcaagcaatctactttaaagatgatattgtcatacccaaagcaatgtcattagaccatggcattctgaagcaccaaagtctctgccacttcaggatcaagacaaccttccagccgtcatacagtgttgagaatcatggggttcnnnctcaaaaccaattggcaatgagtggagta

SEQ ID NO: 119424 - DNA, 575 bp, Cannabis sativa
tactataagattgtaaatagcagttagcttagctgaccccctaactattttctgttagttacagttggtattctttttaacaatattagttagaataagttagtagaatattagttcgaatcatttagtatgtcgctaactactttctgcctctctactttctatttccaattgtatgtataaaaaattgagctatttaataaagctaagattgatcttttgatattcatcctttcacttctctttcttttctcttttagatttctttactttcttgtttgatcatgtttagtagatttaatatgatatcagagcattcttcgccgttattggcaaattaacatggcaaccactgggactgaaactccggtcaacactaatgttctcgcaaatccatcaattggacaatagtactgtcaatcgtgccaagaacaaagcttcagatgagtatgcccctatctttttttcaatcaaaattctttcaataaagcttaatgatcgtaacttattgttatgtgaaaaatcgagtttttgcaaatgtcaataatatgtatgaaaatataaaactgtatatg

SEQ ID NO: 119425 - DNA, 1140 bp, Cannabis sativa
ttttgactgctaggatttcaggcaagaagaagaaaagaaggagtgtttcggttgctagggttagaggagaagagaaagtgagctgctaggttttatttcagcaataaaaagggtttatatatgccaaaagtgttttggtgtgtattcacttcatccgcacaagagaaggaaaggtcaagtttgacctttagttttgtgactttgggagttgttggggtaggagggatttcgggtattgtccatatcctacagattgagttgaaattttgatattcagggataggtaaacataaattttaacaactagtatgaaaggcacgagtaccatacctcttagttgactgtaattggggatgtgtgcaaatggttgtgtagccaatccttggtccgcatgtgttgcaacctaatgattgtaccactttctatcaaatcaccttgtttagtagaagtttcaggtattggcctatctgcaatacatatttactgtacattgtttcacatgttctggcattcttagagaatacttcattaaaaatcataaagatataacaatgggtccaattatggacaacggaggatgaaagtagatttctcacaaaacaaaattaatcaaattaatagtagaatccatgcagcatgctcattaagcaacttaaggttactattctttcattttatacatcataaaaataggggaaatttgaaacataaatttagcacaaccagagaaagaaagaaaggaagtgcccaataattgaattggcatcatcaatattgggaaaatcagtaatcgattgttgcaaagaaccatatggtattgaccacaagatcattagtaaccttggtgatcaaagagtcatcaatattgacaccacccttctcgtttgtaaaatgtgctctaaacaaatagttgtcactaaaagagatttagtaatagtcacaacacacaaaattagtagctaaataataattagtcacaagttttagtcacaaaaatttataattgtaactaaatatttttttttttgggaattcagtaagtatattcattcactacaccaatttacaaccaaagagcatcctcaaatagaagacctcaaaatctcaaagcttttcacaatgtatgaaaccatgttgtat

SEQ ID NO: 119426 - DNA, 931 bp, Cannabis sativa
  modified_base (887)..(895): a, c, t, g, unknown or other
aggaggtagggtttgaagcaaacattcagggaagatgaaaatgagaatgaagttgaatttggataagtctgtaagtatggagaatgttgaagtaagaagaagaagggagcaagtatatatatatacacagacacagagccggcgtggtagtggcaatggccggtgaaggtgaactttataaaggtatatatatatctctcatatcttcattggtcaaaagactcgaaattcaaaagtcatcattgaatctactcaaccattctaggacacatttactcaaccattctaggacacatttactcaaattcttgtgattattgggtgaaattcgatccgttatgtttagtttttataaatttataaccgaccagtttgttacgatttttattttacaaaaacaataacagactctctaaaaattataaccgtataaaatcgaccgtacgatttttggctgttttaggtgattttgggcgatttatggtagtttttagcgattttaccagttttttagtttaactattttttttatttcgaaaactgaaatccatataaaaaaaaatcgtaactgaaatcgatcgtcaaattcgatgatgatgtggaatcgaaaatttgattacggtctggtcggtttgatggtcagtttcgatttttcgatatttatgaataaccctagattttgggtagggcataaatcgatcaaattcaatgacattcgaccgattcaattataacttatcgttaaatatcgaatattcaattgtgatctgattagattggatgttatttttgaatatccaattgaatcagatgaaatatccaagaatctaatacattcaacattcaatcgaactaattgatattttcatttagtttgtatgagtaannnnnnnnnatgttgttatacgtaaaaaaaaaatatatgtatata

SEQ ID NO: 119427 - DNA, 811 bp, Cannabis sativa
  modified_base (535)..(539): a, c, t, g, unknown or other
  modified_base (738)..(758): a, c, t, g, unknown or other
atattaaaaatgtatggttttatgtaataagtttttaaaatgtataaatttttaaaataatttttttttgcatattttttgtaattattttatttttgttgtacatgtatgaaaaaagcccatttaaatttataaaaccggaaatatatagtagttaggccgcaaatatcctattttaggaatatgtcaccgccacactattatacacgtttcttgatttttacggttagtagtagtaataataatgaacagagatgatggaattaaggcgggtaattccaaagctgattgagaaagagttgagtgaaaaagggtaaaagggtaaattgagaccattccctcttttgtcttcaaagtttgaaaacagtgtgggacccaaagtttctctcgtgttttctctgtcgtttatgtgcttttgtctctctggcccccatccccttcctcccatctcacacactgtaatcaaatactctctctctcttcgactctttgataccaacgaaaccaaaatagtccctctctctctctctctctnnnnntctctctctctctctctcaacagtattctttttcttgttaatgtctacctgagcggctccgagttccggaaccggcaacgatggcttcccgaaatggggctgcttcttacaaggctggtctcaagttggatcatcgaccccttaactccaaatcgtcgtcgtttaagtctcggcctcctcctaactctgctggatcctnnnnnnnnnnnnnnnnnnnnncttcgtttggctccgggggtatcaagggggatgatggaggtattgtctcgctt

SEQ ID NO: 119428 - DNA, 2967 bp, Cannabis sativa
agtgtgaaacctgaaaccaaagaacaaaagcataattctattccaaaaacaatagcaaagaagaaaaacaactataaaaagtgacccaaaacgtaggctaaaaatagcctaacactccatgccaacacatcacttttcttcttcattgttgatacgattttctcttttacagccggaggcaaattcttccctacttgattgacttttgtaaaatcttcatcattgaagcacacttcttctacctcttccattggtatgatgattctctccacccccacgcatggatctaactcatcttcttcttgagctacccctagtgccagttgggcgggtgctctgggttcaattggattctcttccgaaaccataaggacaatttttattgagaaattgtagcagtttcctgcatattttctaattacccctggttgttccaatgcttttgctattacatggaaacttcatattcaacaggcaagtagaagttacagctccaaagtcttctagaacatgtcgtcttaggataacattgtagggagtgggacattcaactactacaaaggtacagtgttcgaacgttgatactatgttacttccaaaaaattatccatgtattgtcattggaatttgtatctttccattgaagcaatgtatctccattaaagcctttgagttgaactggacaagatcttagattagattccaccagacctatagcttgaaaagcacctttgaagagaatgttaacatgaatcccattatctacgagaattctagatattctcttatttgcaatatgagcttctatcaccaatcggttgttatgtgggaaatgcacatgcttagtatcattctttataaaatttattggcagattcatcatctgaggatgttgagaaggtgtttgtacacgactgcaagtttcatctttttccagctcatttaggtatctcttttgtgcgtttctcgtgcttttggcaatatgttatcctccagatattattaccatgtggccatctagtgctagtggagcaattccaggtggatatgggtttgcaggtctgggagcaataacaagtcttgtcgatgggacattttgtaccccctaaggagcctgtagagcttgatcttgtattcttagagcttgtggatgacctacttcttgcggaggatttattgctctgggttgtccaggaataaaaaattgtcaatgagctactccttgtcgtagatacataactggtatcctcaccgaattgggaagatgaccattcttgaaaaatcctcgatttcgtccttcaataatcacattcattttttgtatgcccaatatcaccatggtatttgcactttttatttgggtccattttgtgtcttccacccttgtacattggtagaggcttttggtagtggaccatattaccagtagctttatacacattctctcaagcatggaccacgctggtatctagattcttgagttatccttttctttgaagattcatttcaacttggagctttggagcctctattgctctgagaatgactcacattcgatcttggaatttctgcttgttggtttgtctgtttgggagcaacactattttagatttgtgccactgcaaagtcgaagaaactcgtttgtgcaactggttgtctagaagcacctaatatatatattgttggagttattgccggaggatgataatgggtgtagacaactaaggattttgagttgttgtagtattcgtggttggtgatggaagtacaccatatgcttgagcataagcgtcttctagactgatgaaaccctaggctccaaatagaaaattagataaagaatctaatcttttccattgaatttctccccatagtaaagatccagtggttattcctgatgttaaagccaccatcttcatatcatgagtaacctttgcctttgcagtagtatccatcatacattgattttacttcttaaggctttctccttgctcttgcttgatatttattgaagaactaacctctaggtggaaatcctttgatgctataaattattttttgaacattatctagagatccttccagttatgaatatatgttggagataatattttccactagtcttccacagagttggatagagttaaggagaaataaaggcattttgcatcatcacttgactttgccacttgcataacccgagtttatttggataaatggtctgtggggtccgttcttccttcatgcaactccatttgtgacattctgaagtgtgtcaaatgttgtgcttctataattcttttcacatatggtttcgtgtccttgtctctcaagtaaaacatagttccatttttcttcctggatatgcaatatgtgatcttatttagctcttcaatcttacgttctagacgctgagtggcagcatcttgaggctatcttttacaaatttggtcattgatgtgatttctcaagtcatctccacgaggttttgatttctcattctagccttttccctcttgacattcactcgtgcccggagatcgttttttgagagactttcacttctatcatctgatattggatgaacttcctccacatcatcactccagctagtggaattgtcatgataatttttatctttcctggcggaagaattttgtgcttgtgcatgaaacatttccttatctgcagttctgccccaagaatcagtctagtgacctagccctgaagcattggttcttttctttttcttatttaagtagactagcagaattagatctgttttgttgatcactaggagcagcttttttgaggtttctcatatttttccactcctttaatccctatgaggattacgggggtcggaatctttaggatttgttttcccagtagtatttccaacagcattcaagaaaattccttttgtgctgccaattattattcatgtgatcaattatcctctatatg

SEQ ID NO: 119429 - DNA, 2324 bp, Cannabis sativa
  modified_base (85)..(90): a, c, t, g, unknown or other
aaggagtcatattagtcggctacaattgatgtaaggttttctataattttatatgtgattaatttattattttaggaaattcatnnnnnngatgttagattatagattataatcaaacatacatgtttgtaaatctatatcttggtaaaataagttccaatatacaggccgaggaattcaaaaccctggttgacaggcccctcagggagtaccaatcgcctaagtacctaagcctgtttaagctcccacaccaagtaattcttatccatcaggtgttgctagcaaccatatccggaggcccacacattgctagaagtaccaaaaatgctcaaaagatctacctgaataagctagataaagaggggaaaaatgtgatcttgtctaaactccttcttagcatcaaccaatgatgaacttcccaattacttttatcgaagaagttgccaagcatgtgcatttctctcacaatgatccattactaatcgaagcctagattattaagaaaagggtgtcaaaattcctagtggacaacaaaagttcgatcaatattctctttaaaaatgctttccaagaaatgagattggtggagaccaacctgatgccttctcctatccaaatacagtgctttaatggagattttctattgtcaatagggaaaattcaacttctaatcacgctaaatgggggtgtagccaaaattagcacaaaatctgccttcaaatactgcactttcatggtagtagattgtccactgcctacaacattattctaggacagtcagttctcgttgaatttggagccatagcttccattcggcacctatgcatgaaattcccaagtgataatggaagtattagagttgtaaggggtgattagaaaagtgcaagaaagtgttatagtgtctcgactagaatagtatttatggtctacaaagaagatcagaaagaggctcaccaagcgtttatccagccaacactgggggtaatccaggaggaaaatgagttaaactcatgggtgggggtagaaagaataatcaaaccaatagaagaggtaaaagaagtttttaattaatgaagaagatcctactaaagttatcaaagtaggatggaatccatttccagccattaaaggaaaaattttatccattacaaagaaaaaccatgatgtactaacatggagccattttgacatgactggaattagtcctcacataatcagccatgttctaaatgttgacccaaacgtagatccaatttttttttaaaagaataccgttagatccagtccagtctaaagtagtgaagttggaactcaaaaactaaccttcattgaattcctcttggaggccttatatcttgtttggttagcaaattcgatgctggttcccaagccaaatagaacatggaggatgtgcattgacttcactgacctacacaaggcttgtttagaagattgcttcccacttccttggatcgataaaatggtggacgccatgtctgtacatgcactattaagatttatggatgcatacttcagatataataaaatcgtgatgcatgaagcaaatcaataacacaccatcttataagtggataaaggtgtatactgctatgccataatgccatttaagatcaagaatgcttgagcaacatatcaagtttggtgaacaaaatggtttaagatgttttgaggaagattatggaagtctacgtggatgatatgctggtcaagtcaaagacttccaaatagcatagtgatgatctggaagaggctttttccattattctgatgtacggaatgaagctgaattaaatgagaaaggttctagagcagaaattatcttgatttctccgcaggggcatcaactccaaagtgccctccagtttgaattcattgcctcttacaatgaagcggaacatgaagtaatgcttgtaggcttgcaattggcctgggaagttggagcccaaaacattaaactctacaatgattctcaattggtggtaaattagatatccaaagaatgccaaatgaaggtgagaaaatggcttattacgtatctaaatctcgagattttcttcaaagtattgaaagatatactttcaagcaagtccacttggatcaaaattccttggtggacatgctagaaaaactagcaatgaatctagaaatcaagaattacagactagttcccatatcccaccttgttgttcaaagcacagagtcactaagggtaagcctcatcgatcattcaacttcctagataggccctatataaaagttcctaagttctggggagcttcctgacctttgcactcaccccgatg

SEQ ID NO: 119430 - DNA, 1132 bp, Cannabis sativa
  modified_base (569)..(578): a, c, t, g, unknown or other
ctctctctctctctctctcgtgcacaaaatcaacaaaatccaatacaaagtgtcttcgtctcatacaccttttatttttttaatcataaattaaatggacaataataactatattatacataaataatatatttttttatgaaaataaagctttaattatttgtgacacttaaataatcaaaatcgtttcttagtagcagctactactgtaaatatgtgtcgtatcgtatcgtattatatcataaaaatataaatgattcagtatcgtgttataaaaaatgtgagttgtatcgtatcatgctaatattttaaaaaagttatcttaatatttttgtatcgtgctttattcgagtaattttttttatacaagctcaaatttgtgctatacttttttatattttatttttaccattaatgaaataattgctaaattatatgtattttttaaaattttcattatttttatataatttttcaacagtattttataaaaaatcatataaagaaatcattaaaattataaaatttaaatatttactaataaatactcaaattattattattattannnnnnnnnntattattattattattatcaaatagtatcttacgtatcgcgccgtgttttgtcatgtttagtttgtatttttttttatgatgtcgtgtcaattcataatattctgcttgtgttcatattttcttaaaaattttacacaaaatattatattctttttcaaactttatatttatactgtgatactttattttttttacatttgtatattctatattataatttttttatttgtacttttttattatttctctttacttttttattattttatttctttactccctttctctctctctcttaagctgagccttttcttttctttctcttttcttacgttgatcctctctctctctctctcttctttttcttctatctctctgttagcttcttttttttttttcttttcttctttaccccctttctttctactctcacacactctttctttttcacattttatttcgggaatatactcatttagtatcttgtatttttataaaaaacatatttggtaccctatgttttcaataatacttaattggtacctcatatttt

SEQ ID NO: 119431 - DNA, 1584 bp, Cannabis sativa
  modified_base (1533)..(1540): a, c, t, g, unknown or other
tgttggccataggactggccaggagtggctagccaatcccctcgtggtagttggttggccattcatcgtcccgtttgaatgtttagacttcttattggttgaagcgttaagtagatgacttaactttcttgttggcgagttgtattgccatgtggcattgttgttgccacgtagacatgccacatcagatcagcaaaaattgggataacacataacttatggcttaaaaacaaaaagcttaaatttaagttaaaacttcttctattttcatttcattatacccaaaggcttacataaagaagagaattgtacaaaattttacataaaattgaagaggtatattaatatttggtaacctcagcctattggtagtactaacgcaagtggtctgcattctaggcatgagggacccttgatccattaatcctcttaagttagaaagttcatttacccactttctgaaataattctgttaacgcagatttttgttaaccaataataagccttttcgtaataaatataacacagaaataataagaaataaataatgtataaataacaccagatatttttatgtggttttgtagttaaatttgcatactctaggagtctactttatttaagatattttctgattacaatatacaatatacaattgatcgtatctatttttctctctcgaattctccatccctttttctgtgggatctgcccctatttataggaatataagttggtagttatttacatttaattcaaaatatgtaaccgtaaacaaaacgtggtcaattcccacgtttcatttaaatcgtagtatgttggataatactagataactgtttaattgcttgttattcttattcttatagatgatcaatgttgatttggacaattttaccaatagtactcgcttgtatatacttaatcagttttttcaaaattatctaagtatagagggatatatatgtatattgatatattttctttagcttaaattgtactactgattatcaattgaatccttaaatttttaaatttttcattatttttcgcacttgtatacttagaaattttgaaaattccacttagaatatgaacattgaaatgttcatacattgccacaccaagctgtgaaagatggtcgcataaataaaacagcgacaaagcgaatatgcatttaaaagcaccaagttgcaattattaatgcataaaaatgcataataattatgaaaatacttaaaagttttgaaacaaaaggatatcctgaaaggatatattgttcatataaaccaacatcaaaagagaaacataattgtcttaaaaactaagtacaaaaggcgagtacctgtgtacttctcaaaaagagtttgaataaaaaaggaaataaattaagtactaggggcattgagatctttcgcgatcttatcggtaccatccgcaactttggcaatgtttgtgacctcagcctcctttggctaaaggtttccgcctagcccttgggtcacagtatgacactgttggaattattttacnnnnnnnnagatttactaccatgtatgttacattaacatcctaatatgaatt

SEQ ID NO: 119432 - DNA, 3902 bp, Cannabis sativa
  modified_base (32)..(65): a, c, t, g, unknown or other
atcgtttaagaaagttcatatttagggtgttnnnnnnnnnnnnnnnnnnnnnnnnnnnnnnnnnngtaaaataatttccaacagaggacgacctcgagactctagaaccaggagataggaaacaaactaggggaatccccaaaacgtctaggaagaacaacctgagtgtacaagggatcttccaatggataatcaaacaaataatcaagagcaacggggagatgttcctcaaggttcccaaggatttacaaactaatggaacgaatgaaacgatgtactagaagcgtttcacaggaatgaggatgcaagatagcctcaaccagggaaccagggaatccctcgtggcaacgagagaaaccctggaaatcaaccaaggtcaagtgggctacctccaagacaccctcaacgcccttctcgatcagagaaagaggatgtatacacatacttgaatagaggacgtgtatctaacctctttcgaaggagaatgccgatacaaaatgaagtaagttcaagttcgggacgttcaaggtctcgatgacatagtcgatcgggtaggaaaacgcgagagggaaatggacctcgacattatgctgacccataaagtatcagcaattcgtgaagttatcaatttaaaagttactcggagatctgtaagtaactatgagcgaaggcagcttgaccttcgagaacactaaatcgaagacaaccagatcttcgtgagcgtttgaatcaaaatgcacctaatttgcgccattggcttaaccaaaatgcaaatcaacagcaagtgaaccctatccaattacgaataattgaactagaagataagtttaggaagtatcaagatggagaacatggtaaattttcaggctacgactcggatgaggaaaccgagccattccatccagatatcctgaattctaaatttccctagggatttaaaaacccacatgtttcgcagtatgatgggaccacagacccagtctctcacttgagcaactttaacactattatgcgagccagcaatgtcacaaataatctacgttgcattttattcctgacttctttaacaagagctgtcagcagctagttcaacaaatttactcatcattttataacgccatgggaacaactgtccaaggactttaaaaagtaatttcaagccgctagagacaagcgacctaaagaattgtccttaaccaacataaagcagcaaccaggcgagtcacttaaggcttacttaagtcgctttagcacagccgctgcaaaggtcagaaacctcaatgaaaatattcaactcactacactttaggcggggatctcaactgacctatccatggctggaggcgaattgtgggatgacctgcagggtcgccgagtgaggaacattaatgaatttaatgaaagagcataagtatttgtgtacaaagaagaagcaagaaacgagatgaagctgttgaaaactggctcgagaagtaaacccagcacgagtatagcaacaacaagcacggtctcaacttaggtggaaaatcctagtggttcaaacacgaaaagaaaggatagatcgaaagaatcatctaagaataaaaagaaataaaaaaagcacgacaagtatgtttcgatatattcagtatacactaagttgaatgaaactcatgaaaatatatttctcgcaaatgaaaataggattgcatttctcaaacctaagcccatgaggcatgtgagacataagcgtgatttcacaaaatattgtcgatttcacaaagacatagggcatactactgaagaatgtcgacaactgaaggaagaaatagaaagtctgatcttgtgaggatatttcagacagtatgtaagacattagggaaacgatccaaaccagccaaacaatcctaataacccaaataactagagaatgcaacctccccctgttgagggcgagtatatcctgatcatttcaggaggaccacacctcgctggaaatagcaataatgcccataagaggtatatcaatgaaataaaaaatggacaatcgacgtttgctccaaaaccactaaaaagggcaatgtcaaatgaacctccgattatcttcttgaaggaagacacaaaacacgtatacccacatgttgatcccctcgtagtaacagtcaaactcgccgataagagggtgaaaatggtattggtggacaacaggagtttagtcaacatcctttacaaggatacattgaaaaaatggggttaaaggatgtgaagttaaaaccttgcatggtgagcctatgtggattcatatgttatagcattgctagcctaggcatcatcaaactcccattgattgtaggagatccaccgttatcaacgacgctgatgtaagaatttctagttgttgatcttccattagtatacaatgtattgatcagtcgcccatcattaattgaactaggggcagtaagttcgatcaagcacttatccctaaagtttccaacacaagcaggagtaggagtattctgaggtgactaattattggcacgagagtgttatcaaattgaacttcagaataggagacctaatcatcaattgatggtaatcataatagaagaaggcaataaggaagaggagggtctagatcccaggatccaagaagaaaataactagcttaaacctattgaagagctagaagagattattttagatcctaattatcccacacaatgtgtatacattgggaagaatttggaagaaaaactaaaatagtaattaatcaattttttaaaggaaacccaggatcaatttgcatggagccactcaaatatgatagggataaacactaatatcatttgtcagatttcaaacatcgacctcagttatccagcaaaaaggcaaaaatgatggccattagactttgaaagataagggacacttaaagaagaagatgacaagctattaactaacgacttcatactcgaggccttctatccctcgtggatttcaaacctagttcttgttccaaagccaaatggtacttggaggacttgtatagattttacagacttgaataaagcatgtcctaaagattgtttaccactacccatgatcgaccagttagttgatgcaacagcatgaaatgagctgatgacttttatggatgcatattctagatataaccagatcaaaatgcatgtccctgatcaagaacatacaagctttgtaacaaatatgggactttattattataaagtcatgtcatttggattaaaaaatgctagagcgatgtatcaacgattggtgaatggcatgttcaaaaaccagatcggacgaaatatggaagtttacgtcaatgatatgctggtaaagtcaataaaaagtaaagatcatacaaaggaccacgcagaatgcttcagtatacttcgaatatataatatgaagcttaatccaaagaaatgttcctttggagtttcctcaggaacatttttgggcttcatagtaaatgtgagaggaattgaagccaatctagaaaagataaaggccttaatcgagatgctctcaccaacaaagccgaaagaagtccaagctttggcttaacgcgataaatgattgaggcctcatttcaataattatattagtttactgaaatatcttttacaactagctaagtgttctaaggataaatacattgaagggtagaacagtaaatttgtccgtactcgatggagatcatatatagagaatctttgaccatttagattataacaatgaataattaataatatatctatatcttagaacatatagagcgttctatataattaagagtgttattccgaatctatgatgaagtcaggaagaattaataagttagagaatttacttggtaaattctagatctatttattggaagcttgattatatag

SEQ ID NO: 119433 - DNA, 2138 bp, Cannabis sativa
atattctatgcataataaattaatcaattctaaacatgtagagaattaatctacgtagaaaacacttttatcatgtgtattttttagtttagaaagagagaatttgaagaagaaaatgaactgaactttcattgataccagaacagagtacaacgtatagagagctttatataatagctcgatggagaagaaggactaactaattaattgtaacggtctaaccaacttggtaacaaactttctaactaactatgtacaccttacaactctaatactcctccttaaggtggagtatatatgttaaaaagactcattttgtctttcaaggattgaaattgattaggcaaaagggctttggtagatatatcagcaatttgatctttgttggaggtgtgcacagttttgatgactccttcttggactttctcccttacaagatggcaacgatctctatgtacttagtcctttcatgaaagattggattggcaactatttgttgagcagtctgtcacagtaaagcaatgcagaccttggatgctcaatttttaattccttcaaaagagacagcaatcacaagttgtgttcgacatggctatgtagttagcttcagctgaggatcttgagagtactctgtttcttacttttccatgatattaatgagttttcaaggaacacacaaaagccagtactggacctccttgtatcaacacacgctgcctaatcagcatttgtgtaggcttggagttgaatgtctgtttttgctgcataaaatagaccctgtccaagtgtccctttgacatattgaagtgctcttattgcagcattcatgtgtgtaactctaggagcaaccaaaaattgacttagcttattcacagtgtaagctaaataatcaagcctagttatagtaaggtattgtagtttcccaatagttcttctatacaattttggatctgcaaaagcatcttcaccatcttaactgagttttaggttcacttccataggagtgttagtagatttacaacccagatgacctaaatcttcaagaagctgaagagcataatgtctttgagaggaaaaaataccagcatcagttccagcaattttgagtccaaggaaatactttaagtcaccaaggtcttttagtttgaaccaatcattcagtttggtttttaatgtttgcacaacagccatgtcatttcttgctatgatcacatcatcaacatagataagaaggacaatgatgatggatcctttgtgttgaataaacagggaatggtcaggcgttgaatgttaaaaaccttctgtaaccaatgttgttgaaaaaatttcaaaccactgcctagaagcttgcttcaggccatatatagatttttgtagcttacaaacaacattgggaggcatctcccccttaggactataccctggaggtatagtcataaagacttcctcatgcaaatcttcatggagaaaagtattattaacatccaattggtgaaggaaccacccttgaataacaaccaaggcaaggatgagtttgacagaaacaagcttagtcacaagagcaaaagtctcattgtaatcaactccctcttgctgactgaaccttttggcaacaagtcttgccttaaatctttcagtggatccatctaaattatatttgatcttatacacccatttacatcctatgacatgatgactagcagggagactaacaatgatccaagtgccattggattcaagagcagcaatttctttgtccatggcattatcccaaataagaatgcatcttgcttgatggaagaattcaggttcaaaatgacttgagatggctagcacagtagctcaaaattttggtgacaacctgctataatcaataatatcagacaaagactgagtagtagagcatttggggacatgggactgaacacttttagtggagagaaaacagtgatagtcctggagataagatggcttcttagtttgtcttacatgtctatgagatgtagatgatttaggaatctcaacaacatcagggttttccatataaatgggatgtgcaggctgtattataggaccagactgtgtgggaacattagactggattggggagaagttttcatgaaggatgggaattggag

SEQ ID NO: 119434 - DNA, 1323 bp, Cannabis sativa
gggaaaggggaaaatcgtcctgacagagtaggagaaagactcttcggatgatgatgctccgtctttacttgttcgggccaatgctcctgcccacgtgcatggtattttttacacgcatttatttaattcataacatgttttgcatcatacttgccttttaacttttttatcttgtttacgtgtagtcatgtcgtaaaaagtactccaagctttgaagaagagagtaagtgacagctcgggccagactccccaaacaaagagatctagaggcggtgaggcctccgtccaaggagaaggtgccagctagagaagtaattgatctctctgaagtggtgcctgttgtggatccctcgaccccaaaagtatctaagtccaagagttccataagggggagctcgagtgggtctagtcagaccaagacttcttcaaccgccgtggtgcagagcacggaggccaaaaagggcaaggacatgctccatacctgaatcggtcacttcctaaagtgaacgatcagttgtttggggcaggtaatgagttgtccctagaactagtgatggcggagtcctgaaagaggctgctcgggtaagtgtttccttctttactcttgtttagcctttttaccagttcatgttttaattttttccatgcaggtcaacctgaggatggcttatgcttattcccgagccaagtccacagcggcaaagagccttgctaccactaacaccttgcagagggaggtgtatgcgggtaaaaaagaggttcaagacgtggggaacgagcttagagaggtgagcaagaagctccttactgccaataaatgggttgaagagctaacaaatgagatgcaggagatgtcgttaaccacccagctagaggcagacaatgatgccttgtctaaggaggttaatgaacttaaagacgagagggagagtctctgcactcttctttcaaagttggaggaggacgtctagactaggcagaccagggaggaggagctcgtgaaagaggtggaaagcctggaaacggtcgccttggaggttttctacgagttttggaaggccaacctctcaggcaattttgattaccttggtgattccaaagaggtatatcttgattactgtgcgggtcaagtggctaaagaaaacctcgaggcaaccacttctacactttcgactgatcagagcactgaaacccctactgcccagaaatttgagcctccggcccctacaaatcaagctaatccgtataaggagcccgggacccctaccgtttaaaacatttttcttctttttctttttatatatatctgtttggcccatgggc

SEQ ID NO: 119435 - DNA, 1979 bp, Cannabis sativa
gactgttagaatggttttagtgcaagataaagggaaattttgttttgggttttgacaaatccatgaacagccgaagtggattatatgttttcagatttaaaattattttgagcttaaatgggtacgaaaaatgaaaagaggaaggaaaatggtgaaaattcccccaaaacgacatcaaaaatagtttaccggaggctgaaacccgatcgggtcggtgatcggatccgaaatggatcgagtcgggtctaaatggcccatctgtaggttgaagacgacccaaaaatgacgtgtatgcattcagccaaattattgtcgttttttttctatgtattgtcgtttgataattgttgataaactacatgtcgtttttgctggtaaactacacttcagattttcaaccaaactacatgtagtttttcacatttttaaaacaaaatttttaccattttgcttcattttattttctcacttaattgtatgattatattatgtgtttgaccaatttaaataattaattaactcataatcacataattaaattgaagtaaattattttctaataattataatctcacaattttattatgtgttatttatcaataaaaatataattatattcacgtcataaaattatttgatagatgattgataattttttgatataattatgttagtgaataattaattgagtgcttatgtactcacctatctatcgtgagtctaagcacatcaatttcgttaatcataaattgtgagaattgtgacaaattgttgttaattaatttaatctcgtacaagaccatttttcatatgaatatctttccataatttttatatatatatgccttttgtgattttgagatattttgtgaattttattgttattattatgaaattcttttggggcatatactatggaaaatatgtaataaaacattgatcatgatttgcacatttaccgtaaaaattaatgtcaatatttaattgatattttggtagtagaattacaagaaattcaaaatgtgcatttggtattaaataattatgagattgaaattgttcattgaatgtgttatacttacttgtcgtaagctttcacatgtcaattagcgaaattgtgattcatgtgaatactttttccccgcatcaatcacaatttctactaagattcatacatgaaatttagttatgtcgatgatttattgttaggtaggatgtttagatggtgaaaaaaaaacacattagttatcatgaaccacacaatcttttctaccctatcggtaatggattaactgtatttttggttatgatatttgaaatagttgttcttacctgcgtaagagtcataagttttgtttgaacgactctagcatgacatgatcgtttccgttgatagatcattgagaaagctaagaaaacgagcagattgtgtaatctttgttttcacatagtggcattgctctaagatattttcttttagctttaagcaatcttaaaacttctaccgcttagttatcgaatgggactataatatgttttgtcatatcgatctcttattagaaaattggaccaggccttgaaattgatcaatcttgaaatcacatttgaatttaaagatgccaagttattgcatgcttagtaggagtattgtgatgggtgtcagttgaatttagtaaggtatatatgtgtcgatcgatccttattgaaaaaaaaaaaattaggatggaatcgcttaggatggaatcgccaatggtggcttgcattttcgttagtttgagcaagttgttgacatgggtcttaactctttgggtactcaattttagcacgcgacccacttgtcaaagtctctaatgtaggccattcaagatgtctttgaaaaaccgaatttttgcaaatgccaataattattacagaaatatactaaatataaaactgtatacgtctgcagcagcaggatgtaattctgttactgcagaaaa

SEQ ID NO: 119436 - DNA, 1784 bp, Cannabis sativa
tgtgcttcagttagaggactgttctttttgaacgaatttattaattaatagatcttatgatttttattcaaaaaaaaaacaaaaaacggaaaaaaaaaaaaaagggcaacaagatcgtaaacattagatttaacaaaaacacttccattattagttctctattttatttttgaaaatataataataaaatccatgtatctttatattttacctcgaatttttatagtagagcttctttatgttttttttttctttttttatctttatactatttaaataatataattttatacaataagaattaaatattttacctattgaataagtatagcaattcataatttttgatttaatcgtatggttcaaattaatccataaaaactttaacataattaataatttttattttcataattaattttaaatattattacttagttaggtttaattgacaaaattccaaatcttatactgaacctatattttctattttatgtctttacaaaattttaattataatttttcttaattttgaatttacatagaataatattttaagtaaatttatttttaaaacaataattataccggcggcccttatggggtgtaagatgtgctgttgcacaggaccccaaaaaataaaaggccaaaaaaaaaataaatgacttaatatatatttttttagtccttcaattttcttttaatgaactgaacttttaaagtgctaataacttatcattgatcatttctatgtcaattcttaaaattcattttcaattctattattgcttttaagaaaaaaaaaataaaaattcattattgctattcattatttttttttcttatcatttttttattgtattgcaatcaataacaattattataaattaattggagttttttggtattttataaaatatataccctatataataatatttaaaaatattatttgtaaattgtatttattttttgtaggggcttaatttctaaaattagaacagggtctccaaaatatttaaaacggcctacactacaacatattgacttgttaataattttataataatcattataagtactctttaaaatattaaaatgtcatgattttaattctgtgaagcaatcttttcttttctttatttatttttaatttaagattttaatcaatttaataattttaaattaatactatattaattaattttattttttaaagttataatgttcaatgtatttaaaatttttaaatatagaattaattatttattttaattacatcatttatcacatattaattagtaaataatatattttcataatatatattcctcaaattagttcaagataaatattcaatgtatttaaattttttagatatcgaattcaatttttatttttattacactactagtgggaggtacacgtgctccgcatgtgtattcaacatgattttttattttaaggggactcatttaattaagatgtcgtttggtaacacttttattttctaattttttaatcagaaaatgaaagtaaaatttttgtttttgaaaaacaaaaatgcgttctgtaactacttttgtttttcaattttaaaaacagaaacaaaagtgtgttatgtaaaatttattttcatttttattttttgattttatttacgtcgggttctaagtttggggtcagattcgggttcaaatcagaggtcgggttcagcgccaaggctgtgggggagatttggttccgggtctgatcgaagtcgaagatattgattaagaaaaaaa

SEQ ID NO: 119437 - DNA, 1679 bp, Cannabis sativa
  modified_base (709)..(715): a, c, t, g, unknown or other
  modified_base (1284)..(1285): a, c, t, g, unknown or other
  modified_base (1648)..(1653): a, c, t, g, unknown or other
ttatattctgcctgctttgttttgctgtagcagaattactttctgcttctgcaaacgcttactgttttatattttcttatatataactgacattttgcaaaacacggtttttcagtttccctttctttacccatcattggtaatttttcaaatggaagcaaagacaatatttctcagtttgaattgatcccttcaagtgcaagtataagtttcacaagtaaaaacaaatgcttggatggtttctaatgctttaaagagatgctttgatggtttctaatactttaagtgtccatttttttgcaatttcatctttcaatgatttaattattgatatttttagtcttccctcatttcttcctagtgtgcatgttgttcatgtcaagcgtacaattaatatggctgctcatggcttgactagatatgttttagaattggatgaagcttgctattggttggagtatattcctttatctatatactctcatattataaataaatttcttatttgatttataataacaaaatattgggtgattctacaatacaccctcttaaaaggagtgtactgatacatccttacttatttcggcatttaaaaaaaaatagtctatgttatagttatttaagatatcttacaaaattttgagaaattcggaataatttacaatataaaaaaaagtattcaaacaatctattttacacgcgtatnnnnnnnaatagtcacgcgtgcaacacactttttgaaccttattttcagcatgttaaatttttccaaatttcttaaaattttgtagaatgtcctaaatagttataacgtacatgaccataagaaaaaatttgactaaaaaattatttcagatgctaaaacagatagggagtatcaatatatctattttaaagagatgcattgtagaattttcccaaaatatttatcctagaaatggtaaaagaaaaataataattttaaattttttgatactcttaatgtaaaaaaaaaaaaaattactatataccagtacaaataaagtaaaataagtatattttgaggttaaatgtaagattcaacgaagtccctatggaatgacaaaatgtaacgaaacttttattattgcgaaataattttagtattaatttgtaagtattttatagggagaagttaaggagtaattttttttatctattaattaaaaaatattcttatattatatctcattaaaatttacttatttttgtgaatgagttgcccaatatggttttattatctacttaagtctagcatataanntacattaacctaaggggtataatgtgaacatcatctataaaagtaaatatatcttaacgaatatagaaataaaataaaaattaaaataaagtagatatacaatataattttctcaaattttcaaagttattttaagtacatttcttgaaataaccattctgatatattctctataagctttttagttttttgtttttcttatcatgtgcattgtaattactaagaccatttataaattttaaattttttttttgaataatttataatattaaaataaaatttaaatattttattgtatgcgtgattttttttagggcctttttttgtttttacacttctaacttttttttttttttgtatttnnnnnnaattctatatagaaacccctattgca

SEQ ID NO: 119438 - DNA, 853 bp, Cannabis sativa
ctcatactctttattttatttttatatatttattttaaattatagttaatactataaaaaaaaaaaaaacaagttttatttttcattaattttgatgaaacttttagcacattattttatttttaataaaagaaaaatatgccaccccacctcaaattgaatacgcacatacttactgtattagaaccttacattaatataatatattgtgtgtgattactattgaagcctcactcacattaatacgataattttattaaaaagtattaaattaattttataattttacatgtatataacttataaacaaataaattatgattataaaaataattaatgatttttatttaataaatataataaaaataaaaataataatcatgttgttaacgttgattcaattaaaataaaaaatatataagtttaattataaataatttaatataacatgataaatttgttatattatttgatcttatataatatataatttacttatatattaaattatcagattttataatttttcaataatactaaaaaaaaaaaaaaatcaaatattctcttataacttgatagagaaaaattggtcaaataaattccaaaaaaccaaacaactttatctttctttcaaagtgatggcattctatatgataagtctctgttaaaataatttttcgtagtgttaaaaccaaaaagtatttattgttctcctcatgttttctcatgtcagtatttcatatagaggttagtaatttagtatattagcaatagtgtctttactcataataaatgaaaattttggttgtccccaaatttgaatataatcaacatatttttttttttttgaaaa

SEQ ID NO: 119439 - DNA, 684 bp, Cannabis sativa
tttaggttggttgaaacctattttttttttaaaattggaggtttaattttaattttaaattattttaccaggatcttagatctactcacaagtgatcagaggctcctccttgctctgttatggcacgagagaagtgctaaacttcccattttttccattgttcctcctagagttgttggctccgcacttgtttctagtgtttttaccactagaagtctgggtagagtttttgttgtctgcatgtgcacctgttgggtcatgaggctagtgggttcctcgtgactacctgttgttaacatgctccacctgggcctgttgtatggcttcctcatgtttgataaagtcgtcagctctatcaaggatccttcatgttgttggtggatatcctttggatatctttccagaagtcacttagtgggattattccccccagtatggctgtatatcaaccttctttagtaatgccttttactttagtagcctcggccataaatctctgaatgttctccttcagaggttccccttgtcgatgtttgattttgacaaggtcttcaaactgcaatgatacaagtttcgagcacgagaattatgtgtagaattttcttcagaactcagcccaagagttgaatctccctacggtgagtttgaagtaccattgttgacctgtcctgacaatgtggctgg

SEQ ID NO: 119440 - DNA, 903 bp, Cannabis sativa
  modified_base (40)..(56): a, c, t, g, unknown or other
aaacagaaggtccaaaatagtatttacccttattattatnnnnnnnnnnnnnnnnnttattattattatttattaaaaatgaaaattgatagaccactcactcactcactcatgaggctttttaccctttttacgtgtcacgcaccaactaaattattaaatattatatctttaattatattttagttactttctcggtgtgtcttgcgtcacattcgtacacgtactattatatttattaacagtaaaagacaaaattatgagtagttatagcttaaaacatgaaatttagaagttaataaaacgtctttaaaaaataaatagtggttattattagagttatttaattaatgacatggttgtgtctaaattaatttgacctatgtcttaatgttttcgtgcttccatgtagagtttctctttttatttattattttttaccatcataataattttatatgtgtaattagggagagagacacattgtgggtgtgggccccttctatttttttttttattattttaatttgtatcattagctttttatatttggttccttttatttaaaaaataaattctattttggtccctcattaattaattttttacattctaaccccttaacattagatgctagcttgagttatcagtcaaataataataataaaaacaaataatatcctctctttgggtgctaggatttctctctaaaccttttgctactacaatcttcttttagtccgaccagggctcaccggcctcctctagccttgggcgtggctctggtctagttttgatatgggtgtcatcaggggcggagccaggtttaaaagtgagggggggccaaattcactaccaccaattaattatatatgtgttattttttaggggaattactccata

SEQ ID NO: 119441 - DNA, 739 bp, Cannabis sativa
ttttcgaaatgggggttttcgattcgaatgttagaaatttagattgagagatttagcttcgattagcctgattctccctttaatccaaaattagggtttttatcttgtcaataattttgaactgattcccataaagtccttgagtacaacaccagaatggaagctttcccacatcctcctcacctctgtaagttcaatgctttctgagagatcattttcaagcccagatgataaataaatcagaaaagaagaacaaaatcagcattaattaattgaatatggatattcttaagtgtgttcagcacatgcccccaatattgatattattggtactcttttttttttctttgagcaatcgtacaatgtgtatgggtacaaagattaactaaattcatggtagagatgatcagctacaattagatatggaaggtgtttcattaaaaagatagattataagtattgttatatagctatatattaccattagagtagtgatgttgtttgagttgtttacttcctcaatggctctatactcgttcatcttccacttggttttccttcctgtaggagctttttctttgtagaaaatcattatttttttcacccaataactttgttatccaaggagtaaacatagcctataaaaggggctggtaataagtcataaaaattgccctgtagctgttttggctttttccactttaatttctggaacttactacctgttttgcaatgttct

SEQ ID NO: 119442 - DNA, 979 bp, Cannabis sativa
  modified_base (611)..(616): a, c, t, g, unknown or other
gagagagagagagagagaaaaattttatttttttagaatttgaaaaataaataaatggtaagggttttttgggtaaattggaaagttattagaatagtattgtataaatgatattttttgtaataagtgtcttttttaagtatatataacgaaattttcctttaccaataaataggtataataatttctagtcattgatctaatcaaatagttcaaactaaattttgaaaactacaacctaataagtattttatttatttataattaattttaaactctatttattatattcaagtgacaaaaatttctaatctaatttttattgtattcacttatttgattttatgactaattagaattttatttttctatttaattttgaatatataagataatatttttttttcatttaatttccttttcaaaataataattatatctaaaaaatacaacttttattaacttacgtttatctatataattttataataatcaatacaattaataaaattattatagtataattagtaagtattcttatcttaacgatgaaagtaaagtgcatgagttcaatccttagaatagcatgtttttttaattttttttttttnnnnnnatatatacatatatattttaagtatgataatatagaatttaattattcatctaaactaaatcaaaataataattaatttgattggatgttggatgtattgaatttttggacatcccatccaacatccaatccgatccaattgaatattcaaaaataacacccattatagatattcaatgtttgacggcatactgtaattggatcagtcagttgtaattgaattagattaatttatgcacacctctactcgcgaccaggggcggaggtattctatgaccttaggtggccatggcccccccacaacttttcataaaattatagtactagtaatatatgtaggtaaaactagagaaactataaatt

SEQ ID NO: 119443 - DNA, 1562 bp, Cannabis sativa
gagtaaggtctttaatattttggcctaatttactctattggtggatagagatttttttgattgaaggattatctaccttcaattttatctgttgtattatattttttttgaatgattaataaaatagtactttttctcaaaaaaaaaaaaaagagatatataattataactaacgcttgcaataaattaaaattataatcatttttattaattttttacagttttgtacgtgtagtactacatgtaaagatgaaagcaccaaatttctctctctctcttctcagtagttatatatttttttttctttttatttattgtttttataaaaaaaaaaactaatctataaagtaataataattatttttgaatctcagaaaaatatacattattgtacaaaattgattgttgtaattttatctttataaatctatattcattaaacttttggtcttattagttggctgaccttttattttttttattaaggatgaaagcagaaaataaatatttgtgagcggcgcaagtacaaaaacaaataatttaaaggggtcattatataaataaataaagtatattacacgaaaacgacgtagtgttggcgatgagtactttagagtaagagtgtaaaaccctagcccctttcgcctcattaagataatattcaatagtttggataaataaataaaattaacatttgagaaaaaaatatctaataaatatataaaacaaattaaaaaagaaaattagtcaaaataaaaagcatatatatacgtacaaaaaaattaactattaattaattaagaaattttgtaataataaccatgtaaaatagattcttaattaataaactacaaaaacatcccaaacgaaacatcataaaaaaataaaataaataaaaaattgccattatatatatacgttgagatatatacaccagatatatatatgtatataaacttaccagaaatgggtagatcagaatatattactcagaaaatgattgatagcctccaacgatcctatagtagcagctagctaagagagaaaatcactagttagggttactgtcagaaaccctagctactccacaccatatccacctgcagtactcaccaacatattcatcatcgattaacaaatgcgagagatctagaggagagagagagagagagagagagaccattatttcaagaatgattaggcttgagccagtgagttctgatcgccttccatggaaatgccggtgttggtttctgctactcaaaggtggaaaagaaaaggaaaatcctaaataaaccctcctataatactgagagtgcgagagagaaaaaacaatcatgagttagggttactgcaaatgcaagaaagtagagaggagagagagatctagagatagaccttcggatattattggaagaatgatgattacgcttgagccagtcagttttgatggctgtaaagcccgcttagttaatttggaaatttgcagttatttatgttaatcatgaaattatttatagctatttaaataatttatcagggatatttatggaattcagata

SEQ ID NO: 119444 - DNA, 1634 bp, Cannabis sativa
acttccattctggaagtgttagtggctgaagtaatcctggaggtcgctgatgttttgcttaatttgttgacaagttaagcacttagtgacatagtctaccacatccccttttcattccataccaccagtaatatggctttagatcttgatacattttggtggttcctggatgcaatgggtatggggtagaatgtgcttcttccaaaatttctctcttaagatcagtgttatcagggacacacacctgcgtcttaaacaatatcatttcattccaccaccaaagattgaaaagtccttagctttgcctactaagacatcttctcgaatcttaatcaattcagaatcttctaattgagccactttgtttctttccaacaagtctgactgaagtgtcagattatgcaatttcagcaaccaactcaatgtttttccctagacatctttgagattaactgaggagaaatcatgatcatattgaatatctggtcaggtccttttcgacttaaggcatctgccacaacatttgcctttccaggatgatacaggatttcatagttagagtttaaatacatgaccgacaaagtcttcaattggtatgaggtctttcggggtgaattccaagaacaaaatattgagacttttgtccaaaacgaataatattataccaagatgaaaagtaagtggtgctcgactatgcaaaataaagatatatttctatcaatgcagaaacgggacaatacagttaattatgattgcatcgatagaagagggacagtacagttaatcttgtgtttgtaggatgtattaagcctcttcttctcctcatctgtcctcacagatacgagggccgactggagtattcagcaagagttacccaaatcagaatacttgaacccagaagcgtacaccacgtacacgaacccagatccagacccgaacccaaaagtagagctatttatgcaaggagatgggtctatgtaaagaggattgttgtacaccttgttttgacaaattaagaatagtatgtactctgaaatggggtaagttttgaattttctccaccgaaacaacccatcctctccaatcctagttactatttccaattcagaatttgtgctgagcagattcatgtcgtattggttagggatggaggagcaatcatcgttgttgttgtggagatttgggtacacaactctaattgtgtagtcgttgtaattgattcccacaactgttaaattgtaaggatactcatctgatgtgaggaggagggtagtgttgttcatgcaaaccacacaaatcatgttgcagtaggatgtatttgtgatgagcaggaaaggataggttatattatggatattgccacaagaagaagaattagaataagaggcagtagtagtggtactatggaacatagatagcataattgtgaatatcatcatcatcttcagaatcacatcatcaacaccctccattataagattaattaactgcaatacctacgcaataatataccatatcatttatatatagcactacaaaaaaatggatattcagctacaaaaaaattggtagcaaataatgcctatttagtagctaatatactttttgcaactaactttttttggtggctactt

SEQ ID NO: 119445 - DNA, 891 bp, Cannabis sativa
ttacacagttacagtgtaattacacggtcagacaaacatgtcaaattgtgtaattacctccaattacacacaaatccaattacattgtggctttccaaacgcactcatagttataataataaaattatttatgaagcttatatacacattattatatataatttttatttcatattttataattataatattataataatttatatatattgaaacagataataaatatttattttttgacacaaaatatttttaaattttaatttagcttgtaaaattatttgttttgcattttttaatgaatatgagatattataaataatgtataaaaaaaatataaaactacatactataattataaacatttattagaataacataataaacatacatttgaattttattggtttttttatgcttttaaaactataaataaacacacttctataatttaaatacattaatgtttatagttttgatattatatttttataaaaaattaattaaattatatttattccaaataagattaataataaatttttttttattaaaaaattattttgtttataaatgttagaactgtttaatatttatttatttaattttacaaatttgtttattttgtgtttttagaaacatatttattgattaaaaattttaaaattattgttagaataaacctgaattattattattatgatgtcacacatgaattacaataatatataatacacatttatttttaaattacatataaatatacttttaaaatttatatacgttaaatatgggcaataattttattacgaaaaatgagtttgattatatgtacgaaaaaaaactcaaataattttatctatattgaaaatatatattatttaaaaaaaa

SEQ ID NO: 119446 - DNA, 6410 bp, Cannabis sativa
  modified_base (44)..(49): a, c, t, g, unknown or other
  modified_base (99)..(120): a, c, t, g, unknown or other
  modified_base (6351)..(6371): a, c, t, g, unknown or other
taatagaatttatacattaaatacaatcatgaaataaatcatgnnnnnnatgcaacataaaatgtgatttctggtctttattaattagtaaatttgatnnnnnnnnnnnnnnnnnnnnnnagggcacaaaacccaataaaaacaggatacaaggcttgacctacccaaaactcagtgatatcgaactcgaccgagcacgaggatcacctttcacccctgaaattgaagttcatgagctacccccaaagttcaaaatgccaacctggaagatatatacagtaaaagacgttcctttatcgcacttgaagtattttgagatgaaaatggacttgcagggtgtatgaggtgatgtatagtgtagaatttttcttggcacgctcgctgaagccgccgaataatggtatttcaaactgcctccaggaaggtttaactcatggaatgtcttctcatcagaattcgatgcacaattttcctcctctcgtcaacttccctcgtaccttaaagacctggtcgaagtaaagcaaatgctaggggaacccctcagagcttatattagcaggtttatgactgaggctacaaaagttaaggggttgactaaggaaggaagactagctattatactggggggcattgaacctctcagagaattgtggaaggatataaaaaggctaactatgggatcaatggctaaattccttgatcgggcagatgggttcattaagcccaaagaggttgtttggcgtgtggatactgtcgggcaaaagaaaaaccaaccatgtgcctgtttggcaaggatgtccgtctagaatccacaacatcatagcagttcaaatccaaatgggaaaaggcctagtaacaacaacatgcagggcaatggaaagaaaggtaatttaactgacaatgtcgagcagcaccccaggaagaatgtctctaaattgccttctcgatcctaatagatgacatagagaaaatctatgtgataactcagtctatggtgtcgtacaaaaaaccgtctcccatgaaaaagaatttaagcaagagagacacatctacgttttgccgatttcatacggactacggccaccacataaacgaatgtaacaatctaaagcgagaaattaagtttttcatcaaaaataataacccacacttacagaaatatgttaaagccaatcaagatcaaagggctgcccaagcagacaaaaatcagacccaattgatgcctcgaccagtggacgggcatttacaggtcattattgggggttcgctgctcgctagaaactcaggcaaagcttgagaaaagtatgcttgagccttgcagtatgagcaaaataaggcaatcttggtcgtggaacagaggaaacctaaaataccacgtgtaggggagctggccataacatttactgaagtagatgccagccatgtcatcttcccacacattgaccccctggtcgtagaggtataaattacaaacaagattgtggcacggaccatggtagataatggagcttcctcaaacattctgtttaagacaacttatgagaagatgtgactccaacataaagacttgattccctgcaggcaactcgtatatggtttctccagccaaagcattgcacctcaacgacaaatctgcttacccctcactgttggacaagctttgaggagcaaaaccgtaatggcacaatttttgataattgatgtccctttagcttttaatgtgatgttaggctgactgaccctatatgacttaaaagctattacatcagtttttcatctgtgagtcgaattcctaacatgaagtggggtaggatgtctcaaagggaattgaagaatagcacgggaatgctacaaccttgctctaactaaggtcaagaaagaaaatacctccggccaaagtttagacagggggaaaagcattgcccaataggaagtatcccaaggcggggacaaagatatggatccccgacttggggaaacaaatgcaaatgttgggcccatagaagaattggaaaaagtggaaatcgacctagatatctgcgctaggaagctcaaaatcagtaaaggtttgttgttcgaaataaaattagctttaataaaaaattttagagcaaacttggacgtttttgcttggtcacatgaggatatggtcggtattgatcccaccatcattcatgtctcacgccctgaacattgacccaaacttttgtcccgtccagcatagaagaagattacttgacaaagagtgggcatacgcactaaaagaagaggtagaaagactacacccgaacaagttcatcagtgaagctttctaccttgcttgggtggcaaaccttgatacccaagctaaacaaaaaaatggcaagtatgtattgatttcaccgacctcaacaaggcgtgtcccaatgactgttttccacttccaagaattgatcaacttgtaaatacaacagccagacatgaaatcctgagcttcatggatgcctactcggggtacaaccaaatcagaatgcatccacctgaccaagaacatacaagtttccgaacatatatgggtctttactgttataaaggaatgttgttcgatctgaagaatgctaaagctacataccagagactagtaaactaaacgtttaaaaactagatttgacgaaacatggaagtatatgtggatgacatgctcgtcaaatccatgacggctaaggggcatatagaggatcttgatgaatgcttcaaaatccttagaaaatacaacatgaaactcaatcccttaaagtgttccttcagggtcagctcgggtaagtttcttgggtttattttcaatgcttggggaatagaagctaatctagagaaaatacaagccctcctgttatgaaattgcccataaaaacaaaggaagtctagagcttaactggtcgaattgtcgcacttagtagattcgtttcaaaatccatggacaagtgttctcctttcttcaacatcctctgaggtaataaaaagttcgaatggacggaggaatgtgtgaatgccttctaagaattaaaaaggcaactcgcaaaacctcccatactctcaaaacccttagacagaaaaagaattgggaatatacttggctatcactgaatacgctgcaagcgccgtgctgataagggaagaaaaaaacgtccaacatccagtctattatatcagcaaacaactcattgaagttgagggacgatatcctctgatagagaaactcacccacttccttatcttagccacaaggaagttaaggccctattttcaagctcatcctgtttgggtatacaccgaccaacgtctgcgccaaatattgcaaaagccagatgcttctggacaattactcaagtgggtgatagagttgggacagtatgaaataattttcaaaccccgtatagtggttaaagggtaggccttggcagaatttgtagttaagtgcacatgcaaagaagaaaataacataagggatgatccagagctagtacaaggatccctacctgaaaagaatgaagacagacctacctggaaactatatgtggacggattggctacagactagctttctggtgcaggaatttccctcatgacacatgggggcaatacctacacggagcaatcaaatttgggttgaaagcctccaataatgaagcagaatatgaagcactcatagctgggctaaaattggctcggaaggtacaattgtgtagtgattcacaattggtagtaaatcatgtctcaggggaatacgtggcttgaggagaaaaaatgatggcctatctaagcaagatacaagacctgctcgcacaatttaagggttacatcctcagacaaattcaaagagaagaaaatacaactgctgatgccttggcacgactcgcaagcagcacagtaaaatataaggccaacttagtcccaatacaattttttaaagagcccagcataaattgtgcgagcttatctcaacactggaaaacgtccaaacgacaagaacgaagcttgaaaaatgatgagaaaaattgcacagtatatcatacttgaaggcgtgaagtatagaagaggtttctccatgccattacttagatgtgtaacaaaagaagaggtcgcacgactcttgtctgaggtacatgaaggattttgtggcaatcatccagcaggacagagtctatcaaagaaaatactaaggcaaggatatttctggccaaccatgatggaagattcaaatgcctatgtaaagaaatgtgataaatgcaagagattttcaaagagcccccgtgcaccgcccaataagctaatacagatgcaaagtccttggtcttttgctatatggggaatagacctgatcagacagttgcccaaaagtaagggcggggtacaatatgcagttgttgcagtggatgatttcacaaagtggacagaggcggaacccttagcaacgatcatgtctaaaagagtgttggacttcatggtgaaaaacatcatatgtcagttcagacttccgcacaagattgtttcagacaatggaaaacagtttgatagccagatgtttactaatttctgtgtgacacatggaattataaaaagtttctccatagtggcacaccctcaaacaaatggtcaggtcgaggtagtcaacaagacactcaaagacaccatgataatgtggctcaaagaagccaaaaggaattagctagaggaattacttgaagtattgtggtcataccgaacaatggagaaaacagcaaccaggtagacaccattcgctgtggcttatggttatgaagcaatgctacctgtagaattagaacctctggcccagaggagactaacctacaaccaagaagctaatcatgccctcctagcgtaatcacttgacgagattgaagaaaaacgaacctcagcaaacctaaagctagtagctcatcagcaaaaagtggctcggtatttcaacaagcaagtgaaaggaagaaaattctttgtgggagatatggtccttagaagagtgtttttaaacaagaaagatagtgcagttggcatactcggacctaactgggaatgaccgtatcaagtagtagaagtgacagactctggagcgtacaagttgggacggtatgacgagaatatggagcttgttctagtaccaaggtattggaatggggaacatttgacaaaatactaccagtaagtgcataaggtatgatgaccctctcaaagtgcacaatgctcgaacatctactcttaagtaggtggccttttgagcggacctcgctcaaaggtttagataaaatgactggtactcaagttaaatgaccatttctaaaagaaagtctaagaaataaaattgttttatgtttgaattagttaaaaatcaattagatcatgtaatatctttcataattcaataaatgtaagttactacggtaacaaaaattttcagaccaataaatgaataaagatatttatcatcattctaattgtgttaattatttttctttatagcaagttatggatttaccattaaaatgtgtacaaaggttctgcttgaacccaaaaagtcgaacagacaaaaaataaactattacaatacaagtgaccaagagtcataagtctattcggtcacttggaggtcaactatactcgtacgaaacaaaggtaaataacaagctcgaaaaatagaaattttcatgtgcaattactaaaacaatggaaaatattcatttaaataaaaagataagaaagcacgataagtctgggataaaaggtcgccttgccagctagttatcttaaaacaaaataaaaaataaccaagtttaaaggctgcttggtcggccatattatactgaacaaaggcccatgagccgaaggaaaaaaaaaaagaaaaaggtcttatacattggagtccctggttctttgtatggatcaagttaacagattggtgcttttattgagagccttagtaaaaataaaactcgaaacacatctccccttttcttcttttaacctcacaggattcttataagatcatcacaatatttatgtgaacctaacatggttctcatagatgcataaacctcacactgttcttattgctgcatgaacctcgtgaggttattgatgtatgaacctcatggggttcttattaacgcaagaacctctcgggattcatattgatgcaggaacctcacgggactgtttttaatgcatgaaccttgtgagattcttatcgatacacaaatctcttggggttcttaactgtttatattttaattgatggactgcatgtgttacaatgattgcatactgggcattcatgtactaactgttgggttttatgcnnnnnnnnnnnnnnnnnnnnntataatcagatttactagataataaagatcagaaataac

SEQ ID NO: 119447 - DNA, 859 bp, Cannabis sativa
tgtccatcaaatctggcaacatttgggaaggcaatccttagtatataataacttttcccaggaaccaaatagatttagcgttggaaaaccacattgttaatcgaaagacttacataacgaaacgactgaagtggaaaattgaactttcttttaccaacaataataatgataaagaaagtatggtttcacatgacttaattgcaaagaaagaagtagttgaacctttaggtaattttaagtctatatgaatcaagaatataatgtcaaacattctcctagaaaagttagcttatatacatattttgcttataaattaatgcaaacaagttcatgaaggtaaaatctgaagcatatcatgatgacaatcaaggtgaaatctgaacctgaatttatttattttcttaaaataaaaaaataaaaaaaattataaatattgatttttgaaaaggttttataaaatatttttatcaaaaaataaatttattttaagtatacaattaatttaagtctaaaaatatgaattttacacgttaattacctattatagcaagtcataaaaaatgtataattaaaaatattaaatatttcacaaaaatattaaaattaaaaataattaaatatattttctcaaaaaaataataattaaaatatatatttttaaaataaaagatacatataaaatattctaattaactaaaacacattatatactaatattagggtacatgaacaaaataaaaaaagaaaaaaagtatagaattgatatgggtggtaaaaagtgctttcagtttagagttcaattgggcatggcttaagagaactactataaaatgtagctatataacagaattcttggttt

SEQ ID NO: 119448 - DNA, 2497 bp, Cannabis sativa
  modified_base (38)..(56): a, c, t, g, unknown or other
aagttcatatttaaggtgttaataaacatacttgtgannnnnnnnnnnnnnnnnnnaaaataatttccaacacctatgcctctaaacagttgaaagattttgaacagcgctatcccactcatgatctagaactggcagtagtagtttttgccctaaaagtttggcgtcactacttatatagtaaaaatagtgagatttataccgatcacaaaagtttaaaattaggggtgtgcataaatcgatcaaatctaatgagaatcgaccgatctaattacaatgaattgctaaatattagatatctaattgtgatcggatcagattggatgttatttttaaatatccaattggatcagattgaatggtggatggggtatcaaaaattaatacatccaatatctaatcaaactaattagtattttcatttagttttaataagtaattagattttatattattatgcataaaatatgtatgtatatataaaaattaacattaaaattttaagttttttgtggattggatggatctagtccaatccaatacatattggacctaaaatattggatggatctaatctgatctaaaaaatattaagtgtaaaatattggatacacccaaattaaatcaataaatatatatatgaaatatatccattagatagaaccaatctaatccaacatccaatggatgttggatcaattggatgaatgaaattaattggatcggatcggatggtaaaatttaacatccactgtataattggatcggatctggataggcctaaaaacattagatgtggtccaatgaacacccatatttgaaatactttttcactcaaaagaatctgaatatgaggcaacgacgatagttagagttagtcaaggactacgactgtgaaatcctctaccatcctggtaaggcaaatatagtggtgaatgcacttagtcggaaaaggtccggggtagatctatgaattgaagcaaatctctccaagattggctgagggtatgactagggctgagattgagttagtggtcgagaaattggcaaatattacactataatctgatttactggaaaggataaagattagctaatagaatgatcccaaattgattgaacttagaaagaaagttgagactggtgctacaaaggatttcactgttgccctaaatggactattatgatataagaatagagtttatgtcccaatagatgactgaattaggatggaaatccttgatgagtttcatattactttgtattccctacatctgcgaacaacgaagatgtatcatgatgccaagacagtgtattagtagtcgggaatgaagagtgatattattgaatatgtctcgaagtgtttaacctgtcagcaagtgaaagctgaataccaaaggccagtaggtttacttcagcctttgagaatacattagttaaagtgggaagacataaccatagacttcgtagtagggttacctaggattattgggttatatgattccatatgggtgatagtggattgattcacaaagtcagtgcactttttgcatgtgcgggtgacttatactatggaccagtatgccgattgtacattaagaaaatagtgagactccatagtgttgtaaagtccattgttttagaccgtgaccccaaatttactttcaagttttgggaaagtttacagaaagtcatgggaaccaagttgaggtttagtacgacttttcactcttagacagatggtcagtctgagaccattcagatattggaagacatgctgcaagcatgtgtgattgattttgagggatcttggagcaaattcctacccttgattgaattttcatatattaatagctactagagtaccattgaaatggcaccttacgagatgatgtacggtaggaaatatcgatcacatatccactgggatgaggctagtgagagacgctatcttggacctcaattggtccaaaggaccggtgaagccatcgagaagattcaatctcgtatgcttgcttcacaaagtagacagaaaagttacattgatccaaagcgtagggatattgaatttcaagtgggagattcggtatttctcctagtgtcaactatgaaacaggtgcataggtttgggaaaaaagggaagctgagccctagatttatcggtccttttaagatactggagcggatagaccaggtggccaatcgattagccctaccatctgcgttgttcagggtgcataatgtctttcatatctctatgttgaggaagtacatgtcaaatcagacacatattttgagttatgatgatattgtgctccaaacagacttattttacgaggaatagcctatccagatcctagaccgaaaggagaaagtactctgaaacataacaatccttctagttaaagtactgtggagaaacagtaaagttaaggaagtaacctaagaattagtgtaatgaccgctcgagtaatgtggattagtaaaggcaattagc

SEQ ID NO: 119449 - DNA, 1356 bp, Cannabis sativa
gaactttagattgggttagaaaatacataagataaactgcccataccgaccgactgatgtaactcttaatggtgtaactcttttaatttcgtatccattcccttgcaaattagctatctctccttgataaatgaacaagtttggcagcctacgtatctcaccaaaattgtaacatctttatagcagattccttatcaataacaataattaggcactcttttcctaagagaagctatacaattgtttgttattatatattgatggcaatttaagttgaaaaaatataataacaacaaatgcaattcttttcaattatacttatactaatgactcacagccggacttaggcccaaggcttccatacgagggtagaggagatgcttcctaatttttgacaattcttatttattagaggaaattagatagtatattcattttattttatttgttctattttttattttatttttatattttttaaaatatacccatatttaaagataatgttcttattatagtccttgtagatgaaaattatatactatacttatgcagaaagtaagagtatattgaaaaattcactcacaaaaataggtattttttaataaaatataatataaaggtattttttattaatgaatacaaaaaggaaaacttacaaaaatactgtaatttggattaacttttacaaaaatactgtcacgcggaaatcttttcaaaaatattgtgtttttataaaacactagtaaaacacaaagcagaataactcaaaacaacagtagaacaactaaaaaatattagtagaacactagtgaaaacttaacacagtatactgcagtatgaagtttataaaaaaatacagtaaaaaagtaaaaaataccgcatgacaatatttttataaaaaaatgataaaagttagtatactatgtaaattttcttacaaaaaagaggtatttgtcaatttgtctcttcttattaagcatctttggaaagtcttattaagaagacaagtaaacatatattttttttatggcggtgtggtttggtgtgtcgtgccatgttgaagtttttttttttttaatatatatatatatctaatcttaatacatatttgttagtgacttatcatactcgtgcctcttaaattgttgagaattatggggttccattttaaaaccaattggtgatgagtgaagtagctcatgttcttatatatggctcaatacttttacatttgttccatgtggaacaatattgtctaatatttcccttaagatggtggctatttttgctcaccaatcttgaatcaccatttcataagtagtgtcatttgctcacttatttttgtttgttttg

SEQ ID NO: 119450 - DNA, 2317 bp, Cannabis sativa
ataaaatatgtctaattaaatatcattttattttccgggatattacaccacgtgtgtgtttttataaaattctcttttactaatttatataattatactaaaaagtgtgatcaattaaaattttgcaatttaaaataacgcataatatttctttttataaaagataaatattattatctacggggaccccctattatcaaaatatttacaatctggattaaaagtattataaaataagtttatatcctaaaatacaatcagattagaacatcttgcccactagaccgtggcaccgcgactgatatgtacatttctgctgcgacctcggactcatggctgctcaacctttgccttccctttacctacaccatgtagcacctgtgagtcacaaggactcagtaagaaaagtgattaaatccataaacaacagaaaactcattaaatcacaacatagcaaaaatatactcaattataacacatcatgtattaacatgcataatcaatttctcataatattggaacttcataaagtacccttaccactcgtcaaccatgagctatgtatgtcactatggtttctcgatacaacgaatgataagtaagaaacctattcgcggtttcaagagtaattactcttgacggtaacgaccgttttcaaccctcggcataaccgagcctcaacaaatatttaactagaatctcgatcataatcgaggctataagcatataactgttaacatttaaccataaacggtgcatatcacttttcttacctcaagccagagctcaagtgtgctggctgacctgagtggaaacaaggttgggcgatcccggtcctatgtcacgataaccaatacgtaataaatgccttaaaccaaaatttcggaaaccaaaaccctaatcccgaaaccaaacataacctaacttccaacaatctcaaaataggctacacataatcaatctaaatagacaccaggtatcatcccgagtcaaaaacaaaacccgaagaaaactcgagaattctcaatgcagggcaactggtcgactggttctggtagactagaaaaccttgggttttcttcctcaatttcgacccaaacctccttcaaacctaatcaaacttcacaaaacacactactacaaaaataggtttcagtaagtccttttgagtgactctaaaaatatttagtgacacttcattgctcgtcactaatgtgggtgactgaaaaagtagtatttagtgacacttcagtacgtgtcactgaaactttttagagtctctcaacgcgtgtcactatagccatttagagtcatgtcacgtgtaagagtaatcataatagcaacttctaatatgcgtcattgtatgtatgtattttttttgtcttgtaccctatgttatttatttatttcataatttcagcctattaatcaataaataagttttatatataaaaaataataaaaaataaaaccatttataaatttaatttcttaaaacataaaattataatgtgcacagaagtatttttctttacaaactcaatatttttctcaatacatttgcacagaatcaaaaatacatttgccaaacccaaacctgattatgaactgaaaaaacaataaaaataattaacagtgaacccaaccctaaccccaacgccaaccccaaccccaatcccaaacccaaccccaaccactacctgcgaacctaaaccccaaccccgaccactgcctacgaacccaaaatccgcccagcgctaccccaaaaaccacctatgataacgccgatgaactgagacctgtagagagagagagaaaaatataattcgaattaaagtcaaatctcaaaaaaaagatccaagaagacaagaaaacacaacaaaatagggtctcaatatctctagcttcggcaaccatagagctgaggacgactctagcaaccacccacagcaaaagccccccttaaccgtcgacctgcataggagagagcgagagcgagatagagctgtttaaaaaaaaaccaccaacgtttacctgggctttgaggggccagagatcgcaatgccacctgttgccagttgttggaccgtatgggctatgcagtactttttatgttgcgtcgctgggacttgggaggctgggaatggcaatcgactgggagttagaaggtttctctcgtgcaagagctcagttaaaagcgcaagggggagattaagaagaaagaggaatatttgtgttgtcgagcaaatttcacaacaccaaaaatgaataataataataataagaagaacaatatgatgaacaagtgcgagtattc

SEQ ID NO: 119451 - DNA, 860 bp, Cannabis sativa
tgataattttttttttctagtccaaaaatgatggactagaaaactcttcaaaacgttttcatgtccaataataattttgttggacttaaaaaagggaccttaaaagagttttttgtagtagtgctatacactcaaaaagttacaatttttcccctttttctctgtaaataaaaaccatataaataaagtggtgcttataactctggccaccaattttagtggaggaaacgttaaatctaaacgtccattaaggtataaatatcatttatattaattttagtaatgtacattgctttattttttatttttgtaattttttttacgattattccatattattaatattatgttgttatgtatgttcatggtggctagacttttgtaaaaatgagtcgtcagattgcgcttgtaaggtaaaaatttaaaccttaatatatagtatatgtgtatgtattttgtattttattgatatgtgtgtatagttattgttttatttatgaaaatattgtaattgtattgtatataattattatataggagagatttgattagtttggaaatgaagtttataagttttttttaggttgagatataattattatatatgtatgtatatataattttttttaaaaatttatatatataatttactaactagaaactagttattttccttttataactagtaagtagttaaatatttaaaattgtattttattatattctaggttgtgagctataattttaaaggttttgaataatttggagttgatcggattttagcttgctacaggtttatactttcactaatattttgttattaattatttatcaatacttagtggagtttgaatatctta

SEQ ID NO: 119452 - DNA, 1024 bp, Cannabis sativa
aagattgcacaataattgaaaaagcactgtagcgtgccttagcattagcgcgttacactacaggtcttagtttactttatgcgagtaaacttgcctggactgcgtcataatattttgactaaaaataaattgtatgtcgataattctcgacaaatctaataccatgatccttgctatctcatgttaatttattgcatatgcaaacattcaacatattttgtcaacaaaaaatttattatatgttaatttcctcccatatggacataacttatagagatctctttaaattacatatttttcagttatgtatatcatttatatgtaccgatatagaatcactttaagggttcaattatgatcaaatatgttatatctaacttctcttgagagtctcctttagagtattgtttccttcacgattatcaattttgagttatcaatactttattataacatgcattaaggcaactccatgagtacctccagattgaacattttcaggacaaaccaaataaatatttattaataatttctacattgtttatttatgctttaggtatttttgaactcattcttactcaactttaaataatattaatttagagttggtatattttattttgaactatatcattcttatatatagaagctaatgcacatcatttgttataatattcattccaacaataaaccaaacatcataatcaattttcattgcgatcattcttattccattacattactaagagttgtttggtatgaagtaatattttataagaaataataatcttttgcactcccatgtttggtatgagatttttttttatttaagtatgtgaatattatataatatggaaataagattacccccttaagagctaatcttaaattctttcaaaaaggtaggttctaaacattacctttagggggcatttggtacgaggtgttcaaaataatttgattatagggaatattatgaaggagaatatgattataggaaaatgtgtaaactgtgtttggttgt

SEQ ID NO: 119453 - DNA, 1627 bp, Cannabis sativa
aaatattatttaattaaaaaaattaaacatacatatattatacttaacatcacctaattaaatataattaaaaaaaactaactatacgtgcattgcacgcaacatcaagctaatatatattaaaagtatgaaacggtaacctgacattctaaaattattctaaatgtatctttttattctttccttaattctctcatttatttaactaggtaatatgatcgctctttgctcgactaatttaatatttttagtacaataataaaaatataacaatatattagtaataataaaattatattatataattctatattattaattttttattaaaaagtttaaaacttatacaattaatgcatatatatatagatcatttaaaaaaaatgcatatatatagaattttaattgttttgttttttcaaagcaaatttttattataaaaataagtaaatatgattgtgtaggctagggaaaaattggaattttcaccataatgtattgtttttatattctaatattttaaagttatcgtcataatcaaatctcacctgttatcactatcgtatctcacatgttgtctcaccatactttacccgttgtcattaatacattaatcttatgtctcatcttctcaaatcccaatattaatcttagattctattttgaattttaaattgttacatcaccgccttatgtttcatctttatataaataataaatttatataaatatataaattattacttattcaatctaattatatattatatagttttattggagtaagtaaataatattggaataatatagtttagagattataaaattataaatagtttaatatatattaaatattaataataaaaatcttttaaaaaataataaagagtgaaacgatttttataatattgataagaaaaaaaagttgaaataccccatgataaaataataagtaatttttttaaaaaaataacaaacaattattttatgtaattactatttagaaatatattttgatactgatagaaacatgacttattatgggcaaaatgggttattaattccatatatttgaaggatactaatttttgaaactatattctaaattaggatacaagctagtactgaaagaaactgtgtaggctgagacaaacattcagcagggatagcaaagttgttgcaggcactcttggaaattttaatttttactaaaaaaatacaaccagcacaccaagcacgatttgttttcttttaaataaataaatactaaattttaaaatctgaaatcttttaggaaagaatgtaacatgctaattaataaaatctcaaatctcgatcattattgtgttaggatttataaaacactcaagaaatataaatatcacagatctaaatatattcctaaaagtgcttttatatagaaaagtctaaattataaatttatagaacctttgctaaattaaagaagaagatgatgataaaagataagtggaagctctaacctaaggccattgttggagattgcagagaaggttttgatcttgcaagaatacacttattttcttaggtattttctctgatggggaaggagagaatacagaaaccctagtgtttcttggggaccact

SEQ ID NO: 119454 - DNA, 1002 bp, Cannabis sativa
ggtccaagtcggagctaaggtctaggtttaacttcaggcaaggggacgattcgaagtccaagcttgagccgagatctagatcgaagtctgagttctggcactaagtttggttctagtctgggatttgatatggggtcggagttttgtccgggctagggtcttggccaggagctggaaggcaaaggttgaagtctaagttcaggttggggtctaattgcggggtcaaaatccaaaaggataaataccattttggaccatgtgttgtgtacaagttactaattggactctctgttttgttaaatgaaaaaatggaccttataatttccaaaatggtagaaaaaaaaaggatcctgagctcaattttaaacaattttattttttaatataaccaactttaagacaatttttaacacgaacatatacagaaaatgtaactagttttatcataatatctctagatcaaattattattaagctttattttgataaaaaatcagttcagagtcttatttgtacaattttagaaaatacatagtctattttattatttaacaaaatagatagtccaattagtaatgtttgcaaaacacaaggtagaaaataatatctacccaatccaaatattgatgataaagcataaaaatagacttttagttttaaattgattttaaaagtattttttttttctaatatttttactttttttaattaataaaataaaaactaagtaatggttacattacataacataaatttctaacatcatgcatcctctgatggaaaatatgtataattaaacctcacaagaattggactatttttagagtaatattaaaggcaggggtatttattggatcacatctaatatatttaggtttattcagattcaatttaatcatatattggatgttagattttaccattcgatccaatccaatcaatttccgtcatccaatcgatccaacatctattggatgttagattggatcggttctatccatt

SEQ ID NO: 119455 - DNA, 1011 bp, Cannabis sativa
gctggctagggttagaggaaggagtgtttatgcagctagggttttctactgcataaaggaggctttatactgccttaaacggctgagttttgagggggaaactctcttgatccgcagaagagataaaggtcaagattgaccttggtttttgtactgtgtggtgttagtgtaggggcattttgggtagtgctttatttcctacacttttgatctttatttatattttctcttgatgtttttcttaaaaaaaccataacacataatgtagaaaagtaccaccaccacctaagatcgaaccacactagaaaatgacccaaaacaatagaacagtaaccgaaaaaaaaataatagcagcacattaacaaatttaacatcttttaataatagtacaaagtggcatgatgaaatttggcacaggtttagtataccaaaatataaattcattgtttggattgttgtgtggaaatgattcctaactaaaaataggttatctaagtttaatctctttgtggataaaagcttcttggtgtaaggaatgcatgatgaaatccatgatcatctcttcttccaatgtcattttagtgcttattgcctcaatgaaactttcaaatggctaaacagcctgaactgtggaacacagcagcagaacttaatgggagtaatggtttggatccaaaggaaaaatataagtcgaaagaggaatgttgatcattgctctaaatgcatcagtgtagtatgtttgaaaagctagaaacaagatcttttgggaaagtgaagtccccacaattgattgtaaaagctattaataaagatatatatttaatttatatttaaactttaaactaaaactttctcaaaacatacaatgaaaactaatatcttctcaatatgcatttaagtatcaaaaaaaataaaaaattcttctatatacagaaataaataggtggtatatcaaatttgttttttaagggtgtactaaatttttttcaaaattttaattatgaaattata

SEQ ID NO: 119456 - DNA, 507 bp, Cannabis sativa
ttttgtgttatttttcagatttgtgtaaagtgttacaaatgaaaattgggtttcaaagccaattgaaagttgaatgacccaacgaatccacttgcaatttgagaagtatatttatatgttgagtgcccaacgtattacatatatatgatatgtgcatgttgggtcttggcctaattgttttaaaaaacccattaatttaaagcacttgaagatcgatttttcattatgctaaggctcattaaaaaaagctcatcattcacatataacagcccatcattcatatagaaggctcacatctcatattgttctccaagacactgacgcaagtaaccgcccacaactactgctattctttacgtggaactactcgcctgccaataatcgtggaccacaccacttgacaagcagaagacatgattccactttagcatgcatttagccattttcaccactaagtgtaacacgaaaatattagttttaggggtaattttggctctataaatagga

SEQ ID NO: 119457 - DNA, 1470 bp, Cannabis sativa
actaaaaggagggtacattgaaggagatagaattaatacacatttcactaaattcttctttatacatttcaagagaatgtatattagtgtccaaaatattcgataaagtgtcaatcttacagacttattcacaaagctattaccaacatcaatatttgagaagatgacatacaaattagaatttgtcgattagaagatctccacgaatgcctaaatgagtggaagttaattcacactgcactctttttcttttggccaagtttatcagcaaggtttttaatgaggcagcttttatggacatccaagggggtgttatgaaatattatttatggatatccaaatcaccaaattaattatcaccattaatgtttgattgtagtttccttttattacattaatttagttttccattcttttagtcatatttttgtataaataagggttcaccccattgtaataaacaactgagaaattctcattcagtttctctttctctctccatcttcttcttttcttcttatttatattatattattctatattatttattataacattatcactattctctccactttttttttttcttattttatacttttttggtagatttttaatcattgtcaatatgatttatttattcttaatctctcactcataaaatatttttttataatttggagacataccaaattttttttatgtcaataacttcaccatcttcataacttcaaattattcatgaatatttatccattagagtggattttctattagtatttcttttttctctatattttataatatatttcttgttagataactaattattgtcaatattctctctatttttttttatgttatatatatagactcttaatatttctttcactcatcaaaatatttctcaataatttgggcatatacacttttctttatgacaacttcacggttgtcgataattttaaattattcatgatttattcaataatataaattatttgatgttgaaaaaattatttttttgatgataagcttttgggattcgtgaaagagcataaaagggttatcggaataaagttaggatggaggcagtgccataacatcataaacgacactcaatactatttttttttctaaattttttctcaattttaatctacattaatttttttagaaaaaaaatctatattaataattaattgaaaaaaaaaatagagcataatcaccaatataacaactaaaatccctaactaatcatgtatatagtaaaatagtaaattaatctcaacgtgaaaccttattaattatttgtaccaaatattttaattttaaaaaatcaataataatagtaataataaaatatcaatcaactaaaaaaaatcaaaatattagcataatccattaatatatcaggaaaaaaataggaaaattctaaaaaggtaaaatattacaatattactatgggcc

SEQ ID NO: 119458 - DNA, 1077 bp, Cannabis sativa
  modified_base (650)..(655): a, c, t, g, unknown or other
gctcttccgatcttttcatatcgttttagaagttcatataagatgttaaataacatacttgttagtaaatctaagatcctgataaaataattccaacaggtacatggcgtaagacaacctccttcaactgcaacctacaaaggcaggacgtccttcctcatgaattcattcatacatactcaacatcataatattattcttaccattatctataaggtcaaaattataagacaatatacaccactttcttaatcaaaacttagcatgcttatttaccaattttcatatgcataatatcatcatgataaataataataatttttctcataaaaatactacatgtccaaaccctataatatctccatgcatgaacatcattaaaaactcaaggtagaattccttaccattgcaggcaccatttggctgaaactatgagcatatctagagagtgttcttggtgttcttaataacataaatacaataccaagaattatgtaagcctcgtgaagaaaattattaaatccataagagattaagagaataagaacaataggaactaaacctcaagaaaagaagaataagtttacacaataatttttcttccttgtccttattcctcttattcaaatttatctctctctctctctctnnnnnnctctctctctctctctcaattttgtggttctctctttgtattctcttgtggctcaatactctaaggtgatgtgaaaatgagagctctttgcacctctatctatagagtttcaagaccttgagtgcaagaatgagtcattcattctcattaattgacctgagctaaaatggtaagttttcattcctaatttcctcttttatttctacatccatctagcctaggtttatgatttcacccaaaataaaaactagttagattttcccaccctgcacggactacttacgtaacaatgttgttttgacccactaaatgcatgatgttagtttttatctcttcatgaaagttatagatttttttgagatctttccattgatatcttctgtgtccaaaactaacttatacaactctaattatgcttggtt

SEQ ID NO: 119459 - DNA, 1398 bp, Cannabis sativa
cacatgttagtgttagtcaaggaggggtgttatttgaaatcacattttacatttttctttcaattcaatacaaggtttgcataattgtggttattgatcttgtttatttacacatttttggccattattactctttagctaaacacatatatgtttcattcctagaagcatgtttatccaagtacgagattgatgctgcagcattcagtgctgctcctattgaaagagccttctcatcaacaaaaaagtaaggagaatgcaagtacttatcagattttaagcacttattccctatcccaatcacaaaaaatgcagcagacattctttgtgagaagaaactaaaatcttcagatcccatattcaagggaaaaacatgtacattatcttccccaacaagtgcttctccaacttgtttcacatgttcatacaatccttcgtcgttaaccatcaccggatgatgaggcaccgattgatcttccatgaagtccatcacggccgtacagtgatgcatcaatgcttcttgctctgtaatctgcatggggatgatcgtaaaattgtcaatgcatttaatttaatggttttatagaaaaataatgatttatacaatgtatgagttcatccatgttgtacctctttgatccttttttggaggaacaagagaccttcagggctcaagcttctaaaagttcctccaaatgttacagactctgggatcacatttcttgcttctcctccctttatgaatccgactgtcacaacctatatatgattcaatgtaatggattaaaacttgtgattttgagatgaaaactattcaaaagttttgttttctaaatagttctagtattagagttagtcccacattactaatgtgtataaataaattgtcatatataatattgtggtgaatcctcactctcaaaacaagttgcagtaacaatgtccaagaaacacaattcaaaactaaaatcaatcataaaactaaaacttgaattaagagtgatactcatcttgatcagaaaaaattgatttcgagatgaaaccctatacatcttatcccaatttttaataatccaatgtgtgagctcataaattaagataattatatttgagctaatattttaaatttgagctaaataagttaaattaaatgagctcaattaacaccttataccggtatgagcatagcactacaagctttggtcgctaaggctaatctttaactactcttctcctctattctcattaattgagggagaaccgatagagaaaagattaatttgtggaagatcaaagagcataatcccttctcatattaaacatcataaaatcagataaattctccatcttgtagtaatttaagattgggcttttttcataaatgtataacaaaaacaa

SEQ ID NO: 119460 - DNA, 894 bp, Cannabis sativa
  modified_base (862)..(863): a, c, t, g, unknown or other
tgaatcatatttgtgaggctcaaatatttgtgaggctcaaatttggttaacgaaaatctgcgttaacaagagcattctatgtaatcaagggtgtaatcctaaatctatagtgaaattaagagaaattaataagatagaaaattttctcggtaaattctaggactacttattgggagcttggttagatacgcccatggtccttacactagcttagataatattattttgtagactcaagtaatttatttattaaatcaattatgattttaaataagactagatcttatttatgaattttatttggcaaggatttatttgagaaagaaaagagaaattagactttttttatgaattaagaaacttaaaagtagtctaattaataaatatatttaattcttattttttttaataattaattattgttattaaatagatagaaatagtatttaaaaaattagaatataaaaatgacatttttagaaaaatataagaatgtcacatttaaagggattgaatggaaaaaaattaatgctctaagaccatgaggaatttagccaaggattactttttaaaggcccttttatcttttttttttctaagttcattatattctgaacataaccctatatgaaatactacatatagaataagaaggctttgattctagtgacttggagactctctcctcgacataaaatagaatcaaaaaaaagctttttatcttcttataggaatttttaaattctgtcattgtgcccctctcaatttctagtgcttagtgttgagtaattgcctgcacaattcaagacaatactcaaaatagtgaggaagactgtgtagaactgtaaagcccgcttagttnntttggaaattagcagttatttatgttaatca

SEQ ID NO: 119461 - DNA, 1342 bp, Cannabis sativa
attaaaaaagtgttaccaaacggcacctaaatcattaaaaaagtgttaccaaacggcacctaaatcatttgattctttcttataatgatcaagtcttgtcatttttaactctagcctacctcctatgtaaattaaattatacaccataaaagcagaatcgatatcaaatgaaagaacaccagataataaattttaatattttttccataactaaacaaaaaaaaagagacattaacacacattgttcaagatttcgattaataatcatgctacagagtgaaaaaataaggacaaatattaaaaacccacatctatatttctgctcaaaaacattgaaacaactaccagaaaatggcaaagagatagatagcaaaaatatcattaaaatatgtcaaccacattttctgtgttgatcatcatcaaaccgtgctctatctgactttcacacgctcatctcagctggggaattacacatgagatagcaccagcaagtgtaaagcaaattcatctatttcttgtttgacataacaacacaaatttaagtttcctcaaacattcaattttcatccttttggaatatataacataatcttattatcaaaataactaagtttatatgttttgtaggccaactcttccaaatcttagttctaaagttatgtctatattagatgaaaaaaaaatcatgtaccctgccaaacaactcaaggacgttatttcaaggaaacacattcatgaattcattttttaaaagaaaatattccacaaacacaaaataaaataccttcatagcagcagcaaattctccaaaaccaacatacccttgtctcttcgaatctacaaccgcccaaaccataaagatagaaaaaagtgtggtcaataatgtaaggacataatagtactaaaacacccaatagtaactacattaacaaaccaaactattttttcattattgggttgaaagaattatctcaactcaatagtacaaataacaatagaacatgaaatttgctatttttcaattaataacaccatggtatcaactatcattctattgtaataagtttaattaaaaagaaataaccattccaaagcagtgtaatcattataaaatttattatattaattcggctaaaatacttacctgaacaataaaagtgataacccttttaaaaaaaatgataactaagaattaaccaaattcatattaaatgtcaaaacctaaaaacaaaacgaccccaaaaaaaatgggaaatttttatatatatacattatatacattaatattacaaaaacaacgttatataaaaacaatccatccatataccgtgacacgtcatca

SEQ ID NO: 119462 - DNA, 917 bp, Cannabis sativa
  modified_base (625)..(626): a, c, t, g, unknown or other
accagagcttggaaatttggtgtccttgagtgctgtattggatcttagtagaaatttacttgttggagagataccctcaagtttgtccaagcttacaaagttggaaattcttaatatctcccataaccaactcttaggtagtattccacaattattttccaacctaataagcattagttacattgatttttcttataacaacttgacgggtccgatcccgattggagccatttaccaaaatgcttcaaaaagcttttatgatggaaatcttggattgtgtggaaatgctagaggacttaatccctgcagaaggcaaagaaacaaaattgacaatgctcttattttggccattagtcttgtttgtggcctattactatttgttattgtcattgtgatcactctcgtattgtgtcataaatttatagtgttggataagcacagaaaagattccaacaaaaatgacacgcaccagtcattgatatgggagaaggaagcaaaattcacttttggagaaattgtagaagcaactgaagactttgacgacaagtactgcattgggaaaggaggttttggtactgtttacaaggctacattgagatcacaagagctagttcttgcggttaannggttgcacatgtcagattcgagtggcattccagaatttagtcgcataagtttccaaaatgagattcgactactggaaagtccgacatcgaaacattgtaaagctttatgggttctgttcgagaaacaatggtctgtacttggtgtataagtatgcaaatagaggaagtcttgctaaagtactatatgactcaacagatcttgattgggattcaagggtgaaaatagttcaaggattggcccatgcaatctcatacttacaccatgattgttctccaccaatcattcatcgc

SEQ ID NO: 119463 - DNA, 1695 bp, Cannabis sativa
  modified_base (1664)..(1669): a, c, t, g, unknown or other
agtatattttgcattatgcaaaatatgctagcatatttttagtgaataaattaattttaagcatataatattaaatttctcttttatatatgtacagtatataaaatattaattgaaacaggtgagacattaaagtaggtataggtggctttcacatctttctgttttgggagtagaaataatgggttagaatccaaatcattaattgttagttttggaaagtgttagtcaaaaggcaatagttatcactgtgggactgtttgcttactaaatgcaaaaaatgtaatttgcttttttattttgggtacggatagttggttttgtctaataattgtttaattgttttttttattttattttaagaaagtatgtgttaattttgtctaattaaaaagttcttatattcataaaaaaaaaatatagttcttatattaaaaaatgttttgttataattatttaaatttgttattttattctctcaaaaaatattttcttcatttgcatagagtgaaaaattacattaatttgtttaaatttacatttaataatatatattttttattctgcacatatattatttattgatgcatacaaaaataaataaataaataaattaaataaaacgttatatttattgataaaaaatgacaactgaaacactcaaatacacacattgtccaatcataatagtgtaaaaagtattttttttttctttttggcttccatcttataatacttttcaattatatattgtattttttttatttgaaactcttcaattatatatagataggtcgtacacttcttaacgtgtaatatctattgatagaccctaaaaaaaatttataaggtaacaaatagaaaaagtaagtattaaaataaattttgtaataatactgattcataaataatgtcaattaagaatgcacttatattgttagaatgtgaaagtgtgtggttaaagtgtatgcgattttatttcaaacctaattgaatgagaagaataactcatttattttatatatgttattttatatctgcacattaacaattaattaattctaatatacatgctaaatatatttatatatatcatttgcaaaaaatttcacttgaccatactttataaatttataattatgttatcggtgaaaagtgtttaatttatagagtagtacacgttactgatgaatattccaatgaattctcatttacttgcttctatatatacatttatggaatgaagatgttgattatggtgagcaagttggattggggcattactaccacgtatgtttcgaaggttgtcttgcaaacttcgaaatagatgaggaaggtcttgaagccactgagctttacccagaaatgaattatacttcagtggatgagtacatgaaacgctatgtctaatttatttctaaatttacatatgaatattattgtgcgttggtctgagaatttgatattaaaatacaataatatctgcatgttgatgcatttaaaatatttggacatttatgttactgtttattgtgataaatttagtgtgtgtataatatattttacaatacctaataataatattattgtttattttgttaaggtgccgcccttaacaaagctttataatcttagatcaaaatctaaatatttatatatatatnnnnnntagtatattgttacgtgcgatgcacg

SEQ ID NO: 119464 - DNA, 1807 bp, Cannabis sativa
tttcaaatataaatatttaattttttcaaacaaaaaatttgtaatctttaaaacctagtatatatatatatatatattagagattttttaattaaattatctccactattattttatttgcacttaattttataagatcaaattttaatatagtaaaaccttccaaacttttaaactgttagcaaatttaagattatttcatttatttttcccagttaactgccaatataaactgattatgtgtatactttgtacatgtgacacgtttatattagtacacctaatattattattatttaaaaattataaaaaaatattttaaaacttataatatttttaattttttaaatattttattttttatttttataattttatttaggtttgaaataataatattaaatgtaccaatataaatgtaccacgtgtacaagagtttacacataaacagtccattgtggcagttaaccgaatgatatcttatatttactaacagtttagtagtttgaaaaattttacagctaaaatttaaacttgaaggattaagtacaaataaaacgatagttgagagtttagccactaaaaactctttttttattgggggagggggattccaacttataattttctctttgcctttgtgtagagaagtgtagaactactaaactatataaccaatattagggctcgtttggaacgtcatattagatcgtattgtattggttatatattatatttttatataatactatattaaaatttaatttatactaaaatattacatatttagatgcccataaaaattaatatcacatatagttttacataaaaatattatataaaaaataattcaatataatacggtataataatacggcgtaccaaacgaacccttaaagcaatatttaatatatatagaatttctcatatgtttctttttaattttaaactaatgagattcttcacatttttttggatacattattataaattatcccaaacatataatgaaagatttaggctacacctatagagctacaaattacgtaccataaaggttcaaaaactttttggaagtggaacaggcatgatggaaatatcattagaataggaaactattaattggaaacataaagaatttatttttattgcaaagcttatcttcattgttgttttcatacaaataatcttcattcctatatgcccatgttgccaatttagttaattaatattgaataccattccaaattttatataatatataaatatatatagatatatatatcatataatgttgttcaatattcctacaggtgatattatactcttttctatcaacataagatcctacatatttatatttccaattcttataaaattttatcgacagttttatttgtgagggtgactacttgtcaccttatcaccaatatacgagaagtagtggtagcaccaattcttgtttcaccactacaatattcacaagacaaaataagagaatacaatcaaaatacttaaataaaagtattacaatacatcaagattacatgaaagctagaagaaaaaaaggataatacacaactagcttgaccaaagcttaagaatctttgccttaaaagttattttctccatcatatacacttaggaaactctaaaaatgttcttaacgatttatcaagcctcatattctcagtctaacacctaagaatgagtatatcctcataatatttttgttagagatattattgcaatggaagaaaattacaactctattgcaatataatacaaggaccaacaaagagattaa

SEQ ID NO: 119465 - DNA, 1187 bp, Cannabis sativa
tcaattgtttattttatcaatcttccaggagcatctggttttgataaaacgggttttgatgtccagggtcaatccccaacatactctcacattttcaatattcagggtcaatcctcgacatatactggggttccaggtaaagtaatcccaattttagttgtttttcggactactggttgacgtccagctttccatgtgcttgctttatatggcaaccacagtgggccgatatctactaacgtcgcaattcttttccacaattgctttaccggagtaactgccctttgtattcttatgacccgctccctctcgagataaccaaagtgtcccttcttctcgcggaagagggttataatattcagtaactcgagttattggacagatcgaattgctcataggcattttcctgcccctttatatatcgttaaaggtgtccttgcgatatgagatcttcaatctcatctttcaactgacgacactcttacgtggtatgaccaatatcaccatggtattcacactgcttatttggatccctcttgcacctcacatgtttcataggtcttggctcgccaaaaatggcttcttgtacatgtacgagtaatattttttcccgggtttcattgagctcgatatatttggcataaagaggaatatacctgttgggcttcttatccttgagcattcttttggaatcatcttttttctttgatcccgaggcctccaaatcaggttttccaacagtattgtgccccatttgtctcctaggtttcgtgacctgatgcactctgaacttattctccaactcactcattcataaatggaatgaatccttttgccttgaagcgagtcgttgacgaaggtcaagcttattctcgtagagcactcttgtcatgattgtggtcggattttgcccttcctctcaaggtttgactcacctttttcttcctacaagggtttgaatgagtgggttggtgattttcgtctgatattccacgtatttcaggttgtgtctttaggttttccttagttccctcacgttgcattttttgaggattttgattatatctttgggttatcctctgccccttggtctgcgagccgtgaggtttgccttgtgaatctctttttcccaaggtcaggttgattttgggtagcatcttcctgcgcggcctttactgtagctattt

SEQ ID NO: 119466 - DNA, 2018 bp, Cannabis sativa
  modified_base (107)..(123): a, c, t, g, unknown or other
acaagggtgcatcaatgtatccattttaaggggtgcattatagaatttccctatacaatattactattaatatacatatgagacacgtattattattattattattnnnnnnnnnnnnnnnnntattattattattattttgtattggtataatttaataacaaaatacatatttatactgtttttaaccaaaaaaaaaatataactcaaattttttatataaaagttatggtaagatgtatcatgcatcttatttatatatgtatattattatctttttcacatattagatataaggttctctaacactaactcaaatctaaaatttaaatgtagcctcacaatcattatagctaatacacttttcccttatgtatttttttttttttcataatagtggagttgaagcgaaccctaagatctcaaattcgaccttcgagacaactaactttgctcattgaagtttgccaagtttgaccaaaaaatgaaattatagtaataaatcataatataatatgtattagtatactaattatgcatagttacatctagtttagttacacgtgtgagcaatggggtcgagaggacaggagaggaccacatattttgtaaaagtaaatgcagaaaagagtgagtgtttggctttaattattattgtttataatgtggaaatcatcaattcaactatttgtgttattttaattttactatttaccatcacctatgtttatgattgcgggttagttacggcacattattatcactacttaatcatcacacacttaatttttaaaacctttctttaccaacttctaaatgtgtgttgtcatgttgtgtatcataataatacatttttttttggtaattaagcaacttttattgaaaacaaacaaaccaactacatcaaagtagtagtcacaaagagggccacatcccttaaacaacccattgattgcacctttgcacatctagcccaacccgctaaagcatccgcaacacgattcaatgatcgaggaatatgagaaaaggtaacaacattaaaccacttgcaaagtttaatacaggagtcaaaaattgggtaagttccccaagcaaaaggcagagagctgcttctaagagcaaacattgccatcttcgagtcagactgaatatgtaactttgaaatgtttcccaccttcgagtcataataatacattcacagaaaagttctatatgggtgaacgaatgcacttattttatatttttaacatttagataattttaattttagtttcttatatgatagtatatgaagtaagttattaaagatattatttaaagatattataaaaaaaaaaaattgaaaaaaaatattttggtgtttattttaggtatggaaattgagtaaaaaaaaattataatagaaagtttacggtagaattcctcaaaactatttgaatatcagaaatacaaaaaaatgagtatgctctacaaaaaaagtacattgtaaaatcaacctcgtcgtttatttatattttttacttaaaaaaattattattattatcttttattattaattattaattttgcaaaattctctactgctcttcttgaatatggatttcacttctccaaatcagatctctcattgttcattaaagccaactctaccaactgtatctacgtgcttgtatatgttgatgacatcctcattatgagaagtgatgactgtttagttgattatcttgtcactgacctccgcaccaaatttgctcttaaagatcttggattggttgactactttctaggaatccaagttactagaactggagcaagaatccatctctcacaaacaaaatatctccaagatctcttaaccaaagctggtatgcaaaatgtcaacactcaatccacaccaatgaacggtgacttaaagttgtctagttatggtagtaaacctgctctagatacaaccctttacaggtccattgtaggagctctccaatatgccaccatcaccagacctgaactttcctatt

SEQ ID NO: 119467 - DNA, 1911 bp, Cannabis sativa
tctaaaatggtatttacccatatttttatatactatttataactatatcatgaaaattatatatcaaataataaattaagaagttctagctaggaagtaaaagcatgaaagaaaagtcatgatcattatcatttgttgccccattagccactgtacagcaccataaacaacaattagaagttgtgattaaatattaattaataatattcatggttatataaattaactatgaatatttcttgtatcaactactcttaaatattaattatctgtaaaggtgacagcttattgttagaatcaaaatgtaataagattagttatttaatagcccttattatatatgactcagtcagctcatatatattttaaagctaagcttcctttaattattccaccatatacacttgcactatgtatatatatgtatgtatatatttaatggaatataaagggcattacttttgctttcattatatgagcatattccttgtattttcggtttacagagtaattatattttaaaattataataaatatcgatctctcatttatttttgaagaattttaaataattttaagtgttcaaaataaaatttaaaacataataaattatacatataaaagaaatattcacacatccaacggtaaattatttaaatttttttgaaatagacaaatatacttaatgaaactatatagattatcatataaaaaatttgaaatatatataattctcggcaaaatgctactgcaagacattatttttattcttattggtaaaaatgattatattttgagggcttagagaaattataactaatatttatatatattattgtacattgttgatataattgttgatatagtagaatattttatttgatttttgaaaaaaattaaaataatttatagtgtcaaaaaatattaaaacattcagctacacatgttcaaaaactaaacaacatgcattaattgttaaatctttaaattatatttttgacattataaattattctcaatttttcaaaaccaattaaatgactaattatattattgaccatcattttgaatgttaatttcctaaaatgtcaaacacatagatataaaagtggtgttcccgtatagtattatttagcgatattttttaaaattattatattaaattattattatataagactagatatttaattacagtaatagtgatataatacctaattattaaaagtgttaaacaccacttatgccttttaagatttctcaatatataacatagtaaataggtttagtattatcacaaaaataatttgttgtcctcaaattggtgtgtcctacatatcccatcaattattttagtacatatcatttatatctagttaacatataataaatttgttaataaactctaaattaaattaatacatgtaaaataggtatagataatgtgtcttaaaatgggtgtataagaaagattttttttggagacatcagaattttttggtatatcactatctaagaacacgtggcaccatggagattggacatggataccttagagaatgtgatttgaaaaatataagtataatactctaataaaagcaaatttaatattataattaagaaaaaagttcccatttaggcttatcactagtatagtagtactagtattataatatatgttatatgttatataactgcgttggccgtaagaaactttacttttttctctaattactttagtattttatgtgtatatatatctccttttatttacattcttcattaataataataaaaagtagttataatataattagggacaagattatggtaggacctaacaaaagttccctaccggtaagaaactttttttgaccattgattttagatcatgtggttattatgatgtaa

SEQ ID NO: 119468 - DNA, 1193 bp, Cannabis sativa
tttttttttttttgaacaagaggacttttattcaaaaaaccatgccaaaaacaaacagctgaaacaaaaactcagcacaacaacaaacacacggctgcagaaaacagcagcagcctaaaccaaaacactactagccattgattattttaagtaaatacatgtttgtttgacaagctttataaagacccttactattaattctaatttgaacaactttccgtacatcttcacttaatcttcgagcagcagtacaaaccatatcgaagatgcaccaatttctattcttccacatcagatacaaggcaacagcaacagtcgcattcacaactcgattttgaaagtcatgaggcattgccctgaatcttgtgagcagatcggcaacagaattgggccaatgaattcttccaagccaattacttgtgtctttaaaaacccgctgagagtaaacacaagtaaataacacatggtcatgagattctttctcagcgtcacaaaccgggtagttgacattttgtataggcataaatctgctcaaagaatcccgagtcagcaatctgtcaataaagaaatctatgctttgggacaacaagtttatcccaaacataacctgcatacattactacctgctcctccactagttggttataaaacttttttgctctgaattttccacctttaacagcctgacttaagctggtttcatccgtactcttcctaagattcaaaatcttcttaaaataccagctagtatcttgttttatagggcaattccatatgtcatggactttcaaatagatcgagttgatccatttgacccataggcaatcttgtttgctggttatagcccaaagaaacttagcaattaaagtcttgttccactttttaccttcacgaaacccaactccaccgagctttttggaaagacaaactttttcccaggttgcaagatgcagcttgatcttgttccctttagttccccaaaggaagtctcgacaactcttatcgatggtagcagttttcttgtagggaattataaatatagtcatccaaacgttcttttatccccagcaaaattgatgaaaacatgatatttaaaggtcggtaatgttgtaagatataaatatatgtatatatttataatattacatatatatatatatatatatatatatttcaaaagaaacaaggacgtg

SEQ ID NO: 119469 - DNA, 927 bp, Cannabis sativa
gctaagcagacctgagtcttagcagttaactttggaagggaccctagccatacactcaagttgactttgggagctctgggatggaagttcatacttcaacaacttaaatccagttcactatctttcagtatattatgtaccatgaagacatggagccacctaatccaagccctgggagctaaaattacatgaacttgcaacccagaagccaacatgggcaactagggtttcacccacaacctaggttaacatttccaattagggttttagttttcgggataatcttagtgcaaatgggtcaaaacatgcattgagacatctactaggcataccgcatatatatttgaggcatatgaatcaaattaagagcaagtttatttttgagcacctgtggcctagtgcccaagttgacaatttttcaatctaggcaccttccaagtatcaaatcgatgatccgacttttgtatcttcgttgtcttcataaaaaataaggcctaatccccaggttgacacccaggtgttgcttagaagtctcgccaatatttctgagttaataatgtgtatgagtcatgtgtattatatatgttgagcataatatatattgagagatcaaatatgagaaaataattatttcctatatgtttaaatgacatgcatatataatatatattgtgtatatatatcatcatgtatattaagtgtatatttatgttatatatgtgtgagtttcgtaatatatatagtattataattaattaatatatattatgtgtatgttatatgtgagatgataataatatacgtaatgtaacgcccgtattttaactatttactaaactcgaaagataactttaatatattatatctttataactatatggatcgggatcccgagtattaaaatacaatttataagtattttactaa

SEQ ID NO: 119470 - DNA, 586 bp, Cannabis sativa
tagtgagttctgttctgaacactatacaatgatacctaaaacaaaaaaaaaatgttaatgattataatcccttattaagcaatcaattcaaagtagacccatcttattgttacaagagaactatattaataatttttattttgtgtctttatttgatgaatgcgatgcagtctcttattcacctaactcacttctgtggtatctgaaagacaaagcccgtgtttgaaattgatgaaaccactttataaacctttctttttcgtgctataattgttgatgttaatgttttcactacaatatatatatagtgatcggataaaattttgactattttacatcttcatggttctttggatcatctctaacataaatactaaaaatgtggtgtactattattttttcaaatattttattaattttaatagtaatatataaaatgggtgctaaatttagttaaagttaaaaatggtataaaatttaggagtataattaaaatagaaatttttacatcaaaaatctaatttactcaatttattacaaaaaaaaaaccctacacgcttacatcatcatttttacctttcctctt

SEQ ID NO: 119471 - DNA, 1840 bp, Cannabis sativa
  modified_base (1784)..(1790): a, c, t, g, unknown or other
taatgtttaaagttttcaaaaaaaaaaaatcatgtaaagtttagccttttctctaattttttccatttatttttagtccttaaattattgtttcattttgttggtcctgaaaaattatattaaaacaagtgatcacattgcttaattagttaagaaatgagaaagttatgccattcaaaagctgctaagtgctcttcactcaccttactttctgcatcccatcacatattcgaagtaaaatctgcactatttcaaatcaatactcaacgttaatgtgtatttatttaactttttaattaatttttatttatacttattatatataatttatacttaatttaattatattaataataaaataatatatataaattatgctaaaacacaaaattgtaaagctgaaataaaaactataaaaagatcatatggcgtcagtttttcataataactgactccataaggtcctatggtgtcggttatgaattactgacgttatagggccctatgttgtgtgttgtttttacttttacagtgtcgcttagaatagtgtttgtagtaaattttactaaaattgatgatgaaagcccttaaaaattgtctctaaagcctaattttgtagtaatggatcaatttactagcaatttactttatcaggagaaagtattcaaaatgcttttatgtaaaagttcaaaagttaatattattggaaattttgtaatgcaaatgggaaatattattattggttctagaactagttgcaaagatgtatgattaatgagtgagggggaaaggaaaatttaaaggtgatgggacctaaagccatctgtcatacaatagttggatgttatcgattagttgttgtagtaatcctcaagctttgttaatgaattgtacactgattcagccatagcacactatttttgttggccacacgcaatagctgcctaggaccacatataactaattaattaattaaccatttcttactagctaggatgattaatattatcgttatttattttttaataattattaaattaaaatatattaaatttaacattaaatttacattcctaattaaattataaatgaaatttaattataatgaagttaattatcttatatgtaatcgttaccgttactctctaattatgttccaaaatcctcattttttttctttttttttctaagtttcttaatatgagaaaagagaggaaacagagcaaaaatcagagcagaaattttattatggctcaacttgattttacaaatgaagagaagagcttatatagcccggttcaacaagaaaggagcagttggaaaataaccaactgtaacagaaaaatcaactaaaatatccaagtctctaacaaccaaaactaatcctaactaactacttcaacttgttctaaaagcccccctcaaaatggagtgtatatgttgattaaacccatcttggagacaatgtttttgtgaggagtcgggagaagagctttggtgaatatgtcagcaaggttgttttgggaagagacatggagtagcttgacggagccttgttgaaccttctctcgaatgaagtggcagtcaatttccacgtgcttggtgcgttcgtgatagaccgaattttcactaatgtgaattgcggcgatgttgtcacagtagagcaatgcaggattggaatgattgatgccaaaatattttaggagagcaattgttgggttttatgccctaaataaaactcatttttcaatgtaatctttattctttaaatatcaataaagaannnnnnntatttttcactcatttgtgtgttatttgattcatgttatcatttacttgt

SEQ ID NO: 119472 - DNA, 1110 bp, Cannabis sativa
agagagagagagagagaggaggcaggttttcttctttaattttctaactcgaaagagataatggataaatatgatttttgttttattcactaataaagatcaaatttagcataagaaaattctacaaaaaaattactaaaaaccaattctaattcctttaggcaatattatcatttttcccattaagtaatcttgagacctaggggtaaaatggtctgacaacataaccccatctaatctcgaagggaatatacacaattggtaccttatgttttattaaaatatttatttgatacgttacattgccaataatacttaatgggtaccttatattatcaaaattagttaaaaatggtaccttttgttttaatttgatcaataagtatttttttatgaccatattaccctgttttatgaattgtttttcttattatttgtaatgatttttttagaataataaaattagtactttaagtaacaaacctaaccacttccacagtattatttttccatttacatatatttcctcaatttttggtattagcattttgcttttaggatttacttcatctttatttctttggactcttttataacatatgttaaaatcgtagtaatccccaaataatgactctatatcaggctcatcacaacacttctcaatgttaaaatcgtcttcatcatcgatcgaactatcactcctccctcttctccatttcaagtcactatcacagtgggactcaacaattgatcatttagtgtgggtacatctaatgtggcttgtgtttcgtttagtatgcttgcatcttcaaattccaacaagtgtatcttcattgatggtattagaaatatcaaatgaaaatggtatagaactttgaccaactttcttacgtacacgttgtttcatgtgcctactactattagttcctttaagatcaatcatatttacatattttattgcataacataatatcatttttattataactacttttttagtaactcaaaaaaaaaaaaattcatggcaagtgaattttgagctattcactcatatatatacagtagaacctctattcaagaatacacttgggaccaagtaaattatattct

SEQ ID NO: 119473 - DNA, 932 bp, Cannabis sativa
ctggtatatctccatttgacttatcatttgttgttggagaaagttctacatttttttaattcctcattatctaatgatggagaaccctctgattcgtctaaattttctatcgtctcttcatcttcagattctaagtccgatagaagttccatcatttctactatctcttctacttcaatttttcggtgggctctttatttccactactcacatattttctgtcacctcaaaatagtcagacctttttgtttctttatagtcccgttccgttgtagggtcaataaaatcgatattatctttcttactcttatcactaagtttgtactgtacagtcttgatgcatgtttcctccacattattgacttctacagtataagacttctcaaaagaaaaactatagaatttcattgctaactcccgtatcaacattgcgtcactagttgtctcatcaacatgctttatggtattatgccaaatgctatcgatatgataaagaaaattggggacgtgagacaatgccacccttaatactaaaaactcctcttgtgaccagatcaaggctcctcgttttcttactattttattaatctctccattgatagcagtaatctccctcagggttctcagtatttaatcttccttacccaaaacatggtcaatcttaagcgataagatgcttttgatttctttcagtattacgtcaaatgacgctctaattcttggagccataattttttttccaaaaatctgcgtaccacatataaaactattaataaaaatagcaagcatatatattaaaagtaacacttacgttatagtgagagggatctttgtctgtcttctgtatgtataccgtgagtatcctttgggctaacggacgatcggctctgataccaattgtaacgccccgatatttttccttactttacaaa

SEQ ID NO: 119474 - DNA, 1527 bp, Cannabis sativa
gtaaaatacatgttaacataaaatacatgttaacataaatcactttcatgttaacataaatcactttaaaattaacataaatcactttaaaattctcataaatcactttaaaattctaactttaaaattctaaattgataactaatcagattgtaatgggttttaacgaaatacttaatgctagtgagagagttgggaaaagggcagtgagtaatccatctcaaagatttagggactgtgctgatcattgtggcttgagtgacttgaagttttcaaggaatttttttacctggaacaacaagcaaaagccagatgacagggttttctccaaaatcacagggctttggtgaacacgtagtggatggagtcctttgtgaactctgaggcagtgtttctgcctgaaggtctttttgatcatagtcctatcctggtatcaatttacttggataggtgctttgggaaaaaaaaaccttttagatacttcaatatgtggaaattggcacctggatatgaagataaagtggctgggagctggaatcagaaggttatgggatccaaaatgtatcgaattgtcactaaactaagaaggttgaagcaagtgctcaaggacattaataaggaagggttttcaaagatccacaaagcagagaaaatctctaaggatgccttagaggaggctcagatgcagatgagtaaagaccctctcagtgatgaaaaaatgatagcagagtaagaagcatgcaggaaatatacagaagttcacaaagcctaccctcttttcctctcatagaaagcaaatatgtcttggttaaaatatggggatgagaattcaacaatgttccatgcatctataaaagctagaagagctcataatagatttttttctattgaagatggcaatggtaattggtgtgatacctcagatagtgtttagaaagcctttcttgaatactatatggggatgttgggtaactcaatgtagaataggaggaaagttaaccagagtctcattaatcttggccctaagattaatgagcaccataaaagtattctaaatgtagcatacacccccaaagaagtgaaggatgccttattctctagtcctggcattaagtcccctggtccagatggatttgggagtgcttttttccaggataattggcagctcgtgggttctgaagtggaggaggcagttctttccttcctgaactcagggaaaatcttaaaagagattaaggccaccaccattactcttattcctaaactgaattgtccaaagaatgttgctgatttcagaccaatctcctgttgcgatgtactatacaaaggttccactaaggtgctttgcaatagattgaggaatattttgcctgatcttattgcagataaccaaggaggttttgtgcatgggagattcattgcacataatgtgttagtatgccaggattggtaaggctatatggaaggaagaattgcaagccaagttgcatgattaaaatcgatctcaggaaggcatatgatacagtc

SEQ ID NO: 119475 - DNA, 1662 bp, Cannabis sativa
ataattttatatataattatataagtgacctgaagtcgtgtttgagagagatgatgaagaaatgggatgaagtgatcgaccatcttatggtgcatagtgttagcaataaatgacacaaaatttttgtgtcgtgtgctccacagttgaaacattttcctttgaagtctccacaagtccgaatcaacattcaaaatcccatctccaagaacatcaaacacttgtctaaactcttctccttttggataattagagaagttggagtttaagatgtgttgtaaattagatggatcacaagttataatgaaatccaaatcagttgtaaaccaagaaggacctttgaacacaaaagtgcccccacttttcctcaaaatttcagttgcgaaatcatgcacgttcgaggcatttagtagaagtttgggtagcattcccaccaccggccaggccatcagcaccgcgtttctgtcgcgccaccagtggtgaatcgtcgccagaaagtataccataactgccccacctagggcaccctccaagtatccaatattctctagagccatcatcatcatattccaatattttgtaaattaaacaaagctatagctatatatagtattgtaaaccgtaataatttttgtctttttgaattattatctgttttttcatatttgaattattgtaatctcaattttttgtataatatattatgtagctatttaagatattatgtaaaattttgagaaatttaaaataatctacattattaaaaacataatttaaataatttattttacacatgtataaaataaaaataacacctataaaacaaactgtttgaacaattattttcaacacgttaaattttgttaattttttttttttaaaaatttacagaatattttaaataattatattaaatattactatatatacaaatagataaaattatgattatctcgaaaacataactgtttggttgaccccttttagaggtgtagaagatttttcatatatattataaatgcttaattcattaatttttttttttttttggctgaattgaattactcatgaagtacgtactccatattgttttatagtaggctaattagcaatttttcccctcgaactttgacatatactaaattataccccctgaatttttttggccgttaaaaatttcccctgaattattgagattgttaaatttaaaaatttgtctaatttcattcaattttactgtttcagatactattgacaaatctattaaatttttattgcatttttccaattaaattgggttataataattaatttctggatacgtcctgcacatatatttgacacataatcatcacagtatttctgacaatatatataacaactgaaaaataaaaattgggtagttgtaattttttaattcaaacacaatttataccattttgtcaaaaaaaaaaaaacatttatactatgcatatcatatatatgtacttaaagagagatggagacagctctatatgttaggtactcaaaatttatgtattggtggccacacttaattaagatcaactctatgacaagaaatattaattatatctttatatattaaaagtgcctatctaacggcattttttggtttaacataatataccttacaaataaaagaat

SEQ ID NO: 119476 - DNA, 959 bp, Cannabis sativa
ttcgctgatcgcgaaatgacattgcaagaaccaccaccagcaacagctaataaagaatggatatctaataaaatagactgaaaactaaaatttatgtaaaatatattaattcaactaattgccatagtagaatcactattaataatggagatattgaaactaaattaatacgcaagaaccaggcccatacgaatacaactttgccataatagcagagaactctcctaacacacctgatgaccatgccatccaactcacaccctctgcatcccgtatcactcctcctaatccaacaaagcccctccttaaaatcaccgaagcatctgtcgctagagcaaagaatctaggaggaggtggcatccatcgagtagctcggttgacaattgggctcgcaaggcccaatcccaaacgaaggctacgccgaccatactccttaaactcttccagatggttatttgttatgtaaagactcggtttttgaccgagtcaaagatatatataataataataaataaataataataatatatgtatataaaagaaaaacaatcagaccccctatatcgtcctgtttctcacttactctctttttctctcttttcaaaacacaaaaagaaaacccacaaaccccatcaccggtggactccagccaccgcccagccccacgcgtcagaccattcgaacccccaggtgccggcaacctcaaccccaagcggcgccgctcttttcgccgccgttagcccggaatcgcaagtcaaagtttggcaattcaaactttgaatagattttttggccacctccggtgtccgttggatgagccgtcttcactactagactcagtttgacgaggagaacaacctacaataagctatttcgcccaactcgctactttttccggtgacatttttgtagctccacccctttccggtaatatcgtgtactgttttgacaaatagttg

SEQ ID NO: 119477 - DNA, 1705 bp, Cannabis sativa
tggtatagtatattttgggctaaaaaatttaaatttaacctaaacctaaaatatacatcattcattggagatagtcttattatctactaataaaacagtacaaaagattagcatcgtatatgaggtcatgttttgtttaatgtaatagagattaatagaattaaaattgctattaatctttgattttcttttaaaagtgatgtagtgggattataatgtaataaagataaatacattatgtaataaaatctttattacattagaaaagctgtaatgagaattacatcacaaataataaataaaataagtaaaaaattcaaatataaaatttgataatccatactaaaaaattagccatggtatttaattataccccaattattacacataggaaaagatattccaatcttttaatctttccaaaattacccctcttttcaaactcctctcattctctctaactccattctctctcttctttctctctcccaaactcatggtgatccatcgcacgaacccaccgcacgaacccaaactccatttgaacccactgcacgaacccactcgtccagaaatgaacccacggcgaccctgtagaccactcgaaccaagtgacccaggagacccacgagatcccccaatgactgacgaaacccacaagacccacgagacaccccagcgacccacgagacagctccgtccagtcttcaatcaccttccccgcctccgtccacgacaactccaaaccaagtttttctttttttactttaaattcgcaagttgtgattaaactatggtttttttggatttattaattttgtgtctgggatttttttttgggattttctttctttgtgcgacattatgcgatattatgtaatttttgtgcgattaatactacaaattcaaatcgagtttttgtgttggtattgtgtgtgcgatttctatgcgatttttgtgcgataagtcatgactatcaataagtgtttttgtgttcctgcttgtatgtaatttttgggcgacattttgtgcgattttatttaaatgttttactagccaatgcttgaacaattttaagagacattatgcaatttttgtgcgattaatactgtaaattcaaatcgattttatgtgttggtattgtgtgtgagattttgtgtgataagtcatgacagtgcttgaacaatcataagtgtcttgtgttcctgttggtatgcgattttttggcaacatttgtgcaattttatttaaatgttttgcaatctttgtgggattcatggttgttattttgcgattttgtgcgatttataatccaataatagtcatcttttgtttgtaaatgcagatgacttcagaagagacattagaaggtctaattaataaatatatttaaatgataattttatttgataatgaattataattattaaatagaaaaaattagtatttcaataactagaacagaaaaataacattattgaagaaagataattttgtttcattaaggaagcaaaataatggaaaaatcaaactcaagggccttatcgggagttcgtccatgagtggttattttatgtcattggatcttttcaatcagtccatttagttctaaccctaaccttagtgaatgcctataaatagaacataatatccactacaacaaataccattattagggacagaacatgttggaattattttacca

SEQ ID NO: 119478 - DNA, 2354 bp, Cannabis sativa
  modified_base (920)..(923): a, c, t, g, unknown or other
aacacatttttatttttcaaaaacaaaatttttaaaaacaaaaattttattttcattttgtgattaaaaaattaaaaaataaaagtgttaccaaactacacctttacttttatttttgtgattaaaaaatttaaaaacaacagtgttaccaaacggcaccttagcattttacttttctatccaatttctgcactaagtgtcaaagtttaggtaatatggtttttcaaaaattataaataaatatttttaaatgataaataaaaatttattatggttttaatttttaatttttttttcttttcttcttccttttctcccaatctttacttcttcttgttgattactagagtttgtagagtattcctacattaactaaactttctagagtattttctatatttactagtttgtttgagtactcttaaattttttagaagtctccttcacttgtgttagtagtgtgaattatgtagaaaaatgtagaagctagtcatttaataatgtttctagagtattattaacatgaaaacttctcctggtgatatggacatcaatatttcacacctggcatgaaggatgatgtcatgaagttgagtagacccgagtcatagtagtcagcctgggaagggaccctacccttgcacccaagttgacttaaggatctccgtgatgaaagtttagactttaataacttgaatcaaacccactatattttagtattctatacaatgaagacatggagcaacctaatcctagccttaggagttgaaattacacgaacctacaacctgaaagccaacttggacaccaattgtttcacccgacacccacgtttacatcctcaactagggtttcaatttttgggacagtcttagtgaaaaatagtttaaacttgtattgggacatcaactagacatacnnnnaacatatttgaggcatcaaaaacagaatcagagcaagttgatttttgagcacttgaggccttgggcctcgagcacccaacgcccaggttgacaatctgtcaatttaggcgccttccaactgtctaatcggagatctaaattttgcatcaaatctgttgtaatcaaaaacaagaacctagatccttttggaagaaaaacaacaattcttcgtcacaaataataggacccagcatgttgacatctggggctggccgtgcacccacgttgacattttatcaacctaggacacttcacatggagcgtttcaggaattatttcaagcatcttctccgtctttagaaaatattgcgatttaactattttcggggatcaaaaaaaatttcaaagggccaaaactgggtctcagcgaccaggtgtaaacctggggctgggcctagcgctcaagtgtcattttgtcaacctaggttgttttcgatcaagttcagcaaaaagtgttctgggcatttttttcgtcattagaaataaaaaaaatttaagtaaactcggggagaaaaccacaaactcgagtccctagaaacatggcccatcgcccaagttaacctagggctgggcctaatgcctaggttgacaatcaacctaggatgcggccttcaattggtgaattgccaaattccatgcgaccattgaatttgacatggtctaaaatggggaaagagaccccatcctcaagtttagaagcgatggaagtatcaaaaacaaaatctcaagagctcaattggaagggcctagtgccttggttaataaatggcctggttagttgggtttttcttatctgaatcagatattgtttcgatcgtttgtctagtttatcacaattacaatgatctatgaagtcagagaaatcaaattcataactttgtaattctcatttctagaacacccaaaaatgaagagtttcgagtctcccattttcgcaaaaatagcaacatctccgagaacaggtcacaagcttcaccaaaacctataaatggtctaagtggtgttaaactatcaattaggcatcttaaaaggcttcccttggacgtttttacacttactgagcgtctaggttgacgtctgttgactgaggtttttgacaaccaattagtaacaagagctttggcatagttaatgcaaatgatttttacgtggtttgggcattaatgatcagtagtcaacgagtctctattattaatgagagtgtttctttacagagaatgctcttggtgtgttttttatctctctctttttttttttttttctgatcccctttctcatttttctcaggggtatttatagagattgtgggggaatagttaaaaaggggtaacttgtctttgagtgccagctatggataagcacaagttcccaaaagatacaaaatagggcatg

SEQ ID NO: 119479 - DNA, 1372 bp, Cannabis sativa
ttacatcataataaccacatgatctaaaatcaatgataaaaaaaagtaccctactagtagagaatttttgctaggttctaccatatttttgctccatatatataatattagagtgtacttgttaattttgtagtgtaactcatatcatttgagttttaagtgacagagtgaagtccacctagaaatttacgaggcctagtatcattttctcacttatcattaatattggacctacacaaacggaaatacaatagtaccaaaggcaaattcttcagttataaataccctccaaacacttgatataataatataagagccacactactgctagcctaaagtcaaaatctatcatcaccaaaaatgaggtcctctattattttgttatttcttttagtgctcacatacttctccacctctacccatgccgccagatttgacatcacaaacagatgttcctacaccgtctgggctgctgccgtacccggcggtggaaggcagctgaaccccggccaatcatgggcccttgacgtgaatgccggcaccaaaggagctcggatatgggctcgaacaggttgtaatttcgatggggcaggaaatggcaggtgccagactggcgactgcggtggcaaactcaattgtcagagctatggacagcctcccaacacgttggccgagtacgcgctcaaccaattcaacaacttagatttctttgacatctcccttgtggacggattcaatgtccccatggacttcagccccacatcgcgccagtgcagccgagggatcaggtgtacggcagacataaacggccaatgtcctggtcaattgagggcaccaggaggctgcaacaacccatgtactgtctttaaaaccgatcagtattgttgtaactccggtaattgtggtgctacagatctttcgaggttctttaagacacgatgccctgatgcttatagttaccctaaggatgatcaaaccagtacttttacatgccctggtggaactaactataaggttgtcttctgtgcttgaattagtgatggtatacgtcgccacgcaaagcttttgtaataatatttatgttatgtagaataaaagcacatacatatattagtgtgtgtttacttcgttggcatactcaggtgtgatgaaagtttattatgtacgtgtcgatcattcctatataataatataaacttaattatgtctttttgtattcgccttcaaataaaattcactgaaaaaataaaatggactattttataaaatattgtttctaaacatataaattgcttcaaattgaagcctttgagaaagacccgaaatagctatttttataaatgatatttattaaataataaatagatttgaa

SEQ ID NO: 119480 - DNA, 2245 bp, Cannabis sativa
tatatgatatataaaatatatttctaaaacatgcattccataattattaatacataaaccttaaataattaataatataaagtactattcataggcggtctttacaatctgaccaagaggcatcagccatagccacaaacctgcagggagttccaacattctgcagataagagggttcctcaccggtttatccaatgaatgccagaactcacaaaagtttgattccaatttgtgcacaatagcaaggatgccctaaaccacttccctaattggaggttcagtttccttcggcatcagaattttcctcttcaagtttgaacaagattccatagaagccaagaagctcatattgtctttaaagaaaaaatacaagtggttagtataatagaagagaaacgaaaagaaaagttcaacttcatcacatggagtatcaaccacctgatgatccccatccttctccagagcagtttgaatggaggtaacttttccatcttcctagtctaagaacacaaatattctccacgaatactatgtgtcactttgaactgaggtcatttcttctgactttatctaagacaagatgacagttgcactttgagcatcctcatcatcctacttgagtggcattgtccaaaattcatcagcaaaacaagtgtcagcatacacttgatggaaagacattatcaacccaaccttttgaagatttttaatattgaacaaagttctctcatctcactcccatgctttgattttgaacagcatgacttcagctctcctcttcatgtcaatcagaggagcaggtcttttgaaagggccagccttttggaaagttatgtgtctcgatgaaaaaacaggagtatagaagtatttacgatgataaaggcaacaattactcttggtaatattttctatatatgggctgaattggtaaaagtggtaaaagccttcttctttgcgaatcgaacttctttttaagtcacaaaataagtttatttcatggagagttggaacaaacaagtttctcaagcgataaaatatgaagaaggtggaaagtatcctataactatttggttttatcattattttataatttattgtagataaataatttttttctactaaattgttgccaaataataaaaaaaaattgtaaaattataaagttttttattttattatgattattttttttttgagaataaaattgtaaagatttagattattcatatagtacaaaatggattttactttatgtaaaaaaaaaaagtcaaataatcatttaagtttagatatctatctttttttggacaaactgtgtctcaatattttaaaactaaagtttaaagtaaattaaaagttgaggaatattgcttttctaattattatacatgttatatttgacaacaacttaataataaaaaatactttccttaaaaaaatcaatttataaccaaatagaaaatccttaaaatagaatataccaaatttggaaattgatggactttatcattacataaatatgtataataaaattataagtggctttgcattaattacttaccaaaaaagtcatacataaattataaatattgtatagattattaatataggacaggatgattattaaaaacacgattttgtaattatcaataagtgtagattattaatataggacttagtgagttatacccttttttatattttatataaaagattcaagataaatatcaagtttatattattaaattatgacagagtaactgttttatttttaatgcagcactagaaagaagcatttcaccttaatgtgaattatttgtgtgtaatattctgtataaaatgtagtgaaatctatgtttttattttaatatatttaatttttttttatggtaaatttttttaagtttatttttctttataaatttgaggtgttagttaaatatcattgttaaataccaacttgataattattatgtacacatatgtatatataaaaataaaactttaaagtcaatataataataattcaattagtatttactggtgatataattttcttatgatgtatatagcagctaaaatattctataaaaaagattagaaggattcaaactatctacttcataaatgtataaaataaaatggctaattagtaatttttcctccctgaattttgacatgtattaaattgtgctccctaaacttttttggccgttaaaaattccccttgaattattgagattgt

SEQ ID NO: 119481 - DNA, 793 bp, Cannabis sativa
  modified_base (26)..(34): a, c, t, g, unknown or other
gaccctgtgttttgttaaatgacaannnnnnnnntgtattttctaaaatagtaaaaataggaccctagtttaatttttgacaatttgaagacatttaatacgaacagatacaaaaaaatgtaaacagttttgtcatatcacttttagatcggattgtaattaaacttgaaaaaattattaattcaaggtcctatttgtattattttaaaaaatacagggtccattttgtcatttaatgaaacacaagatccaattagtaattttggtaatacagaaagtccaaaattgtatttaaaaatagaaagaaaaagctgaaattaggctatttctaccaataaagaaaaaagagatgaagtagggtatattagaaataataattacaaatatcttgttcaaaaaaaaattgcagaaatatctttcatttttaatgctcagaaaaaaattacgatttttttcttttaaatgtaaaagtcttacgtattatactatcgttctgtagttttatttctatatatatatatggtgctagctaaaaaaattatcaattcatactgatgcactaataaagatgataacgaaaatcataataatataaaccctgaatcaaataaatagttacataagaaagaataatataattaaaaaatcaattgtagatctatatcaatcaatgtaaatctataaacatcaacgaatcccgtgaaaaggaaagaaaatcctctattcaactctctacatcaccaaaactgaggccaaaacgacaaccaccatagatccaacgacagtgaacgaa

SEQ ID NO: 119482 - DNA, 966 bp, Cannabis sativa
tccttaaatttttttaaaaataaattaccactacaccaaacaaatttaaataatgttatttgactataaaactattagtctaaatgcccaaaagaacctattaagacctaaatattataatattttatatggactaatataattaagtgttggcgactagtattatcatataatgataactatataatcagtaatgtatagtattactattaggccataataggatggacataaagtagtagacatgctttaaattaatgtctttggttagcctattaggctaagacaactaattctctcacattgggcatataggcctaattggtccataatttcttataaagagggttgtgctctttgttggtttttaaggtgggataattgtggctatagtgtagagagaatggaagagtagtgttcatcacaagctctcttttatatgtgtagatcaaagaagtgtaatcaacaagataattagagattaaagtcaagattggagatatgtttattattatcttaatgctctaaaattatatgagcataatttgttgttgattattattgataatacatactcattatgtagtatctattaacactaaacaccaaatagcttaagaccagccctaataatcctatcttcacccctgtctatatacgtaccctaccttatacccacattaggtacatgttttcatactcttaccttactttgaatcctaattcaatggataataccctatccatatgggttaatgagattttggataaaattgctatcaatgtgtcttgtttaacatattaattaagtttttactcacaaaactgaacaaaaattaattttattaatattgagtaattatgttgtcaaaaaaaaattattaactatatatgttgctatatttttaaacgctacgcaagtatacgcaatcaagtagtaaaatctcacacaggtgaggtcgatcc

SEQ ID NO: 119483 - DNA, 2310 bp, Cannabis sativa
  modified_base (606)..(626): a, c, t, g, unknown or other
atgtactaaactatgctcccagactttaaaatctaccaaatcatgttcctcgaatttttttttttttgatgaatcagattatgtattggctcaaaaacaaagtgcttacaatcttatagcacccaacattgccaaaataatcatttatacatgtaaatcacaaatcacatttctttctatacatttacattattcacaaactaaaaaaccattgcctatcttcctctgaaattttctttggccaaaatagctcaatccgatgagttacccctgttttgagctcttttaacatgtttcctatttctggtttttctttatcccataaacacttgtttctaagcacccaaatgttgtatgtaaggttggccatagcagcagccaatgtcatctttctaaacttattcaccttagctctcccaatcctttaactgagattaaagagagaagtatgagtagttttccaattgagccaagtcttcacagtctgtaggcagctgctggttacagagcaatcaaaaaataaatgctctgcagactcctggtgtgcacagcaaagaagacaggtttgaccctccactatgctcctcaaattttgacatgtactannnnnnnnnnnnnnnnnnnnnatccatgttagatttttttttttactaaaattggacaaaagtccttcaatccaacaatctcattagttcagaaggtatttttaacgatcttaaaagtttagagggcatgatttggtatatgtcaaagttcaaggggaaaaaatacatatatgtatataagataggtagaagaaaaaaatacacatatattatataaaacataatataataagagaataatatatatatatataaatactcaccgacaaccttcagtgtagaatagtagagataccatgacttaaataaggcttacacatttgtccagaaacttactttttcatatctctaagcattaagagaactctctaaaagatagctttgggaattatcaaacctttaaggttttctaacaaagtatttttgttgatagaaaactagttgtattacaaagtgaaccccaaagacctatttatagtgttagaaactataattgaactctcatacccaattgctattatcaatcgaaatagggcaataaatggtgttgggatatcaacccaagccccacatcagaagaataggcaagagttgccttaaatataagtgttctacctactccattagtatgaggtattttgggaaggtgcccaaaaataaaactatgaaggcttaggcccaaagcgggtaatatcatactaatatgcgagttaaggtgaggtagtgacccgataaggtagaggaacagttgccaataagttgtattagagccaaaggttcagaagttgggatagtgggattcatgtacgatgtgtgggagaagtcctcaatgtgatgaccttgtgatcgaagatctgtatggtgccttgtatcaaaagtttacatgagattgtggtggtcaggtggcgtgtcccgttgatgattacgattgtacaagatggagattagtgttacactactacaaaaactactatttctgacagtcctaaaaacacttttttgggggaccgtcgctaaaaaaattaagtgagtatttaaaatcttcaggaaaaattgggtattcctgatgattttaaacacttgtgatgtattctcgacggtttttaagtgtgccttaaaaattgtggatttttttaaaggggaattgccgatggttttacactatggcctatagtataggccatggtttgaaatcgttgcctagagtgttattcctaacagtttttaagcgtgtcttaaaaattataatttttttaaggagaattaccgacagttaaaagtcgtgacctatattataggtcatggtttaaaccatggccaatagtataggccatggttttgaaccatttcctatatagtataagccacaattttaaattgtcgcctatagtattataggccacgatttttaactatcggcaattagttcaaatctgaaaattttcaaataatgtgttttctctagctctaatataacgcgttttagatctaaaatttttcaaatctatacattttcaaaatgtcagtctctctctctagattttttcctctctttttggcatagacggcagtccatgactccatcacttatctcttgtctctcactctctctttctcgctttctctttcacgagctccaccatggtcagccacggccatgagctccaccacgagaaccaccgtcactcatctctctctctctctc

SEQ ID NO: 119484 - DNA, 1409 bp, Cannabis sativa
gtaatggggatttttttgcagaagcatatcctgtgcctagatggacctgttgtcactgcatcaggctttgaggatgaaattgcagttgttactcatgctgctgagtgtctacctacaaatgagcaggtcttttttgaactattaataagtagtacttgaaaatagttcatttataagctctagtgtaagacatattcaacatcatattggctggaacggtcaacctattaaagggtactttataagctgttactgtgagcccctagcacgaggcataatttgacttgacagtattgatacattctagaaagaattcaatctggagtgtcaacacacaaaccttccaatctttttgagatagcttggtgtctccacaagagtgttttctcacaatacacataataatttgatgcccttatgagagtagttgctgggatatatttactcagtcaactaactcaaaacaaatcctttaactacccactgtttcactaaacaactcatccaccctcagccaatagagaaaagtcagtgtactttgttgcctaacaagcatgcctctccatgtttatgttttactttatgctatttgaaatttaactttattactcttattcctgcaggtgcttgagtttaaagtatttaacatatctaacgggactcagccacttaaagggcacttgccactaactcctggttcgcatctagcatggtttgggtttagtgatgaagggcagttgagctcctacgactcaaaggtattgtaatgcttctggctgacataattttagttcttgtaatttcgcctagcaatttggaactgagatatctgaaatttctagggtgtgctgagagttttctcaagccaatttggaggcagttggttgccactcttcaggttcgttattatgtaatgaacttttattcttattaaaataattggaatgattcctttcagaagtttgtaatgattaatatgtatgatgcagtgctagtaaagaaaagaagtctgatgaaaactattgggtggttgggttgaacgcaagcaaactattctgtatagcttccaagagtcccgaactatttccacaggtaaggataatattaacctttttgcttttgttttccttcaagattttagcagtcataattttgctcctttttcaggttatgcctaaaccagtgctcaccctactgaatctttcattgcctcttgcatcatctgatctgggagcagaagcccttgaaaatgagtttattttgaatagcatgcatctctttcaggttttagtcccaaccccagatctcgtattatatttcttttttactgctatataatgaactattggctttgtgcgtaagggttgttgagtttcattactgattgaggaaagaactgcctgttttct

SEQ ID NO: 119485 - DNA, 1196 bp, Cannabis sativa
gtatttccaaacagctttgaatctttttaattaatgcatcaaaattagtattttgtaaaataagacaaaatattggggcgttacaatgataatgatgatgctactacaaatttcttttagaatttttattttagttttatgaactatcggttttatgtttatcaatgttttatgaatactcgttttacttttttagtaagtaatatttaacgatattataatatttgtgactcttaatattagtatgaaaaaatatttagttttttactcttaattaaatgattttatatattaattaaaacaattaatatttaatttttttaaaaaaatcaaaatagatttagaattatttttctttttaaaaaaaatgattctatcaatgacgatattatcgtcattgataatataatcaatgaagacattgtcgtgatcattgattacccagaatattaaaaaaaattattatcaatgacgatattgctgttattgatatttttttgtcaatgacttgctttgtcattattgataatacctttcgtcgatgaactatctccaacgactttttaccaacaaaatatcgccattgatagtcattagtaataaaaaatgcacccttcacggacgaaatttgtccttattgatgtccatgattcttgtagtgtggattttttatgttacattatttaacaaaatttataaataaatttaaaataaaaaaattacatcaaaacttataccacaaatcatggtgcgtaattttttctagtaaaactgtaaaattcgtagcccaatttttactatataattaacgattcacatttatgcataaaataataattccatccattcacaatatataactatatataaatgcataattacccaacaaagtacttagtctatatattaaattttatggtctatatcagagttataaaagtagaaataaaatttaatgaaaatagtttttatctaatatgaaccataaacccaaggatctcaatacaatatatagattaagtctaaattactgaaagaaagattataactgttgaatctatcaggttatctttgtttcttttcatattgttgacctcgcttttagccaacgacaacaagtcaaattttgtaagagataagtgatttatagcaatcgatatataataaagcaatataaagacacagaaattttatag

SEQ ID NO: 119486 - DNA, 508 bp, Cannabis sativa
ttgggtacaatacatataaaagaggtatgcttcaattaaatttaaaattagagataattttgattaattgataaataaaagaggtatttctcaatatactccaaaaaattcgatcatataaaaaacatgtgatttttttttaaactaaattatgtattatatgttgaatgttttggtttgattcacaaataaaactaaaattttattcaaaatatatatctataacatgttgtgattttctttctcaatatatggttgcatagtatatatttgtaagactaatagtgtgcaaaaataaatatttataattttcttaaaggaaatttaggcttaaattttagaggttttttcatttttacacttcaaaatattttttttttgcatttttacggatttctacatagaaacttctattgctattagcgctgcaacctaaattacaataaaaaatcgtatggaaacccctattgcaattagcgctgcaactactttagaaacccaaaccgta

SEQ ID NO: 119487 - DNA, 3622 bp, Cannabis sativa
  modified_base (58)..(68): a, c, t, g, unknown or other
  modified_base (1421)..(1425): a, c, t, g, unknown or other
  modified_base (1669)..(1691): a, c, t, g, unknown or other
aaaacagttttataaaacatatttttaaaaaatattttcactttttcaattttaaaannnnnnnnnnnattaaaaaagtgttaccaaacggcacttaagttatttgaaattcagtttatcaacattaatcatacaaacattatctctaagaatacatatttatatttcataatttattattatacttatatttatgtatttactttttgtaacttattcttttattaaaataatggtgtaaaatacggtaatttacctattagtttgatcacatgagcttgtgtttttttttttttttggtttcgctttagtctagcctaagtgttgcactcttatttttttaatttcttttttctttcctattcttttaacttttcatgcatctctctatctttatctatttctctttcttttctaactttaacaataaattcttgttacatccttaattttgagtttaaaaataatattattgtgacttattttttaatatgatcattttaaaatgtaggaagtatatattttctagcatttttaaaaatcaagtaactatttagttgcttaccatattaattatatactcatttttatacattttaatttcgacaatatataattataaaaataaaaattttataaacaagtatccaattggtattatattaatttaccaattaaaatatcttgccactaaaaactccaacatcacaatattttttattgccatcagaagcaattatttttttttttcaataaataatgcatattaataaaagaatgaatcacttttatgttgtgtgtgtagaaaagtaacttcatagctacttctaaatttcattttagatatcataagcaattaaatagttacttcttattatggcgacgatgagaaaatatatagttttctcacatgtcaaaatgaccgcatgacaattcattagtttcgaaaataaattcaaaggttactcaaatgtattttaaataataagatattataatataacataaatgaacataaataaactaaaaatgaatatatagtttaatataactaatctaaaaattaaagattatttacagaaaatatttttatttaaagtagatcattttatgaaaagtaatcaattggtatattatcaaaattataactaatttaaatattaatataaagtatactaaataactattttatatgtatacttatttgttatactatatgaaactaattagtttctaaaatatactctaaaataacttatgagaaatttaaatgtttactaattttaccaataatttatgtgttttttttttttttaaattttattgtaacttattagtttattaaatagacttgaaagtaatataaatatttctacaaaaacaaaaacaaaaaataagtaacgtaaaagtatttaaaatannnnnttaatttaatataatctaaaaataacatattaattaactaatgttaacttgactattcaaccaatctagatgagatagttcattccttagtgattttacctcttcattgttcttcacattcgaaacccatagtgaatgagtgccatgcccacacatagtaagtcaagtactcaattatagtgagtaagacggtggtaaccaaacccaaataagagaaatagatccaggtttagatcttgataannnnnnnnnnnnnnnnnnnnnnnagggctagagatcttgaatggaaaaaatacataagggtttaacaaaaccttatgtgtttattctgctgcaatcaatgtaagattttcttaaacccttatgtgtttattgccctttccaccacggaagcagaatttatggcgaccacaaaaacattcaatgaagcgttatggcttcaaggaattttgtttgaattaaaataataaaaggtgaagtgactgtgtactcagatagtcagtcctctatccacctctgtaagaatctggttcatcatgaaaagagcaaacatatagacataagactttaatggactagagagaagatatatagaagaatgacttgtttagagaagatcagaacggaacataatcctgatatgatgttgggactaaggtctaaacagtacacaagttcaagcattgcttgaacttgatcaatatcagaagttagtaaatcgagatttctggaacaccaaccatggtggctgcattctttcttcatccctatcaatattttaatttgaagtaactaggtgaatttgtggtatagttcctccaaatgaaaagatctccataagactgtccaagtaatggaaagttagttatcttccaaagtatgttctcggatagctaacttgtctatccagaaggagtctcgtggaatgatagttgccattcgaccaaagggcgttcccggaggactatcatgtccactacgggtgtagccttcaagaaagctagtcctcctccgtaaaggagttttgaatggatagttgttccttctgaatggtgttctagatagttgactccaacttgattttttcctatccagaagccccttaagcattcgcttctgccctttattcaaatagtgtatgtctcatccgaaagcaccttgtctagtgatgacgtggagattctgttacgaggagtttgttaagtttgttacatcgtaactaacttaacaacttcgcatgtgcagccaccgactttaggatccatatcctagatctataaatatctccaacacttatcatttcaagcacactgaattgaagagttttaagatgagactttgagattaagagagaaagagattgaggggtagaaagaggtttggagaaaagaaagagatattgggcttgggtttcgtatgaagaaacttgtgtcttgatgaagaagattcttgggtaatagtgtgagagttgaaacactttgagagaatcctctcggctgtattgtacatattcttgctcaatcaataaagaagatttggtggtgttccagaattggaatagagctatagagcacaccaatctatcgaacttgagccactatatatcttatttttgattttatcgttttactggtttaatcgtttctgatttttaatactctattcctccctgttttctccgattactgttttgtgtttgttattcttgtcattgctaatattttggtaattaaattttttttggattttgattttgcactttagtcttaattttccccacacattggattggttgtgcgtgataacactggcaaagttcattatgcgcaggagcgagctttctgcctggcatgttaatgtcgcttgtagctgaactgaaagccattcgaatcgggttacaagctggtattgggtgaggctgaaactctttttgggttgaatcaaattgtaaagaagtgagaaatttagggtttagggttatgcaacagcctccagtttgtggtgtgtcgtttgcttttagagaaacaaatcaagtggcctattatttagccaatttcactctagtcaatagggtgagtttcaagtgaactctgttgtattttgtgtgtcctgtaatatagttaggtaaattggttaatgtcataactgtcttgacagttatgacagttggttatagttagttagttgtccacttagg

SEQ ID NO: 119488 - DNA, 1220 bp, Cannabis sativa
aaacaacctatttggctcgcagtctttactgcttaaacaatcttcaatacacgagctcagttacacaaaaatagagactgaaactcctttacaaaactgagacaaaattctctccaagaattgaaatttacaaagtattgaagaaagaagaaggtaatatcttatattgacagagtcagctactacaagatctaaacggacataactgacttaaatctatttccaactaattgatatggctgctaaatgtctaactaaatgaactaatttccacaccaccattgacaagaaccacaaaattcgatctcaaaattaattggtaatgagcggactaacatgcattcttataaataactaaaagttaactaaatgctaatatggtccaatatccccctcaagataatggttactactatttatatgtcgctgatatcaaaacttactatttatatgtagctgatatcaaaactaaaaaactaattagtgatgagtggagtaattagtgctcgttttatatttgtttcatgagacgataaataatccaaaaaccataaactacgagcttccacttcacttaacattaaaaataataaaattaggcaaacccttacactgatataatcgttaacgatcccattgcagggtccttctccacaaagcactaagaaaatgggtccatccgggattcgaaaattgtcaagaaactcataataccgttgcttaaattgactatgatcctgcaaaattacacagaaacgaaaaacattaataatcatatagattctatacgaacattagaattcgataaaagagaagtatagaaaaaggggttttggtgtaacactgtacataaggagagaaatgatcaagggtttgattgaaccagagctcttgagtggtcaagtaacgactttgagttaacttgttgaacatcatccgaggcattccatagccatagcagcaggagagtgagaagatggtggaaaacgacactgaaatcaatgtcgttttactgtgttggtccatggtcgttgtcgttgttgttcactttctctgaggttgcatttcttcgagtttcaattcaactgccgtctcttacttttcttccatttatttaatttttctgatttttttttttactttagaattagaatctctactcaagaatacaattgaacaaagtaaattatattctaattgataagttttttttttttttt

SEQ ID NO: 119489 - DNA, 1097 bp, Cannabis sativa
  modified_base (144)..(144): a, c, t, g, unknown or other
  modified_base (174)..(174): a, c, t, g, unknown or other
  modified_base (200)..(200): a, c, t, g, unknown or other
  modified_base (1046)..(1070): a, c, t, g, unknown or other
ttttttttttacggaattctatatagaaactcctgtagcaactaacagagtaacctaaatcgcaactaaaatccatatagcaacccacatagaaatcgccagagaaaccaccagagcaactcaaaccgtaaattgaaaaaaaanaccgtaaattgaaaaaaaaaaaaagttaanaattgaaaaaaaaaaaaagttaaaanatagtatatggggtaattttcctagaaaatataactgaattttagatttaattattattattattattcttattatttaaattaataattaggtaataatgcatgttactaatacctagttataaaataaatcgaaacctctaaactgaaagattaaattttgttgtttaaaaaaaaaaagaaaagattaaatatgaaaattgtttggttaatataatttcacctaaccaattttgattaaaaaaattgttcacattattataactaataattttttttacttcaatttaggacaacttgtaaataaatgataacaaataattattgtaggcgcccaattaaattactctgttaagtttattctaaacatattttctcaattttattttattcttttttgttgatttaaatcttttttaaaaaaaaaaaatgctttcataagtaagcataaattagaaaatatatattttatgacaaaataaataaagtgttataataaaattgagaaaatatatgaggaatcatcttatatattacttttttaattttatttttatttttaagatttgagttgttctaataagtaggttgctatatatatatggattgagaaaaatatattctatacccacttttcatttcttattttaatgtttacctttcttttattactattttatttatatctgttatattcttattatgtgtattagggactttaattttgataagttatctgtggtcatatttggtattttcattataaagatgatatttatcaaattaaaattattttgctgttatatttggttaatgtgtaataaaaaagagaaatttacatggtannnnnnnnnnnnnnnnnnnnnnnnnaaaatactgccaggcggtattttttac

SEQ ID NO: 119490 - DNA, 3618 bp, Cannabis sativa
  modified_base (3552)..(3565): a, c, t, g, unknown or other
catctcgctggagaaagcagtaatgcccagaagagatatgtcaatgaaatcaaaaacgagcgatcagtttttgctccggaattacctaagaaagttaagactgaagaacctccaattgtatttcggaggaagacgcaaagcacgtgaggtttccacacgtcaatcctcctgtcattacaattcagctcgctaacaaaagagtaaaaagggtgttagtggataacaaaagctccgtaaatatcctttacaaggacacactgaggaagatgggatcgtaaaatgcaaaattaaaaccgtgcatggtgaatttgtgcagatttaccagagatagtgtcgccagtcaaggcattattgaactcccattaaccataggcgagccaccattttccacaacattgatgcaagattttctagttgttgacctaccatcagtctacaacatactgatgggtcgccctgcactgattggaatcggagcagttagttcaatcaaacacctatctttaaagtttcaaacaccggtaggtgtagttgtagtgcaaggtgatcaactattggctcgcgaatgctatcgtgtagaactgcagaatagaagggtcaaccatcagttaatggtggtcatagaggagaagtgagaagcaagaagaagatctagatctttgaattcatgcgaaaaaaaccaattgaaagcaatcaaggaactagaagaatttgttttagatccagaaaatcctactaaatgtgtgtttattgggaaaaatttagatgaaaaactaaaatagcaactgataaagtttctgaaagcaaaccaggatcaattggctaaacgctcgctaataaaaaactactggaatagtgagtatttgcgaccttattaccagtaaattcaaaatataaatgctatatttatctctgtaataagataaattcttattatgaataaaattaaagtttgttcaagtaattacaaagtttatcttctttaacattacttgggggcatatatttgtgtacaatgactgaaattcatctagaaatacatattatattgcaaacccagaaaattaaaattttaaaattttttccacaaaggaaaggataattgattataattgtctatggacaatataatgtcaaagaattgaaaaaccttttctttagaaaggaaaaatcaaaatagcagttgtaagtgagatcaacacataaatacaacagcgagttgaatgcttaacgactcgcattattctagcatgtattttaaacgaggcacaagaatactttgaaaaataatacttaagctaatatatgaatagacgatttaaactattcatatgaacaattaaagggtattcaaaatagttcttaaagagctattaaaaatattctaagtttgttcttaaagtttggcaaattataaattgctcgcttataatagggcagattagaactactcgcataataaaaaactacacgtagattagaactgctcgcgtatgtacgtagtagactgataactactcaaaatatctcaaagaaaaaaaagtacaatagaaatgcttccaacctaaagtatcttaagttcgatcaagatataaatgtttagattgtgaaataaaacgcaataaacaaacatacttagttcaagcataagatacgaggcataaaaggtaaagatatatgtataaataagcaaagttggtcatccaacaatgcaaaagtctttataaaatgccactaagggcaaccattgtctcggccaaatattaaagaaaagagtaaatattgataaaataaaaccaagtctacatggtggaagacttggaaggatcttcttcttcttcttcttttttagaatctactgcctcatctttcttggtttacttgcaataagcaaacatctccgagacaccatctttcaggaagtttaaattcatgtagggattggctatccaggctctatagatagaacgttttgcaacattgttgcacctctccttggcatcgacctcaacaccctccagctttttattttctttatttagctcttcctgaaggttttacgagcctcgcttcgatctttggcttccttctgagcgctttcaagctcagccttatgattcctctttagctccttgacatccttggtcaggcgagtgttctccttctgggcatcagtccactgcttcgcaagacccacgcattgtttgatggatttttaaagctcagattcaagttgttggattttttgaaggccccattgttgagccatgtgagacagtaaagatgcccgcaaaagggagatatgagtttagaagaaagataaggaccaacataaaataaaatagagaatggtgaaaggaactaactgagagaataaagtttagactcctctcaaataactcctcaaagttatcgttgttgatcaaatcccaatcgcatgattgaaaggatttgaaatggcaccaacttgaggtggcatactgcgagtagatttgcgaactagtaaatcctgcttcttgaggcaagggccaggaaggctctaagaagaccattttaggtgctttatctgagaatttaacctggtgggtcgaacccatggcttgctctttagtgtcaacgacggctggagtttgagagtgaaattggtcatcagctggctcaataattatttgctgcgaggcacatttttcattggcaatagttttccttgatctcttcatgggttctgggttagctcctgatgaagtctccgaggcggccaccctcttcttcccctttttgcttgaggcattgagaaggttctccaaatccatatctgcgagcagagaaggaaataaatcaacacttattcaaaaatagataataaaaatgtggggaatcaactcacacttataagaaagttaccataattatcagatgattaagaggaagaactatgataattattaaactccctagacccagtgatcatgcatatatcataagggtttactagagacaaattccaatctgaatccagatgactcgccctatccaagttagtaccatactgctcagcaatttcaatgtaggaactagcgcaactaagttggacatgaaactgagggtaccaactatcaaacctatgtgttatgcgatctatacagaaattatcccaagtatagatgttgtactggctatccttaaaagttactagcgaggtatatttagtcctaagtacagttggtgaccatccacgttgattacctcaggatgtttcttcttcaactttccgagggactacttttttgggataatgggtgcgagccacataatctttatcttccaaatcggctggaacttggactttctgccacatagaatactttggattcttatagtcgcaggtaaattgatcagtgccaaggagattgacggtcctcaggttggtcttattcaatagaaaatctactgactgcagtttaaaaggaagaccttacaaaattttatgccgctcagccttttgggaatattttaccaagatctaggtttactaacaagtatgttgattannnnnnnnnnnnnnaattctctaaaacaatgaaataaccacacaagggttaagaaaaccttacattg

SEQ ID NO: 119491 - DNA, 977 bp, Cannabis sativa
attgtgttgattaattggtttatgttcattattactgttcaagtgttgagattattgcaggtttatgattgaatcctcaaagttatttccgctgaaattacaacataacttttaaaaattttgatgtaatatgaggaattataaatttttttatattgtttttagtacatgttacaatttatatttttttactgttttaaaatatctatatatatatataaaaagagttgaccgaatcaacacacggttaactcgtctaactaaaacctgccagctcacgacacatgaacaagtgggttcagtttactttttttacctgaaactcgtcaactcgaaacccagtcaacctgcacgatattcggtcctgtattaaatatgtaaccattatggttacatttattttttgtcgttaggctactattatatggttgtgattaatttaaaaattaaaaaattaaaagaaaaataaataataaataactagtaacttaatatatatatatatatatacagacatataaatatattgtcaatacaaaaaaaaggaagtacttctccatctaattagctaagaaatgttattaaagttaataacatcaatttattttattttattttttaaaaagtaaaatattaaacattaattttatctgttaaaatatataaaataactattttatattatattttaataaaaaagatagtttggtacaatttattgataaggtaaataaaataaaattattatgattatatttccaaaatattttaataaacaacatatacaaatattaattttaattcttccttatttattttattatatgttctattaatttatttcaattatacacgggcaatatgccattaacgaattaataattgggaaatttacaagaattgactaaaaaactttcctatttacttttttaattagatatgtattttttatcttttttatctttttctaacttctt

SEQ ID NO: 119492 - DNA, 980 bp, Cannabis sativa
actgtagcgtgccttagcattagggcgttacattaatcatacatcttgcctttgagtttttccttccataatgcctcatgaaatcctggcagatcataatgttatgagcaataaatttgccagaaacaaaccccctggttctgtgctacaagctcaggcaagagactttcaattgggaacaaattagcttagtagcaactttgtagataacattaaaacatgcaatagttctgaaatcactaactgaattaagacacttacatttggggataagtgttaaaacagtagtgttaatttctttaaagatctaacctggatgcaaaaaagagaggacagcctctgaaatgtcatccctaattaaagccatctggaccgggagctttcactccatgaattaaaaaacagccttcttgacatcttcgttgggaactccttcatcaagaattctgcctgagatttagagacaagaggaccaagtttcataactcctggcttgattgttgaaataatactttctatattgtaaattattttacattttttgaaattttttaagacgtcttaaataactataatattcgcgactatgaaaagattaaattaaaaaaaatttatagatcccaaaacagatagagagacacctatttttataggggtgtattgtaaaagcacctaaaattttatatatgagttaagattttaataaattttaaattataaaataaatttaaacttaaaaacaaaaactttaattatcttaattttgttataaaataataatttttttctttatgtaaacatctcaatcaaatcatgaaattgtagatgtaattgcttcggtcaaaagctccacgtcacaaccaccatgagctttgcccacccttgtctcaatttctctctcttgcacttctttcttgatcttgttgggttttatgccctaaataaaacgcatttcaatataatcagagatcggaagagcg

SEQ ID NO: 119493 - DNA, 624 bp, Cannabis sativa
taccttagaaaaagggtccaaatgctctatgggtaaattctccctcctacattccattctgtggaaaacaattataacctgtctggcttttcttgggcactcctctagttttgcagcaagccacacacaactagctgcaactttctgcagaaaatcaaaacaacaacagacatttactctattaaatattggctatccgactgtgtgttttgtaaaataagtcattatgaaattttttattagtaaaacaacttccttaaaaattttattagcaaaataacaatgttcaatccacaagcgaccataatgtaaatttaatgtggttattttgctaattttacattttcatattgttagtttgacaaatttcactatagcactggtaagtggcaattcacaactcaaaaacaacacgaaattaaaaggtttgatcaaacataaaattcttgtgaagaaaggaatacttttgaatttggacattaagcactcaattaacctaatatgagattccccaaagttcaaattcaaaaaattaacaattttatatacgaattaagaaattaaaggtggacaaattagagaaacaaaccttgacattgaagcgagcaaaagacttcttgcaat

SEQ ID NO: 119494 - DNA, 1657 bp, Cannabis sativa
  modified_base (1602)..(1610): a, c, t, g, unknown or other
cccctaaatcacaatatttgtaaactgatgagtgacacactaaatcacttttcgaggacttaaaatcaaaactaaaactttccctatcgatggataacatggaaataccttatatatcgtatatacgggaaaatttaaggtgccctaaaatgccccaaccgatatatcgattcccaatcagaagaccggttctaagggagtctgcctggggatgaactaaaatttcggttcctataggtcatattgaaccgatcgactagttcaatacatgaatccccaaaaataacaccaacaccacaaaatgaccccaaactgcacaaaaacttttagagtgcctaaacaactcaaaataaacctaatccaagcaataaaaccaagaaacaaccactcaaacaaatatcaccatgtgagagcaaagtttgagctctaaagttcatactctgctcaaacacaacaacaaacacccaaacagttccaaactagcttaaatatcattaaaataacctctgaaaacaaaatcaaacaccacttaacatcacagaaccctaattccaaaaatcatgcctagaaacttagcttgaacttaggaaaaataaagagaaggaagctatgatgtttaccttgggttaaaacaccaaaatcttgctagaaaaccctgaattgagctgaagaaatcctcaaatgctgttggtttctcaagggttcgagagatgggattgaagagaaagagaaagtggcttcttttctaattttttaattttttttgaataaaaggacaagtcctaatatttatctaacactcattaattaattgcagattaactaacttaattgaaaatcactaaaggacaaataactcaaatgacaaaagattaatttgcccttgcctaagccaaaaagtatccttaccacctaggggtattttggtcaaacttagtaccccgaataatctcgacatttctaatgtctatctatattgccctgctaatactaaaatactaaattatacgaaaatatgactatattggcctaacatcacgttctactgttatcggacataaaatataaaaaaatatgaaatttcatatatagcacaaataatacacctagaattcaaatatatccccataaattcataaatcataattaaaagtctagtatttgaattaaccctcattatctgctaatttttatatcaaaattaaacggtctttacagtaacacagccactcatgatctagcggacccatggctcataaacccgatcaaactcagtcattgcatggtaggtacgagtgtttttttagcactaaacttgcgaactcgaaacactcacatgatgttcaaccctacatgggagcttcttaggtggggcatattgtaaggacattttgtatttttcatactttaagatattatattctatttttttaaaaaaaaaataatattgtatattatagttacaatagatattctgtcaagttttgagaaattttgaatactttaaaataacacaaatattttaaaaaataaaccccataaagttttggagaattacctcgtatactgtttttttaatatattttttttcaaatttacggnnnnnnnnnctaaagtggttgcagcgctagttatagggatttctatgtagaattcc

SEQ ID NO: 119495 - DNA, 4029 bp, Cannabis sativa
ttccaccctttttgattcgtcgcatagagagttcgttctgggggctgctttttaatttttgactattacggctcaatcgtctactccggctccggctccggctcccaccagcgacggtgagttctcgcagttttttttaacagatttgaattattaattttgattatatatgtcagtgtagccatggtcaatgacgaattagggttaaagaaaaatgggtcttgaaaaatatgatgatgcattgttgatttctctttaattgaatattagggttttgtttaatcaaattgggtactgtatgtaataaagatttgattttttttttggtaaattttcaggggtaacgatagatcaagggattacatgcctgttgatgttggtggctttggtattgacatacctaattcactgaagacagattatttgaattggggttggattatatgttgtgtgatttattcatgaaattggggcaaaatttatggatttacataccaattagtgttctgatttagacaattttttgattgtgctgttgaggattctattctgtttgatcactataaaaaatattgttgtaatatttatatttaacgataagattttccctgtttttctctctagcagctgaagctgacgccatggccaaaactaggtcgaaacaacaaggaaaatcgaaggcttctgtgtcaaaaccaaggaagaagggccctaattctgaatcagatgtcattcgcactaagaagatggatactgtgttaggaattgctcccctggagctttttgaagaagatgaggaaccagaggaagtgatggctgagtccaagcggtcgaacgggctccaggatttgtttcaagctcctttatctcctactgcgtctctgaatgagatcaaatgagcggaggaggctagatcaaatttccttcatttcgtgcacgccaataaccaatgtaacagtaacttggttcagggttagtcctcaatccctcctgtgcttagatctggatcaattgttaagaatttagaacagtcatttaatcgatctgagaggcctaataaggtcaaatcaattttgaagatattgaagaagagattagtgtttggagtccttccattttgtgctatgtcttagggtctaatccccctttgcacattttggagggatttgcaaaaggaatatgggcagataaggttgacaaggttaaaatgcttgcttatggtgtttttcttattcagtttaataccctggagattagggatcaagtattgaatggaggttatattttctttaacaaacgcccagtgatcatgaatccgtgggatcctaacacaaatttcaggaaagaggatgttaaacaggtacctatatgggtgcaacttgaggaccttgagctcaaatactggggccaaaaatcactcttcaagattgttggtcaagttggtaatccgattatggtagatagtgttacaaaggagcgggaaagattgaactatccaagggttctaatcgaggttcagatgaatcaacagcttccgaatatgttggaattcgaagatgagtttggatcgaattgtcttgtggggattcattatgaatggaagcctattatttgttcaaactattctggtttaggccataaaatcgaggactgcaggaatgttaataaggcaaaacaggaatgggtcattaaaaaagatcataggaaaacacaacctgttatagatgctaatggttttcaagaagtgagcaaaggaaaaagagttcaagatcatgggcagacttcgactacaaaggttgagaatgggttccaggtactggctaataatgaagagttggagaatgttgaatgtgagcttgttgcagcatggttcgaacctaatgcagcaggtaatgtaaaggacaacacaagagggggggggagttccctctcttggtcatggatagaatcatagtttggaacgttcggggagccaacaactagtaaaaacaacagtcaatcaagcaattcattaacagtcatactgctggttttgttggtcttctcgaaactagggtcaaggttcacaagcttggaaccttgtacctaaatgtgtataagggttggtgtttttcattgaatatagcttggcatcaagggtgtaagatagtgattgcgtgggatcctagcaaatttgttgttgatattctcaaatgcactagtcaattaatgaatgtgagaatttctgtagctgatggtagtttaaatagccatttgacagtggtttatggggccaatgataatgaaggaaggagactcttatgggctgatctgtgtggtttgagaactaaggaaaattggcttataatgggggatttcaacgccattttagccaaagaagaaagagtgggacatagagtttgctatcatcctgatacaaactttatacaatgtgttcaacaatgtcaacttgaagatgttaaaacagcaggctgctactttacatggtctaataaacagcaaggaagagacagaatatgttcaaagattgatctaatcttagccaatcaagggtggctggaccagtatccaaatgctgaggcaatgttcctaaacgaagggacttttgatcatactccagccatcttatctttacatccaaggtggagaagtgggaaaaaaccttttaaatattttaggatgtggtcttctcatcctaattattttaataaggtttcggaagtttggcacaaggaaaagagagggactagaatgtaccaattgataagcaagttgaaggagttaaaggctacatttaaatagatcaatagagaagggttctccgatgttcaggccttgtttgaacaagcaaaagctggactcaatgaactacaagataagctgcaacaagaccctttgaatactgatttacatgaagcagaattaaatgcccgagagaagtataatgcggcatttaagaattacttctactttctccagcagaaagccaaggctgcttggattcaaaaaggggatagcaactcagttctctttcatgcaagcatcaggcagaggcagagacaaaatcaaatcttgtctattgttagagaagatggagtgcgtgttactgagcctaacaaattactgaggtcttcatcaactattacaagtccttgcttgggtcccaaatgactaatagaacgagaatttctaaaagggtgatacttgaaggaccggtactagattccacacaaacagctctactagtcaacaagttcactaaggaagaagtcaagaaggcgttatttgagatacctggtgataaagctcctggaccagacggctactctagtttctttttccaagacaactgggaccttgtgggagatgatgtttacaaagcagttacctctttccttgaatcagggaagattctcaaggagattaattctactattctgacaatggttcctaaagttaaatgcccttcttcggccaaggattttaggccaattgcctattgcaatgtaatatacaaagttgcaacaaagcttttgtgctctagaatcaaatttattctttctagtttgatttctcaaaaccaaggagggttcatccaagggagattcattggtcacaacataatgatttgtcaggatttggtgaagcactatggaaggaaaactaaaaaggccaattgcttgatcaagctagatttacaacaagcttatgacaccatagagtgggattttgtggaagagatgttgaaggcactcaaatttccacagtctttcattaatttggttatgaactgtgtgaaaactccaagattttccataatgttcaatggctcagtacatggcttctttgaatctaagaggggtctgaggcaaggggatcccatgtctcctctcctctttgtcattggaatggagtacctttctagaattctaaaagttattggcaaaagagaggttttcatttccatgagagatgctcggagcttaaaataaatcctctttgtaaagtccttttttggcaagttaggtg

SEQ ID NO: 119496 - DNA, 1660 bp, Cannabis sativa
  modified_base (160)..(161): a, c, t, g, unknown or other
aagttattttgaacgaaatttaagcagctaatctttttattttacccttagttatccttgatttgaacttaatatatattcttcctatattttttataaaacacagtaccatcatttttattaaccactacaaaaaatcttatttttagtcacaataaannttgtgactaaaagtgaaaaaattatgactaattataaattactatttcaatgttatgactaaaaggtctacgactaaacgtaatagtcacaaacaggctcagagcttccaaatacaaaaaatacattcacccaaacattcttaataaacattccaaattatcatttgattttgagtttctaggttaaacacatctcaaatattagtttatactcatacaagcttttttatgtggttggtgtgtattgataaatcttagtccatgagtctcggaatattagagttgttcaaacttacaacaatggaggttcttatggttttatcagtagagttttggcttaattaaaaactaaaatcaaatcattttacagtaaaaaaaaatagcttctagggatattggcggctaaatcacctaaattttaaattttttaacactattaaccacaaaaactgattttttgatgacaaagcataccgaactcacattatgttttgctctttacacttttgtccaaaaccctcagttaagtgccacggtggactgcctatgtgtacacaagagtatacgtggaaaaatttcagtagtccacataattttaattttaaaaataataaaaatcatttaaaaataaaaaaacaatttataaaaataaaaaattagaaaattcatttttccatttttttttctttttcttttctttcactttcttctcgaaagatccagaacccctcccccccaatccttcttcttcttctgccactactaccatcaaaacattgaaacccctgaaaccaccatcacgagtgaaaccacctacaatcaccatcaccacccgaactccttctctctcccaccaccactgcaaccattacaccactaccaccaaaaccacgaccaccccaactcctctctcccaccaccgcgaccacaattacactaccaccacaaaaaccacgccaccccatctcctcactcccaccaccaccaccgcccttatatttcttgggtctaaacatagaaaaaagtaaaaaaaaaattaataagcataatttttttgatagaaccaaataggcatatttatacacaaagtaataaaaaatcaaaaaattaaatacaaaccagatctcgagattgagggagctcgaccaaaatctgaagggaggagccttctgattctattggagaaggtaaagagtggtaatcgggtttctttgagaagatagagagtggttatcagagttcatgtgagagataaaggaggaggcgaccatctggttccgtgcgcgagatagaggggtggtcggactggattccgcttgggttctgtgggcatcgactgtctcatagtctgggtgctgtcggagttctgttgtctttttgcttgggttctgtctggtttggcaaatcacagagaagactgccattaccaccatcagaagaagaagaaggtttagggggagttgggatctttcgagaagaaagagaaagaaaagaaaaag

SEQ ID NO: 119497 - DNA, 1913 bp, Cannabis sativa
cataaaccaagaatttcagttatatagacacactttatatagaatagatatactagatagatgttacgtgccaagtcacatatgcataattttaatatcacaatttttctttgattttgtcaagtgattctactaggagtgcatggttaacttcttggtcgcaggtcaatcttctgtgggacgaaggttctagttctacgggcagcatagtttcataaccatatgccatagcaaatggagtttgtccggtcgctattttttcagttgtacggtaagaccataatacttctgggagttcttccagtcagttcccattaccatcttcaagtcatttctttaaagtgtctttaagtgtcttgttgactgcttcgacctgaccgtttacttggggatgtgctactgtggagaaactcttcatgattccatagtttgtacaaaaattagtgaacaattgactatcaaactgtgtaccattgtttgagactattttgtacggtagtctgaatcgacatattatatcttttaccacaaagttaagtacttttttggatgtatttgttgccaatggatcgacttccatccatttagtaaaatagtccactgcaaccactgcgtattgtactctccctttacctttaggcaattgtccgattagatcaattccctaaatagcaaaaggccaaggactttgcatctaagttagttctttgggcaatgcacgaggtaactttgaaatctttggcatttgtcacatttcttaacgtaggcctttgaatctccaatcatggtcggccagaaatatccttgccttagaattttctttgatagactttgcccggctgcgtggttgccacagaatccgtcgtgtacttcagacaaaagtcgtgcaacttcttcttgtgtaacacatctgagtaatagtatggagaatctccttctatacatgactccttgtacaatgatgtaccgtgcagcctttctcctcatcttccgagcttcatttatgttacttgggagttctccagtgttgaggtaggctgctattggcgtcatccagttcggagatgtgtcaataatctcaatttcttccgtacaagtgatgctaggcttttcaagaaattgaatggggattagattagccttatcagttatattgctgcttgcaagtcaggctaaggcatcaacagttgtgttttcttctcttggaatttgcttaaggacatagctcttgaattgtgcaagaggtcgtgtattttgcttagataggctatctttttttctccccgagctttgtactcccaagatacatgatttactaccaattgtgagtcactacagatctcaatatcttctgcatgtagttcccgagcaagttttaggccagcaatgagggcctcatattctgcttcattgttggatgctctaaacccaaacttcactgccctgtgtaaatgttgctcccaggtgtgataagggcaatccctgcaccggacagttgatctgtagccgacccatctacatgtaacttccaggtaggtttgtcttcgttgttgctcggctgaggttcttgtactggctccgggttattttttgaaatgctttcttctttgcccgtacactgaactacaaaatccactaaagtctgtcctttgattgctgtttggggttggaaaattatttcatactggcccaattccactggccatttgagtaatcgtccagaggcattagatttttgtaataccttgtgtaatgattggtcagtgtacacccaaacaggatgagcttgaaagtaaggcattagcttccttgttgctaagattaggtagtaagtgagcttttttattagcagatatcgtccttcagcttcaacaagccttttgctgatgtagtagatgttggaaattatttta

SEQ ID NO: 119498 - DNA, 1819 bp, Cannabis sativa
atttatataaattttatatccattattaaaggcttaaaatgtattaatttgagcctttatcaccatacttttcacaattgtagtatttttcatcaaatttattgttattctttgattggccaccctgttttacttctgagctccacctatttggaagcttccatgatgataatccttgtcatcattttttctagaatttctactagccttcggtaggggcctacctttcttatcactactaaagagtgcttcttcatcactccttaatgagactctagatgtttgcttagctaacacttcttggttagctagcaagttttctaatccaagaagagaaggttcgcttggccaaccttatattgcagcaataaaagttctaaattttggccttaatccatgtataattattcttctaattctagcgtctgacataccagtagcagaatctaatgcaaaaatttcacgacaaagagattttaccttggtgaagtattggttgatcgtcatgtcgcgctaccttattgagagaagctcgttctccaaaagttgcaatctcgtatcattcttcttggtgaataataatgcaaaagtatatgcttccttcagtgtcttcgttgacctgatatgctccaacatttcatcttcaacatggctttgcccgcttcaaccttccatctcttcaagcaaatgcgtcctccggttgtgtgacttcattgccaccaacgatcttccacaagtcttgaccttggagatatgcctccatgtgcattgaccacgtacatattgtaattttgattgttcagtttcttaattccgctgaacacttgaaggtcactcatcgtgcaacctttgtagtactaaatcacacacgatcactgtaagaaactcaacaaacaactctttgcgtataaaccgacccaacccggctcttatacaactttttgagcaacacaacacgtgaaaacataattactttattattgtaaaagcaattacacaaagacatgaatactttatcttgatcataatacacaaagtactcactctttttatttactagacactcacacttaaaggtttacttgcatactatttgatgggacacttttagagttttgttaggacttagttgaacacactatgacacgctttacttgtacactcaagttatcactaactcatccaactctcctatttatactactcaaaggatggtgcattattatgctagaattttagcaaattgtcattttgttagtctaaaattttcttgaaacttcttatgactattaattctatataattttaaataatttcataatattacgaaaataataaaaaattcaaaattctttaagaaaaggtgttaatcttttaacataaccaaacagagcattgacaagaaagaactaggttttaaccttacaaataaagtgatcacgccctctgagtcaccttcttatatcttatcaataaagtgaatgataacattactatatatcttcttatatgtatatatatatgatgaatatagactattggcattttatattcattatttgaatttgaatcatagcgataattgtgtccctaataatgatttcttatctctcggtaaacagtacttatattatttctttaactttctggtgctacctattgtgttcttattattattattataatgtggtgggatagtttaatattagccaattgaagattggcacaccctataattaaccccacagacaaaagttagcagctaggaatagaaacaacaaatgaaataaaatttgcaagagtgagagagagagagaga

SEQ ID NO: 119499 - DNA, 1190 bp, Cannabis sativa
  modified_base (50)..(52): a, c, t, g, unknown or other
tgcttccatttcttgtggccgacagcagccatgtataggatgagacatannngctctaacaatgccatttgaatctcttatgatagccccaaaaccaattttgttgctggtagcattgaaagcagcatccatgttcaattttagacagtttggagaaggaggttgccatctattccagctggaaggtgttgcagcaggagttaaaccagcaggaagatgttgctgctgtaaagtttggaagctgtgaagaaagctttgagttagccaaaagttacagtcggctgctgagctgatttggcatgaaggacactgtttcgatcagaccaaatagaccacattgtgcagaaaatcgtttccagctcgaatttggtataacattctgatatctgaaacaaaaagtcctcagttttcatggatacaacaactttgttattgaaagcaaaaccaacaagtttccaaactttcctcgcatgcttgcaagcaaacatggcatgtcccacagattcccaagcatttagacataagctacaagaggccgaagtgagagatttcttcttaaataattctgcagcaacaggtagggagttctgtatggccttccacgcaaaaaatttaaccttagggggcaacttaaggctccaaaaagatttgggttggaaacataaacattagtgtcatctgcaatggaacatgcaaaatgatatccagatttcatattatattccccacccgtgaagtgccaaattcaataatctggtgatgcatgattagaaagaggcatagagagaattcgttccacatccacagttgaaaaatcatagtcaaagacatggttattaggacaacccgtgtagtatactggggtgaaaatagaattcccaggcacccatggatcagtagcacaaaagatgttatgtccatctccaacttttagtctaatccatttctttaatagctttttaccccagcaaattccttgccaagtcagagaggacataccacaacattctgtagaaatgaaattgttacgagaaaagtatctacccttgagcacacgacctagcaaagagttaggattttgaaataaccgccaagcttgttttgctaaaagagcttggttgaagtgtataaagttttgaaatcctaatccaccatccaactttgatttacaaagaaatttccattgtttc

SEQ ID NO: 119500 - DNA, 963 bp, Cannabis sativa
  modified_base (931)..(937): a, c, t, g, unknown or other
atttaccgaccaaacaaatagattgatcaaattttcataaatgattttgttatgacttttagttccgacatattttctaatattttattattattttttttatctaattactaaaattttataataaaatttagattttaaagtctttttttggctaattagacttgaaagttattaaatattaatataaattttacaaatcactcacacatgaacaatgtaaaataacacacaattttttattttattttatttttaaaaaaattacaccaaacatatagaactttgcaatattatgttgtgtaatctatgtataaaaagttggtaattctaaatatagttcatcatgttcgacactctttaactccaaataatactaaaaatccaaattggcaggtgatagtggaaattggaaaaggtacaaaattatttatgggactttattataaatatataaaataatatataggcttcattaaatgtaacttcatggaggaaataagtttaaacttagaaatactatacattaaatgtggatcctattataaggaactaaagtgatgattctattttaagctacactttttagttacaatttacaccttgcatttagttaaataattataactacttctttagggtacttttccaaaacactgatacatgatcagatccatttataaaatataattattaaatgcattttttaaatattagtagacatatataaattaatatgtataaggttgaaaatgtttattttataactttgttatgcttctttttaaggaacatgtttctcactaatatcaaactacaagacagattgtatagactgtagtaacttatttaaaaagtcagtcagagtaaagaagatgccaattgaagcaatgtgttacataaaagataatatatatctttatatattaannnnnnntatctaacggcatttcttggtttaac

SEQ ID NO: 119501 - DNA, 951 bp, Cannabis sativa
ttttatataatgaagggtatttaaggtattaaaaagtaaaaaaggacatttgctttattattttaaaaaagagacattaactatctataaagttaaaaatagaaccatttacttacatttctccgtgaaaagtcacatattttataaacaacttctgttagtttttaacagaatttttaaaaataatttatttagtcacaacaaattctgtcaaagtcacaagaatttctatttcatagacatttatataataggtaagattagatttaacttttgctgaaatattttctacaaaagcttcaaatatatgctactgttagtaataatgtaccatgcaaatgggattcttgcgaacatgaccaaaaccaatgctcctagtgaagaattcatagaaataccaaagggcaccagtacctagtaccttgtgattgtaattaaatatcgagttgaacacattttaatttagtaactatctatatatatctataaaggagaagtataagacggtgacgtgatagtctaaaaactctagaaaataatatttctatttttctctttttttttctaatttttttattaaaattaaatattttaaataaataaaaatctataataataaatatatgcagttacatcaattgtataaatatatttagatttttttaatttttttttcaaaatatctaattcttaatttttttttgacgtaggtatttatcatttttttaatataaattattctatcctgtttctttgtattctattttttgtattcatatacacatatgaagcataacatacgtaggtatttatcatttttttaatataaattttctatacatatatatttttataaaaatctatatatatatctataaaggagaattataaaatggtgacgtagtagtctaaaaactctacaaaatactatttattttttctttttttttt

SEQ ID NO: 119502 - DNA, 1928 bp, Cannabis sativa
tttatgtagttttcttgttgtttaagtgttgtttctataaaaaatcataaaaatatatataaaaaaaatatatatcttaagacgtaaaaatgtaattttttttacaaaaattgtgttttatgtatgtaattttccctattaataaaggtatgtgacaatagtcccgtgatccgtaaggagaaataccgggtaagctatgcaatcccacactgcttggacaaagtcaagtgggatgatttagagactatgtaggtattggactgcacagttgaagataacttaaatggattgattggtagtacctatatcaacaaggtgcatcttattttcccagaaagtgtgcgagtgaggacaaacttgagtataagagccatcattctgtgggtgtaaaggcctaatggagccttgaagcggggaccttacaaggtaacaattttctatataattattttaaatatgttattattgagtattatataaggcttatttgtactgcagatccttaaatattttggcaagttggtctctaaattttattttttggtaaattagtcccaacactatataagttttggcaagttggtcctcaaattttattatttagtaaattggtcctcaaacttttattttcttaaatacataaagccatcgctcttaaatgatgatattttatttattttaatagttttatattaatatattatcaaattatataaatatatattttttatttatatgtattttttcaaatatatcaaaataagaaataacaattgaaaaagtttaaataataataatattatttttataaacttgcaaagtaaattatatttaagttttatttttaacttatactcgaacccataaaattttatcatcattgatgccaaatttaataatcaataaatatatacagtcaaaaaattattaaaattataatactacatattcataaatcaacaataaaatatactataaatgctaaaatataaaaatgtaaggggctagagatctctctagccattatatgagtccactagtatatttatacttttttttttcttattaataatatatataaataatgtatattttaaatagtttcttaaaaaaattaaatattataattatacagtatatattatatgagtacctaaaaataaaaaatattaacataattatttttatcaaaatattaaaattaaaaaaattattggaatttaacacaaaaaataaattaaagtgtgtaaaataaataaaaatcaataaaaatattaatatctaatagtgaagacttaatattgccaaagaaataaaagtttggggaccaattcacaataaaataaaatatgaggactaacttgttaaaaattatattatttggggaccagtttgcaaaaaaaataaaatttggagaccaacttactaaaatttatatagtttaagaacctacgttacaaataagcctatatacaaatatcataaaattctaaattcaataatgtgttgcattgttttgtgagttattattgccacataatatttacgattaatatgatcttaaaatcttatataaggtattctacaaataaattgttttttttttttacaaggattctacaaataaattgttagttgttaaaaaaaatagattgttgttcacgactctctaaacaatggcaaagatttttagaggactttaatgcaccaaatgtcaaagaagcattattcagcattcctggatgatagggctttatataaatttttgtaaactgtctaactcaaataatccgcttaaactaaaccaaaataatccgataaaaattacaaatcgaaaaacctgacgaaaatataatctgcccaatctttatattaggcaggttaaaaataataccaaccagcctaatcaactcgaactaacctgacca

SEQ ID NO: 119503 - DNA, 620 bp, Cannabis sativa
  modified_base (60)..(66): a, c, t, g, unknown or other
tttccaaattaatcacaaccattaaatagtaatccaatggcttaaaaaaatgtaaccatnnnnnnnacaataaaaatgtaaccattgaaaccttttccctttcaattatatagattaagtaatcacttaaaggcattttatctttttgaagaatgtagtctttactatattggtagttgaaaaaaatcactttgtggtagctataaaaaatagaagagtaatagaaagaattataattttatacataagtgaaaaaatctaaaatggcatatcttacaaagtaaattaatattattagagaaaaaaataaatatcttaaaagaaaaaagataacaaatagattttaataaaattaaataaataaaactaaattaaaacatatcatatttataattttagtttgactttgtcaaactagatctccatgtaaaatgaattatataacccaacaaaagaagaaaaaaaaaagcccaaatagcatatataaccttaatcacatctaatatatctagggggcaatggcctctatatgccatattgtacgtccgcccgtgcgtgcaatgcacgtataattagtttttttttttttaattaggttcaattaggtgatgtcaagtgta

SEQ ID NO: 119504 - DNA, 2416 bp, Cannabis sativa
ttttcttttacaaatgctattcttttccataaaactcaaacaaaatatttttaatataaaatatatcacattaatatgaaataaaaatctaattaatttgtaatttttcgaataaaaacaagggaaacttacaaaaacactggaatttgggttaagttttacaaaaatactatcacacggaattttttttcaaaaatactgtgtttttataaaacaacagtagaacacacacaaaaaaaaaaacagtggaacaactaaaaaacaaccgtagaacaacagtgaaaacttaacacagtacacagtataaaacttacacagtaaattatttaaggtaaaaaaaccaatcttataaggtgaaaataaaatatttatatgatattttttaatctaaaacctaattaaaataaaataaatacaccaatataaaactcacactacatcaaataagggtttcaggcgcgacactatcaggaataataaagttttgttcctaatagtggtggtatcaggcgcgacttatcaaaatcgttccggataaaatttattttattttaaaaataattaaataattatctaaaatgacttatacctttatcaggcatgaaatctttgttcctgattttttttactgtttggagagagtgagaaataaaacacaaaacgatccatttgagactcacaaaatctccgccctttcatctctgatcctccctctcatctccgacccagcacctccgccctccggtcgggcacacaatcaacgatcaagctccggtaagttctatctctatctctctcatatctctaatatatatatatatatataccataaaattttttgggttattgtgtttgcaggggagctatgataatgatcactggagttgtgggcttcgattttttctttcacctttgattttgattttagaatgttataatattatcgctgactaatttggctatcgtattgcatttagggtgttagctcataattttaagctgaattctctgcagctcttggctgaggacccatcttcaaagcgatttaagtcacacaagactaatgtgaggcgacttatgagagtgggagatgtactcactatagttgttgtagtaggtaatgttgtttattttgtgtttttactagaattcttacttagtatcttggttttgttgttaatgtaaaatgtagcgggggcttcatctcacatttacctttaacatttatgaactctttttattacttttgttagtatgaacatttatgaactcttttataatataaaaatattgtttagtattaaatatgaaaacaatgtatgaactcttttagtattaaacataaaatatttaatttttaaagataatatttgatagaaaaatgtgatattaaaaaaattcagtatttaatttaatttaaataaatttaattattctaaaaaaatggcttcagaaacgaaaatttcgttcctgataacaaaacagtcatttctgataatgtgtaaaataagttgctagcctaattttttggaacgatttttacttttcaggaacaacttatttttgttccagacattttagcattaggcacgtcgctatattttgttcctgatattgattttcaggcacgagttatcaggaataaaatattaggaatgactagtcacgccaaataatcttctagaacgaatttacaggttttctggaacaaaaaaagtcgctcctgatgatagtttttgttgtagtgtcaatatataagaacacataatttcatgagttataagaaatttttctaaccagtattctacaaaacataaaggcacgtactaggtacttgatatttgtactctttttttttactaaacaacatgcataaactataaatgtactcggtacgtgatgtaacgtactccactaccactggacaaatacataaaaaataagaaggactgaaaagacaaaaataacctcagtctgacaacatggaccccctctctgcagtacgattgtactattaactaccaccaactgtcatttgattaaatatatttgtattttctatttttaaataaaaaaaaattgacaaatggtgaaaaaacttacaatagccagttgtcaaataaataaaaaaaattacaaaaaatattaaaaaataataaagtacataagacccactatactgtataataaaatacaattcgagattttacaagatatgtacaaaatttgccttaaaatataatcgtaggcaagacaccaacacttatagtatttctcatatgttttaaggcaaacaaaactttaaattagccatcatttgaatgacgagcattgctattaggcaccagtggtgattagcaccttctcgacatgtcgcgttgcgattggttagcgatactctctaaaagctattaca

SEQ ID NO: 119505 - DNA, 1996 bp, Cannabis sativa
aaaatactcttagtgaattaaaatttaaaacttttgtcctctatcatatatattatttagcttaaccattacatcaaagttaatattatgcctatatatgtcataactaaatatatatatatattttttttggatttttttgggtgactgtcctgccctgcttctatatgggtctgccattgcgtacacttgcaaagggaagggagcatgtggggtcatttgtcccctcttaactttttattgatataaattttgtatataaatttttgaatattttatattttgaccgcataaaaataatttttttcatctttgtcattacagattttatatttatctatataaaatttatattttttaattttattcttacatatatttatttttattcacatagaatttgtatttttttaataaaaattatatttttcattattgcttcaaaaaatttttttgcccctactaaaatgttaggctagctccgccacttcctgcataccacttcgtataaaaatggtggcttgaaattttttatggtgcgattatgatttgtaattttgtccaactggcgatgcaatgtaatctacagttttaaatttaataatttcagttcaagatacaccacattatatattacaaagttactaattttttcagttttcatataagaacaaatatatgtaatatatgtgtatattacattattttttagagataatttaatataataatttgatgattagtatatgtatgttataatgttaaaactttcatataatcttttattttgtattgttaaaacttcattagattgatttttaaatttttattatattatttgataataataatagtgtaaatcgtttaaattacacttgatttttgcaatttcaagatcttttgctgaggttgcaatttgaaaaattacaaaaaaaatatatatgcaatttggtttaaaaaaaaattacaactcacactacccccgtaccgtgactaccttaatggtaatatttttgagtttatataattataatattatataatttataggccaatattataaaataaaccaacaaggcaaaacaagtacataataataattaaaaataaatggagttttattggtgaaattctcaaagtccaagctgttttttattattatttttattttaaaaaaatatattattttgttttaatatatatattttatatttggatgtagttgtcaagatgtgaactgtatattgatgataacaacgaaccaccgtccaaatatttaagattcatcactttgtaaaacttttcaaaaaaatatatataataaaaagaaaagaaatacaaaaagttaattatatatatgattaatattattttaaattctatgtttgtaaaaattattagttgaatgatctgttttattaaatgataaattatattatatatttttcaaaatagtattaaataatattttaaactgactttttatcaaataataataataataataatagaattatctttaagttgattatattaaaaataaaattgttaaaatttgagttcaaatgtcttatttgtaccactttagaaaatacataatctattttttcatttaacaaaatagaatgttcaattaataatttttacaaaacacatagtccaattgatatcaaaatatatatatatatatatactaatataatttattcattatttcgaagagaattcttatttacacactaaacatttataaggattaaagacacccataatttattatttttataaaatataatatatatttttaaaaatattatttttcatcatcctcacatttttaaaaaatacatatatagaataaaaataacatatattttaaatatcaagagaaaaaattaaaaaaaaaattatataaaaattttattaaaaagttatacataattttaaaaaatatatataaaataaaaaaaatcattaaaattaacacaaaaacaat

SEQ ID NO: 119506 - DNA, 6644 bp, Cannabis sativa
  modified_base (46)..(46): a, c, t, g, unknown or other
  modified_base (3146)..(3146): a, c, t, g, unknown or other
  modified_base (5534)..(5535): a, c, t, g, unknown or other
  modified_base (6369)..(6372): a, c, t, g, unknown or other
tctttattgatatttgaatagaaaagattacattgaaatagagttntatttagggcacaaagctcaacaacttcgtcgtatattctgttactgtcttaccctcactctgaaccagctcggtaaattcttttcgcttagcactgtggactgcctcattatattacttggctttgaacaagtctcggaattcttccctggtcataacagtgacgtctcgggtgaaggacactaattcccactacacgagcgcatcttcctggaactgaaaggtagcataagtcacccggtcatttccaacgacccgtcatgaaatttcgaatcctttctatcaccgtgagccactactcagccttcattacatctgggcctcctaaaaaaactagaggtgcctgcttacaaaatctctcgtatagtggctccatacggttgccagcaacaggttattctactggtacagcaggaactaaagcagcctgaacttgtggtggaggcactgcaggaggaccttactgcctcaacctcagaatttctttctcttgttggcgaatacgatcttgcatttccgcgaatctttggtcccaatctggaagagcttgaggtgtattttcatgtcgaccgccttgaaaccttccacggcctatgccacgtccatgaggattctatggaatttaatttccctgaccgcctccggtctcgaccctattaccctgactccttgtatttcgttgggcgtccaattagtaggacttagcctgtgaacccataagttaggcaggtcaaatagcaatcacaaagactgaatattgctcttatggattttaaggcaatgcattaaaataaataattagaaactattatgcttcctaaaatgctttactaatcaagtacaatactaaacaagtaaaggcttactgaactgtgagctgagcttttctctgatgatgattgtacatgtcttgacgatcttcggtgacaaatttggtggctctaataccaaaattataacgccctgacacttaggtgtgctacagtgatttttcaattacagtgccatattttctattcataggatttttcttaaaaatcatgtcaaattaaaactttagatttagttgctaaactttataaacttttatacatttatttacaaaagtcgagttcccgtatttaaacttttacaacattatcaaatatattttaatcttgttgcacaatgactacaaaataaaatcctaaatgtcacgaggttgaacactccaggtcacatcaccatgacttgtacaaacaccatcctagatcggagctcactcctgttcagtttttgcctttcctctacctacacatggaaatagcaaatgtgagttaacgaactcagtaagaaaagaatacaacagataatataatgtcgacttgtatctaggcgcccatacaccaattaacaaggcttaacaaatgcgtaagaacgttctttactagggtacggccactttaccacatacactacgtaccagtactgtacgagtgttggtagggtttatttcgtacctcaagtaccactaagtgttgtaccacacacaccctgtacctttccatacttgtgctggtaacaccgtaacatactctttaaacgttacacactataccaatgcactctgtactattaccgtaaaagtgttggtagtgtacgaatcacaacaagcatgcatatatatatatatcacatatacaatatgttctatgctactcttacctcattttcaaattcatgtgagttgagcaacctgaatggaaaacttcctgctggatggatgccctaatcacaccacataaacgggtaaacgacacgcaaaaaccctaatctgggaaatccaaacctccaactaaaggttcttgtatacataactgaaacactacaataccctaaggaataaagaatcacccaacaaaggctctgaaactaacacgaattgatgaattgaataattcgggaaacctgccctattccggttaaccggtttttataggacctgtcaaactggttgaccagtttgcaccagatttcccaaaaaattcaaatattgctcaaaacgtgctcaaaccttaccaaaccttccagaacacttataatgaccacaaacaacataatttaagcaatagaattcagacatacatccagaatcaaaatatgccatggatgaaccaagcttgagttttcaaactcaaacttgtgcatccaccacaccaaatccccaaaccagcaactagaactcatgaaatataactcaaattaaacttagaaacccaattacaaaccaacctaaccataatagccataaattcatcaacttgcatacaagaactaaatttgagcttgaactactaaagaattaaagttctatggcttacctctacttgattccttgttgaatttcaaaaacaatggcgaaggttgctggtttcctcttggtctttgtaatggtcgagcaaaggaaagagaaaaagagagattttcttaatttttcttaattttctctaaaaggataatactcactagtcactaattcttttacttggctaaataattcaaaatgtctaactgccatgctaagaagaagccacctaatccccataataaaatgactaaaataactttttaacttataactttagcaattgaaagcctagggataaaatggtcaaaagccataatcctgctcaaacccgatattctatctatctcaaatatttatcccactaagagaaacgttctagacttacccatgtgactctaacgaccatccaacgtatttttcgtcgtcaccgagtaaaaatcataaaaattacataattcatatgtaacacaaataatacctctagagtttaatagaatctccagaattgagaaattataactttagtgcccacttttaataatgggacccacaatcaaataaattcatgaataattataaaaatatcaaaaattaatggtaattgcctttactaatccatattcgaaaatgcggtcattacaagtaggatttaatagactcaaattcctctccatgggcatgtcatgcattttatgtcaatagtcgatcagagcaagcttgaggaaagcaaaggttggtcatcaactacaagcncctaaatgagttcttagcagatgataaattcccaataccaaataagaattcattgtttgccagtttatccaaagcccatatttttttgaaattcgacctaaaagcgggattttggcaatcaggcatcaaagcagatgactggcccaaaatagccttttgcattccaaatcatcatttctagtggacactcctaccttttgggctcaaaactgccccttccctattttaaaaggctatgaccaagatatatggcccgatattggaaaaggctctcatctatattggcaatatttttctcttttctcctgatgcaaaagcccatcaatcgttattggcccagttggcttctatcactagatcccatggcatcatgttgtctaaaaagaaaatgattactggacaaacgtaaacagaattccttgggatgaaattatccaaacgacaatatgaagcctaaccacccatagcccatgaactactcaaaaacccagatgaaaatctcacaaaagttcaggtgcaacaattcttgggcatcataaattatttccgagaatttgttccccgattgtctgtactaacaaggccactcagcaatatgctcaaaaagaatatccagaatggtcacattaccaaacagacgccagtgaccaacattggggtgttgtccttctagagtaggatgagtagggaaaaagacgaataagtggatataaaagtggtcacttcaaagattcccagctccattattattcaacactcaaagagatacttgcaatcaagatgggaatcacaaaatttgagttctacctcatcggccatcatttcttagtggaaaatgattttgctgcatcaaaaggcatgataaacataagaaataacaagacaaccaatgctcaacctttgagactggcaacattgtttgatcattactcttttgaaataaaacaccttcccagaaaagaaaatattttagccgaccatatatatagacctacgtctataaatatggtctcctcacatccacttaaaaccatccccttaatcagccactacttcccatacaattccatacatatatttaatggcatcattatcatcatcacaaaagaattgctcatttccctgctcattttccgaagatgcaaagctcatcctttctaaatccaaaaagtcaacaaaagaaagggcctttcacagggctatttgtactcacaacgaaattctccccaaacttcgaccctattttaaccagggttttctaattcacccaaagtatccttttgccaatctagtcccctttcggactgcacttctcactccaaaatccatagctcatcttttttggtacctaacatgcatctgtacgatggctatcgaagtcaaaactatggctattcacactactatacagtctttccttgaacaagaaaaaaataaaatatcctaccaaatccaaatggacattttgtcttggtacgctcctctagaggagtgaaaaaaaatactttgggatgaatgggaaaaagtttgcaacaataggcaagtctttgtttatccatcaagaccacatgtagccaacatgatggattgctacactatcttccttatcaatcttaatgcaaaattggacgagaacaagaaaatagttttcagtccaacttttgaactatacggctcccaagaagcatctttcagagaaagttcagagtatagggatctccaagaggttattttcgagaaaaaccagactattctaccagaattttggccaaaaatagaaatgatgtcccatggtaaatgtttccctcagattattcgcgacgcaaagcaaaagctctagaaaaattccaaatttctgaaaaatagtcacaactattcaaagaaacagacactgtaggggtcctactccgtaaaacaaacatttttgaggattcacaatatccatacatggaccaagaaatcattcaggatccctatcccttttagtacaatggactggaatggaagattgttgattttgaatatgatgcgtgtccaccagctggaagagatgaagatgatgaaccatcaggttggcacccacttcaagaggacctcaattatgactcaaactacaatgctgaccacgagccaattatggaccgctaataagtagaacaaagagatttcatatctcttacttgtgtaagatagcaataaatggaaaaattcctaatagtcatgatgtttgtaggaattttttctaaatcgtttgtttgtcggtttgtcaatttttatgtttgtcaatttgtccatttattgtcagagtgtcctttactctgtttgtcattttgttggtttgtccatttattgttagtttgtccttttgtatgtttgtttgcttgtagnnaatttctaggaagtttcctattttgtatcctacctcatgtaaatagatatatatagagccatccttttcattgtaaggggcatcagaaaagctttctactaaataaaatttctattattcctctctcaaaatgttctttaaattttctttaaaagatttctgaagtagtgatagtgtgcataatgagtcgtaccgaagagataaaactgttatgagttaggtatcacttaagtgtgaaggtaactaaacaatctatccttcataatcgtaagtcacactgtagagtcgtaagtcgtgctgattcttgtgagaacattgcttaaattatctttaaatttgataatacttagcttatagcgggatcccagttagagagtcccacatagctaatgtctggaaataaattgtgatatataagatgaatgttttacttctcccattgccaattagttttgagatggaacctcattcaccttatcctcaaattctaacatggtatcagagcaaaacaaataataaaatctctagcgactatccgaccgaaaaaaaaaaaagcgatcgaagtaaagccaaaaaaaaggagccaccaaaaatccaaataaaaacttatccaagagccaaaagtaaaaaaaaaaatgccacttgtgattcgagaatagtgaacaaaaaaaaaatgagccaccaaaaatccaaaaacatcgataaaaaagtagagcaaaagagccacttgtgatcagggatagtgagccaaaaaagagccgcttatgatcaagttgttaaagatggtgagcatataaaatagccaccatcctgaggggggatgttagagagtcnnnnattgctaatgtgtggaaagataatagaatatataagaggaaagtgctactcctcccattaccaattggttttgagatggaacctcattcatcttattctcaaattctaagaatccctaaaccctaaaccctacaatatatatctatatacatatggcatatgtgttagagatattattacaatggaagaaaatcaagacattacaactctattgcaatataatacaagaattaacaaagagattaaaaaaatattacaatacataatataca

SEQ ID NO: 119507 - DNA, 969 bp, Cannabis sativa
  modified_base (50)..(58): a, c, t, g, unknown or other
gacggagattggatccccatgttatagaaaaaaacacagaacttcaaaannnnnnnnnaaaaaaaaaaaagaaaaaatacaaaacacgaacccagtaatattgcccaacccttcttcttcttcttccccagttgcacgaacccaatcacacctctgtctgttctccacccctctctctctccgagcttcgatcagcggcccccctctctctgagcttcaatcgacgatgctcatctctctctctctctctctctctcttcgagcttcaatcggcggcacccctcttgccgaaaatcccaaaattacctctcgtccctcatccctccaaccacccctctctcactcctccgttaatctttctttcaaatgaccatcgaagagcccatctctcttgtgtaagttatatatatatatattaataactttattttagttatttatttatacatacatatatttgaatgatactgatcaataaactgaaagaggttttagataatttgtgttgatgattcttgggctttagatgtaatttttttgagatatggattgcaatgtagttaaattacgttgatttggtaaaaaaccttttctttctttgatttttttgggtggttgtatatttcgaccaacttgctttacattgattttgttattgttctatttctcgatgctgatcttggtttctcgaggtttatatttttgaaactcgattttctttttagttcctttgttagttcccttgacacttttggtattttttttcttcttatgatatgacaactcaaattgagagaattaaaaaaaaaccgagtttgggtttggggaagaagaagaagaagagtaagcggcatgagtggtagcgacaaccatgaatataatggaaatatcaataatacatcatgtagggattgtgctacttggtctatggtttcttgctgaattcaattggtgtcaccatgtggctta

SEQ ID NO: 119508 - DNA, 655 bp, Cannabis sativa
ttttaccattttagaaaatacagagtctattttattatttaacaaaacagagggtccaatcggtaacttttgcaaaacataaggtccaaaatggtatttaccctgtagagtttatgaaactttatacccaataacctacaattactaaaataattattttatttggatcaaacattatatagcaatatacacaaataaatatgacctcaccttaaagattttaatccaatatcaaatacttatactactaaaaataaaaattaaatttatgtcacttataaacttaaaattttaaatactttatcattatttatcttaaataaaataaacgatccttgtacatttgatatttcattggtaaatgccatccatacagatggaattaaatattggaacaagaaagtagatatgtcacttgttctttcttttcacatatagtcactcattattctatcgtgcatgttctaaaattgctgaaacaccctttttttttttcttttcaacatgttcaaagattgctgtttggggttgttggccatttaattgtgaacatatacagtggtcccatcggaaattctatgtgagcgcatatatataatgtatatgttcttataaagtatgatacaaaattaagtgaccaattatgttatgggta

SEQ ID NO: 119509 - DNA, 1799 bp, Cannabis sativa
atatccgcattttgcggattgaattggattggatcgtgcggattggattggatcggatactttgtgaacacccctagcctttagcaactaacctcgatttgaatttattcgagtcgtttaacttgactctgtgaactgatttattcccaatgacatgcatataaggctcgtaaggaactagtgtcaatgtcccttgcttggtaagaatagtaaactcttgattcgtaaaagcaaaccatttgagactattgagagcaactttaattgacttgggcttagtgggtaggagagactccggaagaggatggtttgtagcattataagccttaggtttaagaaagccattttggatctagtcctcatagagtgtagtgttggtggagtggcaataatagagccacttgtggagttatttacggtaaaatccccttaactattaatttatttgtaaaaaaccattcaacctcatattttggtgggaaaaccctcaaaagtactgttccgtttacatttttaaagtgtcgtctgtccaacctcgttaagtcttaattttacccacgtggcaatgacaggtcactaaaaaattatcctacgtgataatattttataatataaaaattaaaatgagtaattaaaataaaaataaaaatcttaagagtaatttgcggtataactccccaactatcaatttacttgcaaaaaacgatccaaccttaaagttttttagatagttttttgcaagtaaattgatagttaaaagagttttgtcgtaaattactctatatattttaaaaaataaaattaaaaacttaataaaaatagtataattattcaaaaaatatgaataactataaattctacttgaatcgtagtttccaacctgttcttaaaggtttggtttgaaaaatttattagtctgtttgatttttaatatttaaaaaactgttatactggtgtagctcaaaaactataaaaattgagaccaaactaatccgtaaacacccctatcgttacccatgctataatgctctgcatttgagatgaaatgaaagttagaactttatcaattggcctaaaaaaatgaaataaaaagacttagtatggtttgaacaattataaatttacaacgtacaattaaagttgtatagattataaaggccgtaatggtgctcactaaacttcaactataaacgttaaaaatacatcatgtatgtatatattttagagtaatttgcggcaaaatttctccaactatcaatttacttgcaaaaaatcatccaaaaaactttaaagtttgatggttttttacaagtaaattaataattcagagattttgctgcaaagtttttattttaattttaattactcattttaatttttattgtgtaaaatatagtcacgtaggataattttttagtgatctgttattgtcacgtgaacaaaattagaatttaatgagactgaacagacgacaccttaaaaatataaacgaaacagtacttttaaagattttcccactaaaatatgaagttggataattttttacaaataaattaatagttagaaaaaatttaccgtaaattaatcattcctaaaattaatactcacatatatgttaagaattatatattttccaaatcgatcgggctcaactatataactacatacattagggttagtatattcatatatattctatacacatctttattgagaatcaaagctagctcaaacaactatatatatctattctatataaagtgtgtctatataactaaaattcttggtttatgagaaat

SEQ ID NO: 119510 - DNA, 620 bp, Cannabis sativa
tctgcacaaataaaatataacaagtgtgaaaatgctccaaacacgattaaaactcaattaaaaatatactaaacttaatctaaaattaatacttaaaataacctaacaactaaccactctcgcatctcagcttcgtgatcagtgcgatcaacttccctagccagatccagcgaagatcagtttaacatctctaccctccatatcaggtacgtgtctctttatctgtgtgttgtattttttcaaatttgttgttttgaattgcatttgcatgttctattttgagatgagattaaggtcttttcgattgtgtgattgtcttctaagatagatttgggaaccacaaattgcgtaatctttcaaattttttgcttggaaatttttggagtagattgatttgcggtagggatgctggcaaatctttatttttgccaaaaatccttctagttttgggtttgatgttagtttctgtcgtctctcttccagcattgttcctgactccctatctggaatgagtgcttcctgggaagtctcatttttggatagttagtctagttgggacctctccaagctgttagaatatattttaccaggacctatatttactaacaagtatgttttta

SEQ ID NO: 119511 - DNA, 850 bp, Cannabis sativa
  modified_base (28)..(28): a, c, t, g, unknown or other
aacaagattacaacataaaaagaccgtnttttctgtaaataaaatcaaaaatatcgtaaaaaatgtttaaaattcttcgaaaccgtacttttgtaattttttttgttgttttatgtttttgtgaaataatccctatcttttttagtaataaagttggtaagaccaagtattgtcctgaaggactaattcaccaattagagtcagccaatcttttatttttatttgattaaataactgttaaaaaaataaattaacaacaattgacagtaaaaatataagaaggtacaataagaatttaattaggacaattatgctcatttactatcctctcttttactttctaacgcaattacccaactcatcttcttcctattcaattaccatgttgcaaatagtattaaaaaaataaatgatatcgaggatttctctaaatattttatattgtattctaggaattctcttcctaaatccttagtgggattgtttttcttttttctagccaagcctgccaaccctctctaggcttaggcgtagcttggtcaggatttgtggttttgctgctatgattaatattgtttctataacatggttttgagtgtcttcttttaggttactacaattagtcttgtctctgtgacgtgattttgttttattttatttcgttgttaattctttttttttcgatgcctcaccatcaaactgtcatgttagtggttgggaataacaagtatactgtagttgaaggggttgttagtgttaggaaaatatgagatatcaatagaagaataacaataagatgaacaaagagaccaagaaaattacaactttatgcaacaaaattacaaggact

SEQ ID NO: 119512 - DNA, 516 bp, Cannabis sativa
ttaaccaattgtgttgactaactttttctatgtatgtacattagcaacaaatttatatatgttatgtagtatacataaaagaaaaacaaattaaaattttattacatattacaatgttggtgttcatttataacccataatatatgaataattttcaattttatttaaaattttcctaacacaacacagtagaaatatttatagagagaaatagcatcgaatctcttcacgataagtaagataaggtggtaaaaagtgtaaagtaggaggtcaaacgattaatttcaccaacttttcattttttttttaaaaaaatttaaatatatgtctatggaagattgaacttaaagctttaaagaactttaaaaagttttaccattacaccgaagtactaaaattattattttaaccgttattaaactatttatataagcactacaattttttttacttttagtcacaacaaaacttgtgatgaaaaagtagaaaaaatgtaattaattataaatcatcatt

SEQ ID NO: 119513 - DNA, 1219 bp, Cannabis sativa
  modified_base (1181)..(1183): a, c, t, g, unknown or other
gtgaaaaaggcttgtaatattttgtgaaaatatttacgggatcccaaaacatgtatcttttggttatttgtaaagtttaaggttactacaagcttaattttcattctgtttcaaataaattgtaaatttcccgcacttatctttctagtaatcccagattaggggattgtggtttcatattcagttagcgtagcgtgccttatcgtttgggcattacagagagacttgaggtcttcccatgtgttgacccaccaaactattgtttttggaacaagggcactccttacgtcacgacctacagttgaggatgggccatccccgcccgtatcacccttctaccctcccaaggataccctctgttgggtttgaatttcccaagaagaccatacctcttgacccacttgtcatgaaaagggagaaggaagtgaacaaggctttgagggagcgtctggaagcataaaaaggtgttggtacacagacaggctattatgctctcggctgtaaggaaagctaaaatctcagatggccttcatactttaacccaaactgggcctacggtagaagtggaggccttagggaagcgtcaagcccccaaggcaggaagtgaagttgtgccattttctaccaaacttttggaccagatggccataaatgccttcgaactacccttggacatttgggcatcgtgcagcagtgtcgacacctttgccttagcccatgttggtaaacaacaggcagttagggtaaagttctaaaatatttccttctcttctttctttttttatatatgcccccgatcatggtattcaactttttatttttgcttattacagtaggtggctttgctggcagagagggcagctagtgaagccgatatgctggttacagagctagagcaggcaagggcagacaaccgcaacctgtgcaatgctaatgacacctttctggccgatcttactgaggccaaacttcaaattgagggcttaaagaaggaaaatcagttgttggaaaccaactatgctcaacagactcgtctcatacgcggtatgagggttgtccatgacttttacagggataccttggagcggatgtttggaaaagaatcttccaacccatccagtagaaccatccctgaacccctagaacatgcaacaggcttcctgttggaatatgttttaccnnnatctagatttactatcatgtatgttatttaacatcc

SEQ ID NO: 119514 - DNA, 1939 bp, Cannabis sativa
tctttagagaagaacgaaggaggcctaggatgctaggttttttgggtgtagccgtttgagcgtgaaagataaagtaatcatatatatatatatgattgatattagggttttctagatatataccgaaacgacctatagtaattggaaagtcgttggttttttttactgaagtcaaataggggctttgactagggtgaaaggtcatatttgaccttggctttttttatttttgttttgctgtgtgtagggacaagcaagaataaaaattcctacagtttttgctacggaccatggaggaaatcttattttcaaatgatcttatttattatttattctaatgtatatttattatttattttggatcttgtcgttgagaattagaagttgatttttttctctctaagaaaagaaatatgaacaaattattgccatgtttttgatagaggttcatattgctagccttggtgtaatttatttatatgattgcttccatactcaaagctttaaatttttgtttgataccttgtttctttattataaacttatgaaaatttggtactttttatattcagggaacaattaatacattgatcattgatattaattttttattctgtttcatacacactgttctctctccgactgtaagtctctccttgaattatggtgtttgtattgttaagttgtattttctttttttttttttctccttttcaaatgatcttattttcaaataataataattgagccttatagaatttagagtgataatgattgtttgttgatatattttgctcatttttaagagctttctattgttagtttcaaaataattgtgcaagtaatactctcaaacttacataatacttaacaatccttattttaaacgaaaaaattctctaacttagctgcatatccccattttttgactttttcattgttatttatataataaaaaagttatatatacccaacagatctttaacttattcgcatctactttaattttttttaaaattatgtattattgatttaatataaaaattatatacaactaatcattatattttttttattttcattaaaccttaaaaatcaaacaaataattaaaataaaaaatatctatctctttattaatatcgactaaatcatagcataccacacttatgattcatcaggcattgcttcacagttcattcgattggtagtgaacaattcttcattagttgtgatatatatatctcctctacttattaggatagtatttatttaaatgtccaatcattgtttataaaagtactatatatcctcaaaatataacaaattcattaagaatttaatataagaaaagagtaaagtaaatccaaaacatttgatcttattgagattaatacattaaattcatcatattttttttatttctctatttcatctatttctataggtctaagaattaaattcaagtgaaatggatgaataatttatttatggagttatttatgtgtaccttccaccaacgttagagtacaaggttaagataacgtttcactatgcttatttatatttttcataaggttttctatatttaaactttcactaatagtacttttctcttattttaattaagatgacatttttcatttattttcgttacataatatttcttttaaatttttcaaaatgcatatattgatccttttaattttcccgaaataaagagtaaatgttaaagtcatatgttgttatgacttatgataatttatttcctcaaagataattattatatgagtatgaatatattgagataaacttacttttattattaataacaatgtgtatataaaaagtttacatacacaattatgacatttttaacaagtttacttttataaaacaaatcgtttaaaaaataatttaaaattagttaccgagtttttt

SEQ ID NO: 119515 - DNA, 1590 bp, Cannabis sativa
tttttttttttttaagaaaagtgtattctttttgaaagagttgatctaacttaatttacgaatctaatatagacacgttagagaataattgaatgctaaatcataaccctggtatgtattaaattaaattataataacattttagaaagtagctagctacatctttcacccaaatatagttccaagtagtatgtctttattactctaaatttgttatgaaaatgacagatttgtcctggcattgatgagtttgaatgactccctaattttaccggtcataaaacaataggaaaaaaagaagagtttggcaagggtcaaataaacattcacactgtttttaatagggttagtaaattgcctttgagttggctatttccttgaataagacaacaaaccaatcagaagtactatttacctttttttcttctgaaaaatggactcattcaattaacaattatgaagatacctttagaaaaaaaaaaaaaaggaagaaaacattttattttttaaattttttttaaaaagaaaacactttattcacacggtcacaacaacgactagccaactttgcttcaaccaacgctgaaaaaaaaaaaaaaaacaacaacaccaattctaaaattattacaaaaagaaaaacaaacaaacttagcaataccatacactatttggtttgctgttctcaaagaatgataatttttttgtacaattatcgaaatttccctctttcctaatagactccagaactccaaaccaatccaacaactctttagaacgagacaccagtgccataatcacagtttagcagttcgaagaaaggtgaaaacaagacaaattcagacgagaagcaagctggaagccttgtttaatagcaagacactcagccattataattgagaacaagccacgaagaaaacaagcctgggaagcaaccacagtaccacggtaatccctgcacacaacacccataccacaccccaggccctcaacaacaccagcatcacagtttaagagcagcacccctggacgggcttgccaagtttgtctcaccctgcttagggttgttcatcgaaactggaaaactgaggtttaaatccggacaacaataatccaaattgatgtagaccgtaattggaaaaactgtttttggtggttcgattaatccagattgtttaccgcgtaatggttcaattgcagtttgtaataaatagttaacacttaaaccagaccggaccgtttataataaatattttatttatatatattatatgactatatgtataatgtatgtataattttaaatttttttatgtgacaggttttttattgcatgaattttagatttttatgttatgtttgacttttgagaatattttttttacttttatttatatgttatagatctattacttaattatcatgttaaatgtatactttaaaaaataaaattaagaacttggtaaaaatagtaattataaaaaatataaataattatatatttcacttaaactataatttcgaaccaaaccaaactatacttaatagtttggtttggtttggtttgagaaatttattggtctagtttggttt

SEQ ID NO: 119516 - DNA, 2180 bp, Cannabis sativa
gccaatgatgttaggaatggatatatctacatgaagcatttccaggtatccaagaccaacattgttgtaacaaactgtcttgaaagtacatgctttgaatctgcaataccccaatcatctccatgttacttagattatagaaaaataaaatattaaaactgcaaacataaatattatccacatatatataaactaagacacaatgacattagtatttagagaatgacttgaagacaacaagacaatatcctgagcgagttttaaaacacagggtctacttgaaattaaattttaagattacataagttgtggcattcataggagtattatgtgaaagcaaaaagttgtcaaaatttgtatccaaaaagaaacatcataataattaaaagtatatattccaaaccatgaatcattctcttagtctgcccaacattgagatagtgaacattttccttatgtagctttaataaataactagttaagtagataaaaatgttaatttagataatagatttatctatacttttctgtgaaatgaacttttctagtcttagtatttagaaaaccaactccatttcttgatgcaaaagccccaagctttccattatcgagttggaattgaacgtttcaatatcaaaaaaaaaaaaaaaagatttaatataattgaatgaaatagtgactataacaagatagataggttcataagtgcagctagattgagtcatgacatcccatagtctaatttcactagtattgttagaggagaaaaaggtaagttgttggattaaaaatctagttaattaagtgccctagagtgcccaacaagtaggttggatggacatttttaataatttacaagaaaaaaaaaatattatatacaatcatcactcattctatttatacaagtatactacaaaatattttttgattaactaagtctagtaaaaaattaccccactaaagaatttaaaagcatacatgtgatcttttaattatctacttttttgataaaactagtaggatgtgcatgttttaggtgatgcagtctttcttaaaatgttgaaaatcaatgaaaacagaacaaatcaatcttcctataattcaatgacaaaaaagaaagatatcataaaaagactacataaaaacaagagtggcagcaaaaaaaaaaatcactctttttaacaaagtacaattgagaaaataattgttgttaagtatcattgagtaaattttactaaaacaaattccagtgtttgatgtgactaacccccaacaagtaatatagcaaatgtgaaaatacaaatgcaaagaaatgtgtagttgaaagtgttcgtaaaggttcctatgaaatttgcaacagacttgttatgttttctcgaaatagactacgataagaaacatgaagcatatgcattcaattaaatcaataacatttcattgatggtaaaattaagcgtgatattcaatctaatttaaacctaacttgttttataatttttttttatcatgtataagaaaatcagcttatacctcaaaatgcagagtgaagcgagagagagagagcaagagctgtagaaaaaatcatttaaaaaaacaaaagattaaaaatcaaataatatatatgtgtgtgtgagagagagaacaaacaaaatcaatgagtgaggctaaaatgtcaactattgttgtgttattaccctctagatttggagagtgatttgtttgatacacagttgaaataagcataataagaaagttaaaataaattcatgaacaattatattgtaccctccaaatggtaaatttggtggagaaggaccattaacgtaaatttatcaagtcaaagaataaaattgtatttatctattttttcttgtgtttaatcatttgatgaaaaaatatatgacagtccgctacagtccatgccatcccaaatacacaaagatttttaatgaaaaagatgaaaccaaagctaaaaaaaaatatatacatcgcattcgatatcacaaaaacatgtgatatttacaaaacaaaacaagaatcatacacccattttaatatataaaatatagagaagaacatatattaaaatgaaatatatatatatatatatatcatattcatcatacctaagatcaaagcttcaagatttggataaaaatggaggttgagaagagagaagg

SEQ ID NO: 119517 - DNA, 599 bp, Cannabis sativa
tttataaaaacacagtatttttaaaaaaatttccgtgtgacagtatttttgtaaaagttaacccaaattctagtatttttgtaaatttctcataaatttctctaattattaattaatctacattctagtctcatgttttaagatgggagatcttttatttatttatataaaattataagttttttctcacaaatttttcattgttaaaataaagatgcaaacaaagaatttttgacccattgtcacttttatctttcattcctcttttttatttatattttcctttcaactgtctttctaagaaaataataaagaaatttatcaataggtaaataaaaaaaagttcaatacataatgacattgctcaatcaataaatcacttacagtgaagcatcaaaggagtacgaagattgatacacttctaatctaaacaaacatgtaacaaattatattaaaatgactatcaatcatacatcttacaataaaaattaagtattattaacaacctctcttattcaacttaaaatgaaaagaaataacaaaaccaatagccatcgcattaatatattaattattaatttgttgatgatatatatatt

SEQ ID NO: 119518 - DNA, 715 bp, Cannabis sativa
tatggtgagaatagaatcatagtatctttcatcaaaagataatttattgttcttttttgaatcggaatttacaataaaagtataattattataaaaatacagtaataattttgtaacagttggtaataattgtttttttttgttttgtttaatatctgaaaatattgtttacaaaattttaataaaagattataaagttacaaaaataaacttttaagtctatttattaaatacctttttttagtacttttttcttcaaaagtttatttttgataattctgatcctattataatttaatgaagaacaagaatgaaaataaataaatagagataaataaataaataaagtaaaatataattttcgcaaaacttatttagtctatatattattgtctttgtaaagagaaaataatgaataaacacctctattttattcaaaaatcagatgtaatatatttttaaatattacttaaatatcagtcaattcaagctaattaaaatgtctagtgaacaaagagaactaataaatctcatttacaaaccttataaaaaatcaagataggattttattaaagtattatgtattatattctttataaaaaaactttttaggttgggatatgtttaattaaaaggagaaaataataatggaaaattcatatcaacttcttaaaagaagtgtattgatgtacttttatctgtttcaacatttaag

SEQ ID NO: 119519 - DNA, 747 bp, Cannabis sativa
gttccgtgggaaccaaggcagagggggacgccagggttactcttatcctgagtgtccaaggtgcaagaaacatcatccgggagagtgtaaccggaagacatgactagaataagtccccgtgttatttgtcatgcattgaacatagaccctaaggcggatccagacagacagaagcagagacctctagatccaatatggtcagaagcagtaaaaacaaaagtaaataagttagttgactgctatgactcaggacacttaactccacaaatgttttcatacttgtcaggtgtcaaacaatgatgttcatgttactagagttagtttttaggtaaacactttctaaaagtattggactgatggactcctcacctatttttcgtattaaataaagatatttatagttttctttttaataatggtgtaatatttatttagaatcaccgatgttgcttataattttaaaaataaatttcaaaaaattatttaacatattgaagtactaaaaatatcaactatagccatcaattttaaaaacattaaaccgttaaattttaattcaatactaataacaaaaagaaaatatatctaaatgttattgttactactatcaatttattataatttttaaaatatgtacagttggaattccgtattttaatattcccagtttgattatttaattaaatgattaattaaatgcggaataataaaactggtactgaaaacagttttctgtagttacagaat

SEQ ID NO: 119520 - DNA, 604 bp, Cannabis sativa
  modified_base (563)..(565): a, c, t, g, unknown or other
gggtgggttaggctttaggaaaacaaaagaaatgaatctagccttcctggctaagtggggttgggacctgctcattggtagtcagtccctttgttgtcgtattctgaaagccaaatatttgaagggaaaggagttgcttcactgcaaatataaaaattctgactcctgtatctagaagaatgtggtgaaagcgaatgacattctttggaaaggcgcttgtaaagtggtctctgatggtagggacacaagaatttgggatgatccgtgggtgacccatggaagctctttcttccccaaacctaagggggtttctgcgagtggtctcgataaggtggctgacctgttgactgaagatggacattaggacctttaaaagttgactagattttttgacaaagaacagttactgctattctgaaaggtggaaattcgtcagctattggatttgacaagtggatccgggccaaagaacgtaatggtcagttttcgtgtaaatcaacctaccttattcaagcattatagagagatcctcattgtgaggtggtgttgggttttatgccctnnntaaaactcatttcaatgtaatcagatttacttattaata

SEQ ID NO: 119521 - DNA, 1060 bp, Cannabis sativa
catgttggatgcatcttacgtattaaactaaaagtagaggtacacgtagaggatgtacactgaatagaaaagagaagaaagagctcgtacaatattatttatcatatctgtttgagttttattacattttgttgttttaaaaaagcacacagaatttgtacgaaaacctttctttgcctcaatttgtctgtcactcctcataacactcccccactctttcactctctcttgaattatttgtgtattgttaattattgtaatttcacgacctgtttgattcccgagaaagcattagaaacgtgagtcagagtttttttatttatacttctatttttgttttgagactctttacgctctttggcaatttaatctaaaagaagtttgaattttaaggcaactaaacgacctgtggatgtaacattttgaccgaaaaagtaagttaagaaaatgtcctatatttaatttgtgctgctcaatctaggttgattgagtttaaatttgtattcattttgggaatgtaggaactcaagttacatatcaaggttcacgttagtttagttggtgggtttgtttgatgggctatgtttattagtttgattttgacatatcatttgaaatttgaattaaaaaagaaattcttcatttttcaacttattttcttactgttaaataccagcttgagggtagtagtggacctctcattacaacttttataattccaacggtgttcaaattatagctaatgtggaatacccaaatgcattagcttcctgaagtgggttgccatatcgatatgttagttgctctctcaattagctgagttctatacgtggttagctaaaaggcaggcatttttctatgttgaaaatattgttaaattgggtgataagactgagagcatgatcttttaattaattggggcagttacacattgttagtcattgggtttagtagaagattgtgggaatttttttttttcttttttccggtcatgctgttgtacattgcttgtatgcttgggcccatgtgtacagtgacatttgtcttgttggcctgtgtg

SEQ ID NO: 119522 - DNA, 849 bp, Cannabis sativa
taaagtacactgctatttggcttcttctctttgaatcaagaaaggtattctatattaaaaaaaaaaaaaaagttctctaaagtcttgtcttttgacatgagtgttagccgtatgtttagcgtgctgtgagtctttgtggtttgtgagtttactggtaagggtgtttttgacgttggtttttcttgttcgtgcgatctgatggcttcaagtagacaaaactttgctaatatgactgatcaatatgacaatatacaactagaggaagaagaagagggggagttgttatgtgatatccctgaggataatggtcaacctattgatgatcgatggtgtcttgtcggcaagtttttgacttcaagaatcatagatttcgactcaatgaagaatactttagcatctctatggcaacctggcagaggagtgtttgtaaaagaattggaacataatctatatattttccaattctatcatgagatagatatacagcgagtcattgaagggagtccttggacattcaatagattccaactaatctttgaacgtctgaaacagggggagaatccgagaagtgtctgattaaatcgtcttgatatgtgggttcaactgcacaatcttaaaacagggttcatgacagaagccaatgccaaaaacgtgggaaactacatcggttcttttgttaaatcagaccctaagaattttatgagcatctggagggattatctgtggattagagtgacagtgaatatagaacaacctttgaagaggcgaatcaaactcaagaagactaatggggattggttgtggtgtcagtttaagtacgaatttgttcctactttctgtttcatatgt

SEQ ID NO: 119523 - DNA, 535 bp, Cannabis sativa
  modified_base (26)..(32): a, c, t, g, unknown or other
gtatcagaaccatggtaatgatttannnnnnngaaatatgaattaaaatgatgtttgtgttgatttggatggtttcatgatggtttatgtgattatttcatgaatgtatgtgtgttacaaaattttttccatgaaaatattttttttttctttctaaaattatttatttggatttcttgtgaaaaattaagcaattttggattttacggaactcaattccgataaaaattgaaaaagttatgaatttttaaaaattgggtgccatggctgttgagtgggtgcatcgaagtgcaccagggacttggacaacacgggtacacgcgcgtgctaactcaaacaacccgtgtcttcatacacggtcagccccttgttcagacaacacccgcgcgcgtcccaccctgcaaatgccgagatttctcggcgtaggagcctggaattccttcatccgcacgcgtgtctcggctgcttgcagccctcctgggctgcaggtgtagcctcctgggcaaccacctcacaaaaatccgattttcatggg

SEQ ID NO: 119524 - DNA, 1213 bp, Cannabis sativa
tctctaaaatacatgaaccaataagcatgtattacagttaagagctcattcacctctttaccaatacagaataaagctaatttgcctaccccaataaccaacttaactacattaaattgagctaaaggcgcacaaagatttttctgccatgtttattgtatcaattacttattatataaacaaataagctgatatgctatgaagaaccaaactaacttgtactttgtatgaaagagcttactttattccaaacatgttaaattattgacacacgctaattctctagttttgatacgtaaaaacgttattaaatttcatttttgttggattaaatctctttacaagctcaatacacacgtagattttatggatctacattcatctcacttagtgttaattgctaacagttataactaactgtaacaaccgacttcatcaagttccaagtctgctataaataggagagagccactcaacccagtagattatcgcaatctataagcaagattgagctccaagacagctagagagagaagtattttgtaacgccttatcttataggaacgccatgtgtgtggttttataaactagttatttattactaatataaagttattaattattaaaatctatgataatattaaatgcggatatcataatgatactaaaactgtgtttcagggatctctgttgcaaaagttttacaaaaagactaaatacgacaacaagtcaaaatattaaatcaaaatatatggtagatacagctcaaaaacaattcctgacaactcgacacactgactggtaggattcatgtacattctaggagaagaatgtcacctcatggctaatctagcatttctttacccttacctgcaccacagagcactcgtaaatcacaaggacttagcaagaaaagtaataaaatactacatgaaataaccaattattcctttcactattataaaatgattaagcaataacatttaagaatgagtaacataatcacccatgtgcatggaaataaaagcaatcatttattgcattgcctaattaggcaagtccatatcataatctagcatcatacataatgttgctttatcacccaatcagatgagcttgtgcgacgatctggcaccgatatgtatcatatcatctatgtaatacccgggattaagaaaaggattagcaaaaccctaactagataattatgtat

SEQ ID NO: 119525 - DNA, 1140 bp, Cannabis sativa
tagggcacaaaacccaacaactaggtattcattacaagcattaagatgagtatcatggagatggattgtttttcagtatttaaagttaagaaaactctagacgcaggctgtgccagttgtctagggtgaaattcagcaagactcgggtactaagataacaccaggataatgttggcctaagatgaaagtcagcagaactacggtagtaaggcaacatagacatgtcaaggggcaaagaatcagaatgactaaggcatcagaatgactaaggcattagttcacatcttcatcaaagtgacatttggaatggagggaccgtatgcgagtatgcgattagctttcgagctattccttgagaggtattcctataagagagaatttcttcccgagttgaagtgggggaacccactagttcatatgtttgaagaatcagggtacttgttcagttttcgtgtgtgaatctagagggaacattacaacagatgggttgttcagtgtgaaaacttgcatgattgctgcaagctacagatagataatatgcaagggcgtagactaagatgaagactgagctagtttgcagcatgttatgggtgtgctttgtgtttatgagaacactgatgttttatgggacactgtaagtcgaatggttcagagagcatatgccgatgggagatagcggattgggatgacatcaattcttaagagtaagacttcgtgttatcaggtttgtcaaaatttagcgttagcgagtcatcagaggatggagggttgattttgggagatggacttgtgacatagtgttagagagccgacacaagcagattctagagggaaaattcttggttttcggtatttgctatattattgaccatatgaaagaagctcagaggagcacttatgcattgggttagaggggccttttccatgaagtcctgggtgtgtagtaaaccagagggccaatactaagtacttcgagaagagattgcttgcaagagtgcacttggtgttgtattccttgcagttggccagcaagccttgtccaagagggacgcatcaaattttatcctgtgataagagtgtcttggtcaattaccattaagaggatggtgtgccatggagttggcgtgtgaagtttctaga

SEQ ID NO: 119526 - DNA, 3477 bp, Cannabis sativa
caaagtcaaatccttgcatctatggtggaaagtgaagtcggttttctgcccaattttcctcatgatccttgttaaatattccatacccagtacaaagagcaaaggggacataggatcgccttgtctcagccctctttttgccacaaagtagccatgtatggatccattaatcatcaatgaaaatctaggggttcgaatgcatatcatcacaagttgaatgaaacttatcaggaaaatgcaatccatacaatatttattcaatgaaattccattcaattgtgtcataagctttttgcaaatcaagcttgataacacaactagactttgtcaacttccttccataagtcgtaccagatcctggcatatcattacattgtgtgcaattaatctcccttgaacaaatcctccctgattgccagctaccaagtgaggtaaatgaagttgagtctcgagcatatcagtttggtggctgccttgtatatcacattgcaacaagcaataggcctgtaatctctcactgtattaggacatttcaacttaggcacaagtgttagaacagtgttgtttatttctttgagcagcttccctgttttaagtaagctgatgattgcttcagctacttcaatgcctatgatgttccaatttatttgaaaaaagaagctcccaattaccatctagtcctggagccttgttaccaggaatagcaaaaattacctctttaacttctcttgattgtaatctctcaagagaaaatcagcttgctgctgggatagaaattcctcttctctaagaatgttctactgaaccgacttcctctcttgtatactgctgccaagtaactcgttgtaatatcgaataaaagcttcaatgatggccctcggctcttcaatcgttactccttcagcattcacaatagtaattacttgattgtgtctccttctctctcggatactagtgtgaaaaagagctgaattttcatcacctgcctttgctttgttaagctttgctttttgctgcaaaaaagacaagtaactcttgaaaacaagagcataatgagtcctgagatcattttcctgctggtgtaaaatatcattcaaaggctgctgctaaagtaaagatagacattcatcaagcttagctttagcaagagccttctgggcacaaatatcagcaaaatgatcattgttcaaagccttaagagcaactttcatactcttaagcttataaataatccgaaacatcaaagtcccattgcattgttgctgccactgttgctgaataattttagcatatctaggatgcaattcccacatagaaaaatacttaaaaggcttccttccacaaacaacattgttataaaagtttagaactgctggagtatggtcaaaaatactctcattaataaaaacaacttcagcagtaggatgtgcttccaactagtcttgattagctaatgcacgatcgatcttggagtaaattctgtcatctgcaaattgcttgttgcaccatgtgtagaaactcccgctgaatttaatgtcatccaatctacaatgagcagtacaatcaataaattccgtagaagtagagtacctcactcgcttgccaattctctcttcctttgacaaaatatcattgaaatcccccattactatccatggcttcaatgtagatagattttgaaggtcttgccataacttcttccttccttcttcatcattaaggcatatatgaaagtgacataaaatgactccttcatatccacagttgatacctccaaatgaaccaattgacttgaacaatttagaatattaacattatagttagttggtttccaactaactacaattctcccaccaggatgccaagggttatttgaagtgaagcaccatccgctaaaaacactcgagtataaggccccaagttttgatgccttaactctagtttcgaggagaccaaccaaaccaaccttctgtgtattaagaaattgcttcaccatttgttgcttttgttggttgttgaatccttgaacattccaactaacgattttattcattgggaagaggaggttctccccctcctcttgtgtccccaatggtctctatgcctatctcatgaacaagcaaagtatcattttcaccttctatattcccatcagcattctcttgttgattttcagtaacctgttgaagactaccaaaagaatttgctactaccacagcagaagcttcttgtttctcagtattcttctctttccacactttctttggtagtaaaaacccatccccatcacttgttgtctttgcctgagactccactgctggttttttaaccacctattcagctttgcttccctctttcttcctgcaatcgatagtagagtgacctactcctttgcaatgagcacaagttgtaggcttccattgataattcacatagagtgaaatatcatcgccatgctcgtcttcaaattctatatgctttgggaattcttgttgcaaggaaacttctataagtattctagggtaattcaacttttccttagctttagtgaatgaatccaacataaccggtactcctatttggcttataatcctgaacagaacttgctcacccaaatatttcaattccaatccctgcaattgtacccaaataggcactgaatggatatcttctttttaaaaattcttgtttgggtcccatgccttcataatcacagggcgtttgttgaaaaatatgtatcctctagataggacctgatctcgatcttcaattgtgttaaaccgcacaaagaataccccatatgagatcattcccaccttatcaattttgtccttctagacccttctaacaaaaccatctaaaatagacattgggggattagccccaagcacataacaaataatagatggagtccaaaaatcaacttcttcctgtatgtcttctctggtaatcttaactttgtgcttggaagatgaaccataaaaacatggttctatgttgcgaattatactaccagatcttaaaacaggggggataacagtcgtacctctcgcaacagcagttgcagatagatgttgcgcctccctgaattgttttgcttccatcagttgtgcaaattttagtcgtatactctccctccgtgaatcctcttgctcccttagtaatcctgattcatgttctgtatcctgatcctcgtctccaatgtcttcttcatccgaaaagatgataggttcaatttcgaacacctcatccatagacttggtcttcttcgcatctgaggaggaatcaggaccacattttttcttcttcttcgctggtgatctgggcttgtcctgctttgtcgccctcgtctttgccatagtagaagctcaaagagctaagagaaagctagagagagaaagccctataccctggaattatgtattccttgttattttccagcttgaaatccatgttattttgatttatggctgctgg

SEQ ID NO: 119527 - DNA, 877 bp, Cannabis sativa
gaagtaattctcctacaatatacatatcaccttctccgtcttcaattgtttcattttgcaaggctttggccaaatcgatcaaaaccaatcatcaatcaataaaaggttgcaaatttgagagtaagaaaataaaaagtatacaaaactatcttattaggaaataagaatgatatcaaagtattaacaactcaactcatagttctcataactacatgatacataaaactcattaccttttcagcttgataaaactcatgatactaaatgatacaaaaacaaatcactaaacttaataattatagtgttaaaaagaaaaaaaaactcataattatagatacatataattttcaatctttcaacacttaatcctacatcaaataataagttctcattcctaataaatacattttatatataataaatttatataaaaaatatacaaaataatatggaaagattggtttatacctcaacagaagcttaaagcccaccacaccaccgattgcttccaccgttggcgattattcactagaaaaaaaaaattacttctgttgacaagcttttgcgccaacaaaaggtacctaaacccagtggcagagccagctcaacattttagtgggggtaaatttttttttttttttgaaacattaataaaaaaatataatttttattaaaaaaaatgcaaagtgagaataaaaataaatatacgtgaaaataaaagtgaaaaatataaattttatgggaataaatataaaaatatgtaaggacaaaactaaaaaaaaaattatttttatagggtcaaaatataaagggtaaatggcggcaaaacccctaatattttcgttttggtttcactaaacccccacaacccaaattt

SEQ ID NO: 119528 - DNA, 1894 bp, Cannabis sativa
  modified_base (913)..(913): a, c, t, g, unknown or other
ttaaataactacaatatacactatcattaaaaaaaaatagactatttttttttttgaatgccaacaaaaaaataagaaatataccaaaccaactattttagaagaagtaccataaaattatcctaattaaggtaaatagactgttttggtggtggaatgatggtcgagtatttgagctttgagaagtttgtaactggttttagtggtagtattgcgttgattttagtttcagtaataggttgatggtcaaattttttagcttacagtggtatttgtataactagttcttttattaagaaattagtttttattatatggaatgaactgttttttttatttattaccttaataaaattatatttagtattgttttgactattgtagtttatttttttaaaattaaaagaaaaagaaaaaaaacaatttctgtaattacagtgtttgtgtaaataattgaatgattgtatcttgtaaaaaaatacgatttttttttttttagcatttcttgttatttataataatgttttcaatatttttaaggttttttttatatgtaaatatcccttaatatgttgaaaaaagttagccaaaaaaacaagaactataagagtatctccaatggagatacaaataagtgatgcaaatgtaaaatatagctcattttgttaaaaatgtactccaatggtgtactaaattatgatgtaaaaatctcacataattaaaagtgatccaaatttgcatcacaatatagcatagtgtaatatttgtatcacaataaatgctatgcttttatatttaatattatgtcatttttaatattttattattaaattttagctaacttgcattattattattattttattattaaattttacatttaactttacattattattattttatatttttnaataaattattaagtgagcattaactaacatattaaattttacattaatatttataattttgcattggagtataataataaaagttgatataaaaatatcacagaactattttttgtacaaaatatagttcaacttttacatctctcattaaagataatctaacttaggaagaaaagaaaagtgcggcaatataaaacctttatttaatttaattttgtttttctctatttcaatttccaactgtctttcctaaatgaggaataagaaatatttgttactcacctaaaaaaaatatcatcattcagcttaataagacaataattcatttcacaagtttgaagcctcagtactccatttctaaatttgtccaaatttacctttttaatcgctacttatctttcccattcttctttctccattcaatctttccattctatatcttatttttaaatgttcaatccacttcacttttgcatataagataaactaatctatttaaaagagtgaaaaaaaactaaaatataattttgaaaatttttacatcgctaaaaatagtgcaggagccctttatgtcttttacatctagattgttttagagaaatttaattttttatgcttacaatataaatacttaatgtttttcccctaaacacataacatgtaatatttgtgggacatgacacattttacaatatccctaaaatactcatatttacattatcccctatcccatctcttcttctctctttcttcatacccatcggaccccaattggggtccctatcggacccgtcgaacccaaaaaaaatttacccagcacatgcatcggaccccaatcgggatcccaatcggacccaaaaaaatttacagcacatgcatcaaaacttccaattggggtcccatcggacccgtcgaacccaaaaataggatttttgcagcacatgcattggaccccatcgggccatcgtctttcccaaact

SEQ ID NO: 119529 - DNA, 1803 bp, Cannabis sativa
tataaactaccagcaatattggtcacatgcctaaaaaattcaaaattcatttgaagaaaaagcatgcaagccctaatttctatagtgaatttaaaaaatacaattaaaggtgaatagatgaacaaacccatgcctggtggtgaagacgaatgcacccaaataatcttcgttggttttggatagtgcaagcaagcacacctttcaaaaaaaaaaaaaagtttgctaaggtaatcaatgagtcgatttgaaaattaaagtctatatgcgccaattcactcctctaaaaatgctcaatcactgggggtggacagtttggaagaagacaatttcttaagcaaaaagcaattcaaagaacatcattgaaggttgggttccttcactgctaaaaattttcatctatttccatctcaagaaaaattgaattcgagcgaatgaaagtctgaaatgggaaaaaagtggtaaatggtatcttttaagggtatttatacccaaggtggttatccatgtgaagaaaaatgaacgatccaagatcgtctctacaaaagcacaaacatatccaaaggctccaaaggccagtagccaggcttgtcaagcatttaatgctccttggaatcgaggtacaaatcaatgatgaaaataatttttttaattttcgtgccaataataagtaaccgtcaaaataaaagctttcctagaaagtaactcttcaatttaggcactcctccacctttagatgactgccatgtttacttcccaaagctgaagatgaaagttcatcttccacgatcaattagcacatggaatttaataagaatattactttaaaacctccacgtgtctactcatatggattgtggcaagcttccacaatacgcaacattctgaaagcttggggttaaatgttatcagtatccaaagcccaccagtgggcccagagaagataacttgggccaagcctaagtttggcaagaccttctaggaaggtatctaccctcctctctcaagagagcttccgccaaggaccactcgaagccagaagcagtcccagtatcgtgtttctgaaagagcaaacaacgtgttcctagaaggccagcacaatttcctttttttttttatcaaattgcacaaaataaggaattaaatttccttatttcttagccagaagatcatattaagttaaaaaaggaaccgacccaaaataaatatcaagtaattaattcacaattaattacccacaattataagacatagtaatgatagcctgatcgtgtttaattttcctagtcagcacacctatcacttcatgggttgggcctcacgaatacaaccctaacttgtgtatttttcatgtaaactccccattagatggaaaagggaaaccaagtataattcttgtaaacactatatatacaaaataatttcagattaagggttaaattctcttgcaatatttactcaggcaaaagtagagaacatgtactgcttgttttccaaaggtttttctagctaaaatacataataacattgactcgtggactaaggcttattaatgccccaactacgtaaaaaattctaagtgttgttaaatttctctctttgaattatttatttctttagttctaatttcttatattttgttttctgaaaatctcgctaaacagaatctatagtggaatatcaggaggaattaataagatgggaaatatactcgatcgataaatttcgaatctacttattaggagcttggttacataggcccatggtcgcacattgtttggcataatatcatcttgtagactcaac

SEQ ID NO: 119530 - DNA, 1479 bp, Cannabis sativa
acggacaattctactcgtaatgagccgttcagggagatttgatacttaaagtcataatagaagctgaaacatctgaccatcttccatcatgcatgcatcttgcatacaccaaccagtggatgtgagatgataattttagaagatatgtctcatatagtttctaacttgcaagtcacagaaatatccctaaatttatgggataatttctagctttctctccatatgtacatatataaaatctaaattaagtgtgcaacagaagtatttaatagattatcattgtacgacactctaggatctccatatgtacatatatttaatctgaaatacaaagatgaaagggattatttacctcttaaagcatatcagggtatccttgaatctttttcgtaagttgtatcctataatggtgatgacaaacttacaccttgatcttccaccatacacaaggatcattgtgggttaattaggataaagcaaaataatgagttcttgggctttttctcaacgcatgagtaagaactgtctcaaagtgaataatgacattaaccccttttaggtttcctaaattatactgttatacccaaaattcggttgcgatcttagtggaggacatgtgtcaagataaaaggaatatggatcgatggaatcgctttatatggaataactcattaattacgtgagtatcagagtatatttgtaacctgctgattaaagtcttaggcgagaaatcaatatacacgaggaatggtttcccttaatctacaataaataaaatagaaaactaaactacttacataattacaatgcaaagaatagaaaattgaggctcattgcatttattttctgatctaatcccaggaatatagggattatctttgtgtcttggaagtaacgatgcctatctctaaaattcttaattcacatatcctgcctggtgcatttgagttgatcacgtgatcgtgctttggtcggatgtcccttgatgactctgttcggacatcctactatgtgtggacaaagtggacctttctaccaatctttggggctgttaggaatataaccttctgcccaggtagaaaaatattaaacatgtgtcacccagttcactgtcacgtcatagtgcaaaaaataggataatactttctaaacatctgtacatcttataaatcgactacctaccccatttcttaagaacaagtcaccatatgaacttgtttacttaaaacaacctgattataggtttctaaaagtgtttgcttcagcatgccttcatccttatcaatcacacaagttctaattttattcgactaaatgtgttaacattggctatagtaatagccacaaagggtacaaatgccttagtagcactggccagttgtatatctctcaacgtggtgtaataccctaagattaaggaatacgattagcaaatcctaactagttaaatgtgtattaatgtggaattatattattata

SEQ ID NO: 119531 - DNA, 1257 bp, Cannabis sativa
atgacttcattcaaaaattgcatatagtaggtggatactcttcctaattggtcctaatgaggtgcttctaaatttttttcatcattgatttcaagtatggatgggtttatcaatttaagtctttaaaactatggcctgaaattgaggacagcttgattctaaaggttctaggaatgcaaattttggattgaattgggacgtggtattgtcacaaagtataatgccctaaaaaatttcttaaaaaagtatagcatagttaaaacccaagacctgcgaatcatataaccttagccctcgattacttaaaaattcatagaaaacccactccaacaacaaatggtgcaaaataaaaggagcatatgtaaataaatccaaatttaaaaataaagagattaatgaaagagaaatcacatactggtttgacaaaaaaatctgggtctcgaagaacttcttgatgaaaactccttctgcaggggggctagacctcgacaattatggtattgagagatgaagtcgatcaaaatttgaaggaaataagtgaaagatagtgagggcatgcaatttcaaaaaggaaaatggctgagattttttcaagttcaaaagagcttcatggatgataatggcagaatagaatggattttgggttttatacctaagagatgaaaactgtttgatcgcaataatggttgataaaacggatgagaactattggaaaaatataggtcagagtaataaattatgaaatgatgtacctcaaagtcttaaattgccaaaataaagcatgaaattttttatatgggaaaaatacaattgtacccttaatgccattaaaaagtccttttatttttttaaaaaaattacttttcaggagataattgttatattcatatttcaagaagcaatatggtgttgacacatgtaatatagctagaatatgaaccggcctgaattatgcaataataaatgcattcagacaactcgccttgagaagcataggttgtagaaatatttaagctcaccctattaaagacaatgaccaggcatgaataataactactgattgatgaggttcacatgatttgtttcatgattatgtttaatgtataaattctgttaagtccagaacatatgtatttgttcatgattatagtgtcgttaacacaggggaatataataatgattatatgttcaaaagtttaattccctaatttatcagttcactggatttggattggcatgataatcagcaataagtat

SEQ ID NO: 119532 - DNA, 2102 bp, Cannabis sativa
atgaaaatattaggactgttctcagtggcagagccagccaacatttatagggtgtaaaaaaattattttgaaacattaataaaaaatataatttttattaaaagaaatgtaaattctatgagaataaaaataaatatatgtgagaataaaagtgaaaaatataaattttatggagataaatacaaaaatatgtaaggacaaagatgaaaaaaaatatttttatggggtcaaaatataaaatactcaaaaaattatatataaaatttatatgaataaaaaattaagggggggcagataaccctacatgccccccttcccttcgcctctgaccgttcttaagctattttgaagtaaggtctaaataatttttcttcggcctttacacaaatacttttatggtcaaataatactaagtaaaattgtttggtgtagtggtaaattttttttaaaaaagttagggaggttataagtataacactccacgcctttttttttttatgtttaacaaaagaagaattaaaatattattgttggcattcgaactacctagtaactatgtgtaaggtaaaaatataaaatataattcgacaaaaatcactttaagataatcaaatacattttatcatatcaattctataacttttattaaaattttaaagtctcgacataatataaaattatgtaatcgttctactttaattttatttggggtcatgcatgactaataataaaatatgtttgtctattattaatattaaatatctacttaccaaaaataacctataataaattgtataaaaaaaataaaataaaaaattacacaaacattatttttaaaaaaaaatgttataaaatgtatttattaataatatacaaaaaatatgatataaatatagtaatatgaaaaataaaaatgtaattttttattcattaattcatatgaaatccttgtaagaataaatgaattaaaataacaaaataattactaaagtcgactaagggttgattaattataggcccatattatcaacagctgaaaaaaccagaaatggtaagagctattactaaggacaaattaggaaaagaaaatcaatataaaattaattaattaatgttttgtacctctattaattaatttgctcaaaattaataaactttcccaaatttcaatcaatattatatttgctcaccaattcgatatattatcataaaaacaaaatagctatatatatcatgagattcaaatcctttttcctttacctttggtactatatagaagaacataataggaatgttaatttagaaaatctatatcccatgatatctaaaatttatttaattacaatttgaatattgatggaaataaaatattatacaaattgaaatctaaaacctacataggcattgggttattttttcttctcttgtttttctctttagaaattcgaaaatagaaaaatgagcgcttctttaaggttaataaagtgtgttatagttggcgatgaagccgtgggaaagactagtattcttatgtcattcaccaccaatacttttcacacggttcgttaatttcaattatgattttaattttttttttaagaaaattttgattttttttaatatattatttgaaattgaattgtaataggttttctttgtttggtcttctttctaacaatgattgatttttttttttcttttttacttttaagaatttttttattttgagcttgattttgaaaaattgagatttatttgttgtaaatttaaattatgttgttgtataactgaaattatatttattttatattggaaaaacaggattgtgtgtcaactatttttgacattttcagtgtaactgtggttgggaatggaaatagtataaatttgtcattgtgggatacagcaggtaagtattgaatggctaaaatttacagtataaattttcttctttgagtctaaaattttttatgctatggaaaacaggagatgagggatatgacaagttaagacccttgagttattgtggtgctgatgtgtttatactaacattctctctcattagcaaagctagctatgaaaatgtttccaagaaggttagg

SEQ ID NO: 119533 - DNA, 1778 bp, Cannabis sativa
gtgtaatttttttaaattgaaaaaaaccctaaaatgtaaatgtaaaataaactaaaaaaataaaactaattaagttagaaacaaaaacatgaaatatgggtttgcataataagttaacaaaaatatggcatatcaaataccataaaaagtcttaaatgtgaaaaaatgccatagaagggtagcaaacctataaatgccatatttttgtaacttttttacaaaatccaatatttcatgtaattttcacaatataaaatccgcacttttacaaattagatgtactatgaaaaaaatagtgcgaattaattgaatgaacactcttaattgaaacacaactattattttctaaaatggaaacacaattattgttagttatccataacttatctttttttttttctagacactatccataacgttttatgattgaataagctatgagttcgcgtcaatattttgttgcattgtcttcccacgaagacagtaaatatctgtacttttcttgtctttctatatacatttgtatatttttcaattaacaggattattttatttcattttttcattgtttggaattatgtgtaagtggaagaatttcaaatgtatatatgtaatggaatatgtctccttctttctaatcacacgcgtttgaatggagaaagtctagtgtcgtagaaactgcctgtgatactttcagaaaatgacattatccaaaacataaataacgcgttaaattgtaaacgagattgactacttctactaattgcatgtgtcatgtgtggaatgaaactgccttattacatctcaatgcaaaaattgtgtttacgcatattgaacaaataggacaactatataaatatatatatatatataaatatttttggttttcgaacatacacaagaaaatccatgactactaataataataataataataataatatcatcaaattgttatataatcatcaaaatgcatttgactttcttattgtatccttcttatattagcttgcatgcatagctgaaggtatgccaattatatttcctagtcaaacaaacataataaattaataatgacaacatcaaagactcttacttatatatatatatatttattcttttttgcatgaaatataaagtcaatcgatatccgtgtttgagcaaatgaaagaaaatgattctctatattgatttgtaaaaaatgaattacagccttattatataatacaagagagtaatcagatataaggtctatcaaagctaacaaccaaagctaactgtacaactcatcaagtttacacttaacagaaaacttctaattgtaattgttatattatttattaaataatataataaataatataatatttaagattaaaattgtgatatattatatatattattacatataatataattgggaattatatacatgtaataatcacaatattatgtgattgagagttacatatagttgtaacataagaggtggagttaatttgtaacttccacatgatcactaattaagtgtaaagtggttacacaacttaatttttgaaattcaaaaactataattcaaatatagttgttggggattgaattttatcatttataatgtgtataattgataaaaaataaagtgggaatggtttggaataggtttgagtgttatttgcaagagctgaaaattttagtaactagtaactagttactgttttttttcagcattaatagtaaaacgttttttgctattgggatggcttttaacaactcccata

SEQ ID NO: 119534 - DNA, 2016 bp, Cannabis sativa
ataaataacagtacaataaattatttaaatagctataaataatttcatgattaatcataaacaactgataatttccaaattatctaagcgggctttacaatatcccactagacgcgagcatattcttgaaacatgaatgtagcacaattaacttgtttcgtccttgtcagccccatgttatttatgatgcgggtaatagtgcatattcactgctcagccatgataatatcagtacctcccagaaacgttggaggttgtagcttcacgaaacgttcaaacatagaatctcaatatggtagaataaatcttaggctacccaccactggatctagagctcgtggtaacacgtgttctgctgaagctgccggtgccggttgcctatagtaacgcaattcatcttcctgacgaagtataatgctttgaatttcgaggaacattttctactagtcggcaggtggattatcattattaacccccgcattatcccccagattctacagaggcgcaggcggtgctgatagattggcttggtcattaccaagctctacgtgctcgccctgtggtctagatgattgtggagggtcctttatcaaaaatagtcctaaaattaacaaccttggcgagttaagcaccaataccacacttacacacttattgccttaaaccctaactcatacattctatttctcttattaaataaatatttatcaattaaaacactaatcatgctttccatataacattcttttctaaatgcccatatattacctaaaacaaaaaccggtaaatgcataatcacaaaggcagttaagcatttactctcaacacttactgtaccatgagtcgagcttgtctctgacgataattgaacatgttctgccagtctctaggaagtttaaaatccttggcactctgataccaaatagagcttaacttaagctcacaataacaccaaaattaaccatttaagcaaacccatcaaaatcaccactaattacaaacatgaacactaagctcaaagttttcaatcacacaaatacccagaatctcaactctaaatttaaccaaaacataaaaaaaaatctcatatttccaatgattcaaacacctaaaacccatcaagatataacttgaaattctcaacatgcatcaataacttcccaagaacacataaaaaaaattcttaaagattaaacataagaaattcgataagtaatcaaagtttgtcctcacagggacttttcactaaataaagcaaaatcaactaaaagcaattccaaaatttctaataaaaataaaagcaaagtcactaattaattcaagagaaaaattcttaacctaaattctagagttgagaaataatatgttaagataaataaactaaaaataagaagccaaaagtaattaaagtggtgataatttcagatttggagtagacttgggtggttaatttccacttgtatgttccagttgatacaacaatgacccaataatgactcagcaatcttggcagagttaagatatttcaagaaaaactagcaagctttttccaaaacttgcaatataccattcataacctcaacaatgcattcctacaccagatcagatcacaaatagtccaatataacattaaatttttagttatgcatggtagcaaaatatgcctatttcactactaattaatacctaaaagaggggtaaaaataatgcattaattagatgtgttcaactaggtcttacttttccaagtaagatctagcttactaaatgttaaagctggccaaaaattaacattcaatcaatatttcatcacatctaattgaacaaagagaagattactcaatcatttcaaatcaaagcactagttcatacaagggttaataaccacccaaatctcaaagttttttgttcatatgtgaaattaagaactcaaaaccagaaaatgacatgttcatggagtttaagagaatattaaagagtagaaaatgatacaaaatggaagaggagagcaagaga

SEQ ID NO: 119535 - DNA, 1217 bp, Cannabis sativa
  modified_base (1175)..(1176): a, c, t, g, unknown or other
tagtctatagttaccctcctacttttaccaacaagcagaatgtgggaatcaatcactatttttaactttgctactcacacaatgataccactaccactttagttatttttaaaccactatattacacacacacatatgtatcatttttttgtgtatgcactaggttaaataattttatcctgtttgtaacataaatattaaagtttaaaatattgtactaagtagggttgggctgtacaataaaaaaattgaatggtttatagcttatctaaaccgcaataattggattagtctattaaaacacccctaacccagccaatccagctcatgtgcacccctaattcgtacatttctttttaagaaacagtgattttcctggttgtaacttttattgtgtctttattaaatattaataatagtaagaatatattaaaatagtataaaaattctaaaaaatctctaaaaaaatgttagtttattattttaataggctattgttaattctaaaaattaacaagataaactttcaaattagtcagcaactaatcaagaggatagtggagatacactgaaggagttgctacgaatgcaagaccatgtttgcacctcagcaaacacttgaagaagtaactcgggatgatcactcgacatgcatgaagggtcactcgaccaagataagcatgcaagtcactcgaccaatacttgcatgcatgtcactcgaccaccatgatgggcatgtcactcgacatgcatgaaggaagggtcactcgaccaagacaagcatgcaagtcactcgaccaagacttgcatgcatgttactcggccaagacttgcatgcgtgtcactcgactaaggtagcatgtaagtcactcggttattcactttatttgtaatgagtacagaaggatgaccaaggcatgtgtgccaatgattttgaatttgtacattacaagagtatgtggtactgttgacagttggcagtgaaagatcttactaaacatagtagagttatccatgcttcttagctatcccaatcttcgatgtctatgaagggccctgtatataacaaatatgagaagtaaaagagatagcagtgaatgtattatatagcaaggtattgacagagaggagattgtacttaaatgtaggtacatataagtgttgggttttatgcnntaaataaaactccatttcaatataatctattttattcaaca

SEQ ID NO: 119536 - DNA, 2025 bp, Cannabis sativa
  modified_base (1959)..(1983): a, c, t, g, unknown or other
aggttgaatactcgcacttgttctccacgtaaatttcttcttgttactaataatatcatataatctggtgttgcgaaattcactcgacaaaagttcgaacgcttaaaagctttgaacccggaggaaaagaaaaacctacgacaatattctttaacgttcttttgaaaattaaagggtatcaggggtctcgttgggcgggtgagcttgtaatttataaaaattgtctttaaacttgtccccctttttggggacaaaaagtagttcataaaaatacaaaatttcatcggggttgggagcggtccaacccctggcagcataaaagatgaaaaggcctgacaacaggcgataggcttgaggtatcaactggtatggtaaaagtctaacgaaaactagaaagtcgatgaagtaatcttggagaggtagcatggccccggacatgagatgggtttcgctccaggctccaaaaccattgtagttgcggtttggcgtctcctcatccctcgagagatggtgataaactctggagctagatggcttgatcccaaccacggtcactatcttctccaagtggtaggcataagtcagcgtcaagtagagttcgtcagcttcccagccattggaacgataagaaaacattttgtaagcgaccagacccttcataacttcctccaaggtggccaacttctttggctctttcttagaagactttgcgccagtggcagctagggttgacataggattggcttggtgaagctcgagaatctcctggtcgaacccgaagaaatcgtgattgtgaaggtcttggagaacttcactcatctgaaaggtaaaaaatccagcagttagcccccacatcaaaccttaagtcaaaaaggagaatgggggtcccctaaccgctggaaagaggccccttcggatgaatgttatgaggaatcaaacgattcgcaatgaaatcgggtgaagactatccaagcatcgtgggaaattaaaggaaaagaacagaagacgtgcaatggcagtgtcaaactgtccaaaaggggcacatggggaacaaaagccagaaattctttgacttcgccccttaaaaatataatgacagaagaaaaataaacgcatcatcagacatccactgaaggaggtgttacacaggtggcaaccatggccgtcattcaaaaaaaaaaaaacaaaacagacaaacatgtacattatttccccaaggaaaagctactaccactacttgccctagcaaacaaagaagaggtatttatatagaaaggacttacacaatgagggcaaggcaggggcagagaatgtcgtatgatggtagtgcttcgcctgacaacgacagaggaaaagtaggaggaaatcgggaacctctggaattttgttgagagggtttgaaaatctaaaaattgaagggcagtaaaagtaacccagtcaatagaagtgctggtttttataggccatttgtgcatgaaacaacatcaaataagtaccatcgtacggtgggggttcacaatggttcaaatcccttgatccaacgcacatgatgaaaaagcatgaagagaagaaagggcggttgaaacgtttgagtatctttctgacatcagcattgatggaggggtctgtgaataggcggggaacgaatcgttgcctgttaagagacaaggaagaatgaggacgatcataactagggcccacacgctcgaggcacgtgtcacaacattcattgaggccggagacaacgtacaagtcttatttatctatgactaaataagacttggggataaatgttgccccaagtttttctcaatatatgtggcaatctcagcataggacacgtggcaaactaagacccattacccagggcacttacccaaatcccctctaaagggatcaacaactagtccaagagcaagctcccggatgtgggaaaagtatgttggaaattattttacnnnnnnnnnnnnnnnnnnnnnnnnnatgtttattaacatcctaaatataaactttctaaaacgatga

SEQ ID NO: 119537 - DNA, 2201 bp, Cannabis sativa
atggtttgatatttttaaaattaatatttatagttaaatttgtttaataaccattcatgggtaatacccattaagaagtgtttcatatgtaaataatataagttatagttatttaagataatttactaaattttgataaatttaaaatattttataatataaaaagtaatcttagacattctattttacacacaacaaactttttttaaaaaaattataattataatttatactactataataaaaatttaattaaaaaataattatctaaattaaataaaatatataaaagtgcatctatatatacactaaagaaagtgcattttagaatttccatgaacaaaaacaaccaatatatactagataatacacataaatgttacaaacaaaacaagtaacaatcaaacaaatatggcttccaaaaccaaaacctctccattcatgctcttctcagtcctctgtttcctcttcaatctccgattctccaccgctcaaactacagtcaaaggatcttattggtattatggaacagagtttcctgtttccaacattaactcatctctcttcacccaccttttctgtgctttcgccgatctcaattccaccacataccgagtcaccattcccaactcagtttcaactcaattctccacattcaccacaacagtacagcaaaagaatccttccgtgaaaacccttctttccataggtggaggaggaccaaatatcaccgctacctttgcctccatggcgagtcaacccagtcgccggaactcgttcatcgactcgtccataaagctagcaaggaattacagcttccacggcctcgacctcgattgggagtacccatccactgccacagagatctcaaacttcggaaaactcctcctcgagtggagaaccgccgtcgccaacgagtcccgaacttccggcaagactgcattactcttatcagctgcagttttccgttcatctaattactattcactagatttgcctgttcagaatatatcaaacagtttggattggataaacgttatgagttacgatttctacggcccgggctggtcgccgaactttacagcgccgccggcagctctgtacaacgccaccgcgagtcaggtcaacggtgctgcggggatcagagattggattagggcgggttttccggctagaaagattgctttggggattcctttttacgggtacgcttggcgtttggtgaattctagtaaaaatggtctttttgctccggcgaacggagccggcttaccgggggacggagatattggttataataatataaggagttttatcagtgagaataatggtcggagtgttttcaatatgagtgtggtgagtgattattgttattcagggactacttggattggttatgatgatgtgatgagtgtctctaccaaagttagctatgctaagacccaaggattgcttggctatttttcttggaatgttgggtctgattacaattggactctttcccaaacaggtaattaactacttattacttattactgcttaaaatattagagcattgctattaggtaccagtggtgtctaacactttcttcacgtgtcgcattgcaattggctagcgatactctctaaaagttattatattattatattatatggaactcaatacttaattacaccaatagcgatattgacacataagatatgactttagcatttttcaaaattatgaccagatgatattttgtaattgttattattgcattttgatattatgttgttgttaatttgtttgttcagcttttaatgcatggggaacatagagattttggagttttgagcttcggttcttggcaccattgtccatttttattatctataagtttagagcaatgttatacatgttcagatatcatgaattagtatcttaaataatgtggcaatgtttatattttgaaatatctacccaaaagattgaaatataaattaataaaataatagttgtaaaatgacatatacaatatcatgatagattttcatgatatagattattttttatatatttatagggtaaatctattgtaaggcctcttgttactacctcatggggaaggtaattagattaataagaataaagtaaattaattgtccaactgatataggtgtataaaatgattttttttaaaattaaaaataattaaaaa

SEQ ID NO: 119538 - DNA, 2359 bp, Cannabis sativa
aagagtgagtgcttggtgtgtattgtggtcaagttaaagtgttcaagtcttggtgtaattacttttacaataataaagtaattacgtttttcacgtgttgtggtgtccaacaaataatcatatgtaaggagcaagattccattgagtgaagggttttgaccgtagttttgtaacttttgttcaatcataataaagttcacctccttagccaatttaaggttgctttctcccgttaattaagcgcatgatcatcttgattgtgtagcccaaccacataaattattggtattgattttatgctttcattagttgttattgttgctagtttatgttgcaggtttatgttgctggttttatgttcggttattgttcttaatcattgtattctgtttttggtgttgtgttgtgttggttcttgtttggagtttgagactccacaaatttgtatcaaagccaaggtttctctcagcaattcaagaatcgaaactgttcttcaaggaactcaccaagaagatcaagaatgtccagatctaagtttgaaattgacaagttcaatggtgccaatgattttggcatgtggagaattaaaatgaaagtcttgttagttcatcaaggagttttagatgcattagatacaaaagctctaacaaccattaatgacaagaaaaagaagaatgaaatcaaaaccaaagcacacagtgcaatcttgctgagtttgggagatgaagtattgagggaagttttgagtgaggagaaagattggggttatggaataaactctctgagatttacatgaagaagtcattgaccaacaaattatacctcaagaagaaactttacactttgagaatggatgagtccaaagaattgagaagctcatcttgatgactacaacaagattatcttggggtcaaaatcgatgatgaggatcaagctatcattctatttagctctttgacaaaggcctatgaacattttgttgatactattctgtatgggaaagaatcacttaccatgacagaagtcaaggtagcattaagttcaaaggagattcaaaggaagggagatgacaagattgaatcaagtggtgaaggtctgtttacaagaggcaaaagtatgaaaagagattacaagggaagcaagaatcatcatggaagaatcatcatggaaatgggggacataaagcaaggtgtgattcaagaaactcaacaggaaaacaatgctagtactataagaaagaaaagcatttttgagatgattgtcttgctctcaaagccaagttaaaaagagaacaaaacaagaaaaaaaagtctaagggagaagttgatctagctgctgaaggatatgaatcagtagatattcttgttgcctcaagtatgaattctagtgaagaatggatcttggattctggttgctcttttcacataacaccaaaaaaaaaatttagtgtaatgtcaaaagagcaaggtggaagtatcctgttaggtaacaacaagtcatgtaaaattgcaggaattggttttgtccaaatgagaatgcatgatggtgaaatcagaatcttacaacaagtaaggtatgtacctgaactaaaaagaaacttgctttcaattggtgcttttgatcaaaatggctatactgtcaagatagattatggagcccttaaagttactagaggatcacttgttattattaagggaaagcaaagaaatagcatatactatcttgatggttacactgtcattgaacctgctgcaccagtaatagacaagtcattagaaagtagcattaagataaggcttcttaggttaggtcatgttagtaaaagaggtctaacagaacttgataaacaatgagtattcaaatgtggtctcaaggacaaattggaattttgtgagtcctgtgtattgggaaaaagttgcaaagtgaaatttccaaagggtatgcatacaattacagagaagctaggttatatccactctaatctttggggtccctccaagattcaaacacttggaggtgcaaactatttcttaagcatcatagataattactcaagaaaagtctgggtatttttgttgaaaataagaacctagcctttcaaacctttgtcaatcagagaatcatgatagaaaaacaaataggatgttgcatcaacgtgttgagaacagataatggtcttgaattttgttcagatgagttcaaaagttattgcataaaggagggaattagaaggcacaacacagttgttaaaaatccacaaccgaatggattagctgaaagaatgaatagaactcttcttgaaagagtaagatgcatgctgaatagtgctagtttggagagaaagttttagggagaagca

SEQ ID NO: 119539 - DNA, 2331 bp, Cannabis sativa
agtcaaggcctccaccaaatttacccaatttaaaaatacattttagttacaaacttacaattaggtttattttaaaaagaccttaaccatagtaaattattattcttataacactacacgtaatttttatttaaatacaacactaatttcaacggttttcattacgtaatcccaattaaaaaaataccaaagacttagagacctcaaacccttcaaaaactttgtacaattgtttcataatattcttatcactatttggcttttttgtcaagttttcttcctctgatctccttcattttttctttcttcaaaaaatgcaagttttacttcttaaaaccatcttctttttcatgagtagtgtctcatattttgtgacacgtattttattttctaccatagcttatattctagtgttttttatccaaacactaaaagtgccaggtgaaaacgccaaagggttattagaacaagtggcagagagtgtaaaggggttgattcagtacttattagaattgggttgggaagcaattacgacaggaatatctatgtcgtttgatgttgttaaagaaggtgtttttgggtctgtttcagttgttttatcgagtgttttggggcttatggaacaaacaagaaattcctttgaaagtttggtcaaagatgttcctgaattggtcgaaggtttctctgagatggcttctactattgtctctgattcatggaacaattgtattgatgcttttggatatgttaaggaccagatttcctcttgagattatttcttcttcttattataattacattatgcttcagtgttaatttgttatttttgatcttctaattaaattgaaatgtttttgtttcatggtactagtggtgattaatatgataattaattaactttcgtgaagctcatcaaaagtttgtacagtaattattgattacaattggtgactttttagttcttaattaatttgctattattacactatttagtttagagtctatgaatgagaaaaggatagtagttcgtattcaattttttgagtttaataaaaatgttagaattcacaaatatacataagtatataaacttgtttatttttgaaaatttattacaaatattaacaagtcattgaaaatactaatattgcatctttaattcaaaatatacattttaaatgtattaaaattgatgagtattaaaatattcttctaacactaatttttcaagactagacaatataatttttcataacgtacgtgttgtgtaacactcacaatctttattttatatttatttgatttaaaactgtttttagatgaatttcaatcaagtttattaggaatattaaattcatctcatgaatcatctaagttttttttttccttttttcaaggaaaatgcactatgtataagttatttatattcattctttgagttttcagaaagatgacgtaagggaagatgaaatattcgtagaagacttttattttaaaaataaatataaattaaaaattagctataatcaactactaataacaattatatgttaattaagatttaaaggatgtttatttggtccttaaataatcatcttctttatggactcagtcctcttccttaactattctatataatcaaatatctaatctttatgatttgatttagccttaattaatattgtgttcaagtcatctctaaattaataaatgtaaatataatatataggtatatatatatatatgatatcttggagcatggttaccattaccaaaaccaattaatatttaccaataaaggtacaataactcttttctgttatggcaactttggcagggaaacttatgcatgctcttcagtatgataactgtggcaaagcttctgctactgctttaaaggtttaaattttattattattaattttaattaatccaatcaatcagtatataattttggtaatagataaatacttatagtggaattattaattaatgtttggtttcagcatgttgagattccaatacctgttcctaagaagaatgaggttttggttaaagtagaagcattggctctgaatccagttgattggaaaattcaaacaggcatgttgcgccctatttaccctcgcaaattcccacacattcctggtaaatttctttcttgttatgggagaggattttgtcccgttatggaattcatctagttcatctttataattgttagattaataaggatttatgaaacaaaatttccatttcataatgtatatatgctttttgctttccttcaccctttaaaaaaaaaatagaccaaattattgccaaataatt

SEQ ID NO: 119540 - DNA, 828 bp, Cannabis sativa
ttagggcacaaaacccaataaattgatgtttgtaacttgttggttcttagtggagaaactcttgggggagagccagagtaggattcaaattgagatctgaaccaggataaatttcttgtgtttactctcttatttttctagttttcttattagttcttttttcttgttttaattgctaacatggtcgttgattgtttgatcatttacattgtttgagttagtattgttttatcaaaacatgaataaataatttagtgtagatattttatataaaaagagaaaataggttatatatattcgaaaaataataagatacaaattaattatgctatttaagtttatatatatttttttagaaaaaaatatatgaaataggataaaagacgagaaaaataaagaaaatagataaatacatttagcatatttttaagcttaaaagttattataattaaattatatatgttgttaaaatatattttgtaaatttttcaagattaaataaaattatgaaatgaagagaaatgttcattaattgtgttcactgtgcaggtagtgcggattgtaatatttttttcaaaccaaattgtatatttaatttttgtaatttctcaaactgcaaccgcactgtgagatcttaaaactgcaaaaaccacactgcaaaaatacgatgtggtgcaatgaagtgcaaattaaccgtgattgttacatatttaatgtaactatcaaaacctccccctttacaccactctagacaaattgattaatactgatggaaaatggaaaattaatgaagttcatgttagactatatatatagtgtatgtaatat

SEQ ID NO: 119541 - DNA, 2410 bp, Cannabis sativa
ggattggatcggatgatgattttccaaatccaattactaattggattggatcggatgatgattttccaaatccaattactaattggattggattctccaaaagtgataggctcatattcgtagcactaagactttggaggatattctactacctctaagacttcagctcttggttcatgtcgaagtgatcttgcatacctttctaaggccttcattgaatttccagctatgtgagggcctccaacgatctctagcctacttgcaactggtgtaggctgaagaggtgcattgccccaagctgaagctttaggtcgtacataccgctgaagagtagcatgtttgcgtcttataagaaaatctatctcatcccgtaactaattacacttattagtgttatgaccgtaattgttgtggtagcgacagaatttgttcatgtccctcttccccgactccttgaagggaaaaggtttgtaatacgacattgttgactgtgtggtcgtatagatctcctctcttggatccaagagaatggagtaggtggtgaatcaaggctcatactctcgtaagggcttgcccccaatcttaggtttctttccacctgtggagtttcctggcttaccaccgttgttggctctctttcctccgttcgaacctcccttcttcccattgccttgcgccttagcaacaggggcttcagaatctggtgacttcttcttgccaccttttgagcccttggctcaagtgacgacttcttcaagttttataaagccatttgctctatctaagaagtcattcatggtgtccactgccttgagagaaaggtcatagcacaaacgactcacccccttgagtccagctacgagtgtcattacccttgtgtcctcactaagacttttggtcttagcagctgcctctaagaaccgttgaatgtagtcattaaggatctcgtcttcctattgcttaacatccaccaaacaattgggctcgatctagcatggtcgagaaagagtgaattagttgccaaaaacatccactagatctttccatgattcgattgacccatgaaagagcttaaggtaccaccgttgagctaggcctgttagtgtggcagggaacattatgcacctgatgttgtctctcataccttgcagatcggtttgtactttgaagaggatgtgagatagtggatcttccagcccaatgtattgattccatgaagggttcttgaacgtcgaaggaatgggaagatctttgatcgttcactaatgctgccaacatgtcgaattctatctggttgaccccatgggtggtggtctgcatcctagtcgaagcttctataacccaagtaaggtcttctctaaaagttcatgcttccaccattatcttcttggttaagaggacgcacgtctcttggtcttccaggtcgattttgtacttcggtcgacctaggtcttatctttgtctcctaactgcagggtcatgaaggcagctctaatgaggcctctaaaatgaactctggatcgtctcgggatgacctgttgtgagagtgttcattcagagcattatagtggctacttccctcaatatagtccctagtgggatcataagtgcaaagagaactcgttgctcaggtttaattcctctccatgtactcgagagaagtattcgtattgttggccatccaggccacgagcaaagtaacaacacaattcaccactttcatctcggaagaacttctgagtatgaagtggttcattggtccttactcgttggatctcgtagcctttagtttcgaagtagtgtctcctactacttccttcagtttagggtctcgaggtctaatttcatgagaacaatgagaaggacttagtggaagagtcatgttggttctctcattatagcgaggtcattcaacatccggtggagggcccattggttggcgcccacgagcttgaaccctctcgggctcttgttcaaaggcactttccctcttagaagtctccacacctggtgtttgcttagtacttgctcggttaccaagtgtaatagtggtgttccaagtgtcaagggtttcaccttgagcactagttcccacatgaccaattggtcgacggggagtctttatcaccaactcaaaaaaacccatgcaagaggtagttccacgattagagcgataagcttctctaatctgttgagaccggttagctctccattgttcctgatcaacgtgttggctttcaattttcctctagtttttcatgaaccagtgttgaaactgttcatgttgcttatcgagagagtcttgcagctagtggtggcaaaacgtgtcatcgtgtcgtgttcgtgtcatattttatgtgacccgctttatatttcgtgtcaagcgtgtcgatccgttttttgactcgtg

SEQ ID NO: 119542 - DNA, 1103 bp, Cannabis sativa
tgattgaaaaaaccatgatgacgacgaggaaaaaactccaacttgattttccatgcccaattcatctaggattgtaacaaagcaaaaaaatacccacttgagaccacataattttctaatttaagtatgaataaataaatataaccgcacgctttgtttcctaattttaatcaaagccatgctcattcacacatataatcaatgatatttatttattttcgcttaaagatgctatacgctttgaaactttaataattaaacttaaaaaaaaaatccaaaaaagtttttaggttgttaatgaccacaataaaattcattacacacaacaccattgtccgatcgattaattaaataactaattattaaaggtatctcagtcaaggttgcatatataaatttgaaagtaataagtgcacccacaccaccactaatccaccattaattaattttaaaaaaaattatacataaatttataaataagtaacctcaactcatttcataagagccacaaaggtgccatcatatatgttcatatcatcaaacaaaacaatttttattaaaatatctatgttaataaagcttgaaatgacttcttaataattactttttcctttgcttccttagcatatttttaactttttttttcaaacaataaagcttcttaatcaatctctttatcagtttcatttgctatacaataaaaaataaagaaaaaaaatgttaaccaaaaaaaagatacaagcaaaaaaaaatggtatcgttacatttgtcaaaataatattccacttgtaatgggcagggcaattctggtcccaccattaccaagtctcttctctgcgtggcaacctctggttttgcatggcatctcactcacttccaccgctttaccactctacttttatatatatttatacataaagcctcttatataggaggtcaggtctaaagtctctttgggttcgcagcacattattctctctgtcttaaaagtttctatttttattgcagctcacagttttctgggcttaattttttttattttatttttttcaatggccaagggtctctctgttatgtgggtttttcttgtactattggtcttg

SEQ ID NO: 119543 - DNA, 2046 bp, Cannabis sativa
  modified_base (559)..(560): a, c, t, g, unknown or other
tcaatcaagaagatcaatacaataatcttctccttcggtaatgatctagggtttttttttagttgatgattattgtaccagccacgcattattaattttcaacaaattttttttttctaaaatgtgatgtgttaatttattagtcttttacatttctaaccaattaactttagactctaattcagactcgttgctggtgcaagcggtgcaacagaagaagcggttgttgtcttcggtggggcttttaatcatggactgtgttgctcttatgcaatcatctcatttgttttttatttcaattaattttgttaaacggtccgagaaccaggcggctaactttttagctcgttcttctggttctattcctgactgtatttcccgtgagggttatttccctgttggtttggaagctgatttgatttaataaaagtaaattttttggttcaaaaaaaaaaaaaaaactttagactctaattcacctatgcacatatttatatataaatactaaggccatctccaaccgaactctaaaacaccaaatatagtgtagtttcacacnntatttactccaatgggacactaaaactatactcataaatggatttgtctacagtgtcccaccaaattttgtgggacactgtaaactgcactatttttttttaaaaaaaaaattaataattaaataatacttttaagaagaaaaacttaatatttatatatatttagtattaaaatattcttattatattaataaaaagaatataaaatttagtgtaatttttagtgttgtggttggaattgaaaaaaattagtgttgaaatagtaattttttggtgttaatttaacactaaatttgagtttttccattagagatgccctaagtgtgtggaggatgtgctcctggcactgacatgtatcattcgtcaaaatatataggttataattatatattttacttttattaattatatttaaataattgttgagaaaaaattatatttaaataatgacatagtgtagtatatgttcatttattggcaatcattcataacaaaaaaaacaaaagaacaaaagaaaaagaaatctacatcaagttttacaattatgtattggaacataatgctgaaaattgatgcaaatatatcacaagttattttttttttttgctaaatataatacaatttttacatatctcattaaaaatattcttgcaaacttatatataataataacaaaaaattaaaattctaatcgaaattaataaaaatatatacatattaataacgaaaatgttacgcaaatgttacgcgacacatgaaagtaccaatcactacaaaaggtaatatattattattagtgcattttaatatcagttcccacaaattttaatttaatattatttaaaaaaatattaaccaattattgtgtatgtggattggcaggttgagtgagttgtctatcccgaacattatactatgtaatgactatgatgtctaatttgctatttataacgcttcatttaaaaaaaaaaaaaaaaagtgtatgagatattgtatggtattgagcaccttaaggtgtcacataacaataatagtacaaaaaattatttagaaaaaaatagtacaaaaattattcataaaaaataaaaaaaaataaaacacaaagtaaaaaagaaaaaaaattactaaccaattattgaataccatatcgatatgatattgaataccttaaagtattaatagcaagtacaaaaaattatttactaaaaaaatatataaaaaaccaaaataaaataaaaaaaatagtaaaaaataaaaataattttcttaacatccatttatatatggatgttaaagatatgtaaattttaaggtgaggcaattgtccaatcaccttggcttcctccatagttctagtaaatgtcatataatttataataatgaagtatttgttagggtttataaaacacttaagaaatatataaatcacagatctaaacatattcataaagtgctttaatatagaaaaccctaaatcataaatcta

SEQ ID NO: 119544 - DNA, 1273 bp, Cannabis sativa
  modified_base (1245)..(1248): a, c, t, g, unknown or other
cagcgttagttgcaataggggtttttgtataattttttgttgcaatttaggttgcagcgctagttgcaatagagatttttatgtagaatttcgtcaaaatgcaagaaaaaaaacaaaaaactgtttcgaagtatgaaaataaaaaagtcccaaaaaatttttaattataaaatatatttgtaaagttttaaaattataaaaatacattttatttaacaaaaaagttaaaataactaaaaaatatcaaaaaataaactcacaacaactataaatatattataaaataataaagaaaactagaaaaacaatctcacaacaacaataatacaactataaataaactaaaaaataaacaaacaatgacttattatttttattgaatatttttgtaaatgaaaaaattcaaagagaaaaaataaatatttttccgtgttgatatatttttataatttttttttttcggacttttaatttattatgtaactttttctatttttaatatcgatcccattgtacgttagaaatatgagtaggataatttttaccacatcacatgctaagttttaaatgatcctaaatttatttaggatttttaatgttacgctaccaagaacatttatgagggaaggagtatccaaatccaacctctccataattctgggtgaacaacaataacattacttccaccagaaacaaccactactatttttgaaacaaatacctaatatacaatatatacatatcatacctcaatgtaaattatggttttcatataatccattacatgtttatttatttatttcatttagcttatcctttaaaaatttagccatttaaaattattttgtcattatcacaactaacattcaatcaacaatccatatatcaattacttttattaatttttttagtgacgatcaataagtattactcattaaaaagtattccttatatatatagccacatcttctttctctctgtcctctttactttacttttatgcttatagtgactttttcagccacacactagacatatagttttagagaaaaaattaataaggtaaagtttttgaagagagatcattacattagttgcatttaattagttatagataaatataatttaaacattcttgatacatattaatttgtttatagctagctagatttaaggctaattagtaatttttcccctgaactttgacatgtaataaatcctgcccttgaacttttttggccgttnnnnattccccctgaactattgagattgt

SEQ ID NO: 119545 - DNA, 738 bp, Cannabis sativa
  modified_base (650)..(650): a, c, t, g, unknown or other
  modified_base (700)..(711): a, c, t, g, unknown or other
agggcaagaaaattctttgtgggcgatatggtccttagaagtattcctgaacacaaaagacagcccaactggcgtgctcggacctaactaaggaccatgccaagtagttgaagtcacagaatctgtagcatacaagctgggacagtatgacgaaaacatggagctcattctagtaccaaggtattggaatagagaacatttgagaaaatactaccagtaagtgtataatgtttgatgacccccttcaagtacataatgctagaacatctactcttaagtagatggccttttgagcggatcccgctcaagaatttggataacatgactgacactcaggttagatgaccatcactaaagtacagtctagaaaatgcaattgttttatgtttttattaactaaacatcagttagatcatgtaataggtttcataattcaattaatgtaagttactatggtaacaaaattattcagaccaataaatgaataacgatattaattatcattctaattgtgtcaatcatttttttatagcaagaatgaatttactatttaaatgtgtagaaagggtctgctcaaactcaaaggccgagcagatgaaaaccgaacttgtgaaatacaactgaccaagatacttattcagtctaagganagttttatacatttttggcattgttccaacatttattaactactagtgtnnnnnnnnnnnnaacacagaagtagttgccaaaaagtaa

SEQ ID NO: 119546 - DNA, 799 bp, Cannabis sativa
  modified_base (26)..(38): a, c, t, g, unknown or other
agggtccaatctgtaacttttgcaannnnnnnnnnnnnaaatagtatttaccctaattttattaaaggtaaaattgatatagtcaatataaatactattaccatacttttataatagtgagatatttgatatataaaaaaaataaaataaaattactttatcttatattactatatattttctttagttctctttctttatacaacattataatctatgcatttcttagaatacattataatttcctcatgttcatggatgggcatgttcaacggactccatcatcttcctaatttcaagtctaaaatccaattattacttacatcttagtggaataagaacccgaagaaggtggagagagagagagagagagtttcttaatggtttgggcaaaagaaaagtcatgttggtatagaggagattccattaactcttgacttgactcttgacttgactattcactcaaaataaaaaaaaaaaaaaaaaacaaaaactcttgacttgactagcactggagtcaatggtcttgtaggcgtagactttgaaatgtatgagcattgttatctatttttatttttttgtatggatgagaattttcatctattgtatccactgaaaaatcatttaacaatttataccacatattagtaatgtaggactaactctaatacgtttattattgtagagcataaacttgattactagggtccatttggtacacatgactggattggattagacaggttaatttgtccaatccagtgtttgggcatgctagaagtctggataactaatccag

SEQ ID NO: 119547 - DNA, 729 bp, Cannabis sativa
atatttatatataaaatggaatagattttttaagatttcggaaaaaaaaaatagatttttttaagaaattgatgaacagtaatttggaagaaaaaatatgattacattaaaggaagtttatctttagaaaaatggagagaattttacacaaactatcatttttggctcaattttaatatttataccgtcaaaataattttttttatattattacaaaacctttttttctgtttatttttaagatttcatattttcttaattataattctataaatcttaaaccaatataaaaataacataaaattacaataacgtaaaaagaaaaacagttcgtatatttaaaacaaaaagtttatattctgtaaaaatattaaatttcgtacaatcttttatcttttctaattaattatgaaaaaacgttaatataataaaaggaattaaaataaggtcatatttaagaaaaatgaaaaaagctttgcttaatcttgagatggcccatgtattatatcacctggtttagtctcttcaccaattaatgggctcgaccaggagacaaaccagcctagactggagactatgttttgccttgggcccgattctgatctctttttcaatttaatcaactttaaattcctccaaaaattttcttctaaggtggcgtttggttgggggtaatgaaatggaatggaatggaaaagaaacaattttcattccatttctttgtttggt

SEQ ID NO: 119548 - DNA, 999 bp, Cannabis sativa
agaggctacatcacacttgaaatgttccccgttttcaatctttctttttaacagtccacaaattgcatactgaattagcagcaaccgaattcctcgcaacaagctgaaacagggaaactttcataacagattaaaaagaagaaaaaaacacaatataatgtgaaatctttgaccttaatactgatgatatcatataaaactataccccccttaaagatgtttaacatatagaataagagaatctgggttggtaatgttggtcatcaagacacttggagtaatttctgtagattgttgtatggcaataatggtcttggatcatggagtttgttagtgaacatgtttgaaaaatgtacataagaatggactatggagagggaggagttcatggagattttgcattgacttctgcattggctaagaaaaaaaaaccaaaaaagagtggagcatttgctgtttagagagctggtgatctctcaaataccaaccactttttatggtaatgttcttgttgtttctttaataaacacagagagatttcatgaacttcattatctttcttgctggtttgttcttatattttccgtataggctagtggttcctatcaatctaaaagacaacttccgcatcacagagatgatcaagaatgatacatgcttccaaaaaatttagtatattacatatcatcatgtaatcatagaaaagaaacatgacaggaacacaattgattcaaaaaactacacattccttcaacaaaaatcaccagtcataggtgataggtgtaagtgtaacacaaattaattgttttgatacataaaattgacctaaaaatcattataacaaactcaaacctcatgttattttttattaagcaaaaataaaaataaaataactgatgttatttggtactgtaagatgaaaatgcagcttctacatttctagccaatgaataaagagacagaaaccatggtaccatgaaattagaactttaccaaagt

SEQ ID NO: 119549 - DNA, 519 bp, Cannabis sativa
tcgaatccgagagacaagaccagaaagtgcagaattatcctgccaggcaccattcacttttgaaactaaattcagacaatccgagaaaactatttgtggggaatattgtgagtcaatgcaccacttgagactctgcaaaagagcttggccttcagcaaaaataggagacacagcaccaggcagctgatggtaatgagaagctaacacagcctggaaaccatgcttgaagatgaaaccagttccagttataccattctgttggtcgatggccgcatcaacaaaaagagaaggagtttccggtgatagggaaggagggtgttgatgttgagaagcaggaggggtgtgtgtagcctctgaatgcagattatcatcttggtgcttacattgagcagcactgtagtcctgtagataattaacaacgatttcttccacattgttagtaacaccagatttgttaaagagaatggagtttcgagaattccaaatctgccaaacaaatgtaatgaaaattgggaaatc

SEQ ID NO: 119550 - DNA, 2523 bp, Cannabis sativa
ataccgtctggcagtatttttgtaaaaaaatggcaaaagttaatataccatgtaaattttcctaaaaaataataataataaaaaaaactgaatgtgggccttcttcgagagaagcccaaaatcttcgatgtccacgtgtaaatcctgagcgagcattggtgtccatcctttgcatttctattggtccagtgacatcaccacttacaagtgatccacgtcagaagtctaaacagaagcagccgtgcacgtggatttatcttccacgtgtcagaatatgcttccacacctccattccttgctagctaaggctcacaaacgcgcttccttcccaaataccattaatttattaagttaaaaacaaaaatggattggctcattttcgtcaattagaaaatagactagattagcaaactctcttggagaccaaagcatcgtttgttgatggaattgggtgatgaattgatcgaaggtatcgattgggatgctttgttggagtgggagccccccgttctcactactgattcctcaacttcttcaccctcgtccgacccttcgtcctggatcgatgagattgaaaacttgttgatgaaggaagacgatcaggagaccactgatcccaaccctgaccacgaagaagacaacgaattttgtcaaaactttcttgcagatatacttgtagaatctcctgccaacgaatctgatgaggtccacactgccgccgagaatgatgccaacgtttttagcgatggaaattgtaattccggggaggaggcagtagctactgaggccgacaaccaagacgccgatgatcctgtctccaaaaaacgcagaaggtaccagtaattatgttcaagttactgagagcttttgaattgagttactttttgtttgattgtgttagtcagattaggttaaaaaaatatatcattaggtttttttattaaaaaaattataataaagtaaaagtactgtgtgtgaatgtacgaaatgaatgaatgaattagggtggtgtgaatataggcaggtgaggaatagagatgcggctgtgagatcaagggagaggaagaagatgtatgtgaaggaattggagatgaaaagcaaatatttagaaggagaatgccgaagattggggcgtttgctccaattttgctatgcagagaatcaagctttacgcattgcgagtagtagttcttacgcgtttggtggttccaccacaaccaagcaggagtctgccgtgctcttcttgggtatgtatcatcagcactttttgttttccttctttggtctatattctttccataataatattgttacaaattatgagtgaatgaattgtttatgtttggttacagaatccctgctgttgggttccctgctatggttagtagtgggcaccatcacatgcctgtttaccctgccactcacccctcctcaacaaaaactactactaaatcaaaatcaagaacaagatctaagaaaatcaagaagtgagaattatgggttttcaattcaatcttttgtaaagagcaggagatgcaaagcctcctggcccaagatgaaatctccaccaacctttcaatttcatgcttctctccaagttttttaatatgttcagtaatatggagcgttacttaaaataacttttaattataattagtatttgtatctgtatttcttgctctggtttggattatttttgttacttgcatagctagctagtttaattatttaaaattaaaattgagaaccaatttaaaaaaaatggaacagggctaaagatctttctaaatttgatagaaaaatcaactttttgtaaaatatggaaaaataaacttcatgtatatatcttggattcttataaaaataaattctgcattaaataagtagtatattagtgctagagattgacacaaatcaaaattataagaagatagatctctatggatatgtgtatcaccaccttacttgtgaaagttaagatattgatatagtatactatactgtatatttcaaaagaaacaaatttgtattgcttaaatgtggtttgtaaattcacgattaaccgctagctcaagtggctataggtgggtgtgtgagtgttggaggtcctgggttcgagtcccaggtaaaacatgatgtaatatataaacgcttgaatcaaaaaaaaaataaatgtggtttgtaaattttgaagaggtagttttaccgcactatgttagttagtaatattttttaaaatttattaaattaagttctgtttgggaaccattttattttttgttttttaaaattttacttaacaaaattttggagattcttcatgatttttgattaattaattaaaaaactgatttttttaatggttgccgaacactactttatattatatagaatttaatgggaaaattatagtaaatggtttcaaatcataggagtatgttagtttatgtctttttttcaaaaaaaatatagcaaatggtcctaaatcataagactatgttagtaaatgtccttatttcaatt

SEQ ID NO: 119551 - DNA, 1754 bp, Cannabis sativa
gtttgctctccatgactgtccttgtggaaatagattatgatgtattttgctaacaacatattcttcacacacttcggcgggagctgtgatcgaaggaagactagtcactatattcttttgttgcaaagtcttcaatccacaaaaatcaagtgaccatagtgaaaatgccatagccatgatgcatctttaagttttgctgatatgcacgaatgagtagtattgtggagataaagtgggaacattcgattcaccgtcatgttcactttagcaattaagcccaaatttgtatagtcgattcgacatactccatctttaatagaaattttgtaccccttttcttgtagttgacccacactaagtagattggttttcaaatctggaacataaagaacattagaaatagtgtgggtagaattttctttagtttggatagttacccgtcctttttccatgacgaaaattgtggagttgttgccaaacttgacggtggtgcgaaatgattcgtccatcagaaaatgctttcttatttctacacatgtggttgctgcagccagtatccaaataccacatgttttgttgagtttcttctttgacgtggcacaccatcaaagagtgatacttcttcttctttttctgcaaaattagttctctctccactttgtctgtttaaattagtatgacattcatatttataatgtccgtacctatgatatctgtagcattccacattagatttgtctgctgacttcaatctatttgattggtggcctccttgtcctcctcgtcctcttccatgagagtcatatgaataattgtcttggttttggtattgctgttgggttccacggtcatttccacctttgcttctacctagacctttgcttccacctcgtcctctatctcctcttggctttgaattattgtctgatgaggcttttaaggcttgctcctctttctccttctcctgctggttgagtttgtgctcatgaactaataaagaaccttgcaattcataaattgaaagttcatcaatattatgcgcttcttctatacaacaaacaacataattaaattttggcatcatggtgtgttgtattttttcaactacaatcacgtcctccatcttgtcatcgtggatctgcatcttgttcacaattgccattgtccgagtgagataatttgacatcaattctcccgtctttattcgaagtgtttcgaactctatatgaagtgattaaagctgctacctctttgcttttgtagagccttgatattttctcttcatagaatcccaaatatgcttggaagtgtccttgtaaggaatagtctccaagactgtgtgatcaatagcttggaaaagataattctttgccttgagatgtttcaaccaccgtgcttctagctccgctctttgtccatctgtcactgttgtaccgactgttggttcagtaactccttcggagacaacttgccagtactccttagatctcagaaaattctccatcaacatactccaatgatcatagtggccgtcaaagcggagaattgtcggttgaacaaagttgtcagccaaattgctgctgcaaaataaaagtagaagtgaaattgaaaatatagctcttattatatatatgtatatggaggaggtttcaatagttgcattattattgtaaccattatgattacatttttttagtcattggatcactattaaatggttgtgattaatttgaaaattaaataaaaataaataa

SEQ ID NO: 119552 - DNA, 1424 bp, Cannabis sativa
tagggcacaaaacccaacagaccgttcaccatatataattaaatgataggatgatctgatcgacctatccaatggatgagtcctatctatcctgaacaaccggacggcgaatagtgtggataccacgtcattcatggaaagtttcataacagtagaagatccaatacaactgttgacccaacatgataggttctccactgcgtacactaatgatgagataaatattatgtgtgatcgttggattcattacgtgaaagtgaaaacgaagcgataacagttcccttgttaattagtgtgtatatatctcgatttattgttactatatatatttgtaaatatatttagatgattataattatcattaacttaattatagatttttaaatatatttagatgatattcgcgttaatctaatcattgtgactatacagtatttttaaatatattttagatgatattagcattagtttaattattgtgactatacagatttgtaaaaaaattataaattaatacaggggaaaaattgcaaaaaatctttttttttttctatttttctaatgtaacgactaaaaaaaaacctttgctgaaaaaaactaaaaacggtaactagtactataaggcatggtttaaaatcatcgggaattccacattggcaaaggttttgaaccgtcgcctattcttccagttttgcgaaggcgacagttatagaaaccgacgaaaatactttaaacgactgttttaaaatgtcgagaaaaactatttttatagtagttatattaatgattggtatggtaatgtaagaaagaaaaatagcatttttgtactttaaccacaagaaaaaaaaaaaatagtatttaagtagaagaaaattgtactttcaattaaaaagaaaagtatgaatcaataaaaaaaaatagtagaattttgtaaattttaatattttagccaaaatttcccaaataagtaagatatgtaatgattttcaattctttaacctcttactattcacacgcacgccaacgagacgtgtgttttaaaagtgttatatcaatgcgagtatgcgttatgattatctgagttgaagactttggaaagatttactatcacttaaaaggcaatatccaaaggactaccaactaactcaatttcgttttgagaagataaggatgttatacaaaaagcataactaattattagcacatttatgaacaaacctaattatttggtctcaaggtcaacgtctcaaagccgaacaaccatatgaagtgaagatcaagattaattagatatcgtgttctaataatattattaaataaggtgccgttgggtaacacttttattttttaattttttaattataaaataaaagtaaaatttttgtttttcaaaaatttatttttgaaaaaaaaaaatgcgttct

SEQ ID NO: 119553 - DNA, 785 bp, Cannabis sativa
agtgacaaccgtgagtctctccatcaccgaaatccaagggagagtttagaaaatttaaatcggcgatcgattgatttaccgaggaagaagaagacgaatgtaaagcattggatgttaaattgacgaggaattgagaggccgatgtgaattcatcggctagaaaattagattgagatggtggtaacgacgatggaggaggcagacagctactggtagtgccggagggaaagtgtgatcatcccatagagaagaatgacctgagttgcttgtgttcaggagaagaaaatcgtgtgttatgtaagtgtaagggtattttgggtacagtatggtatgtttgaattaaatttgatttagtggtagatttggttaataaataaaaaaaagaggcatttctcaacatctccctataataggcgtgtggagtacgttccacaggaacctaacccacgtaaaaacatgtaggcaaggccggccttaggcataggcggattaggcccgtacttaaggcccactcatttcggaaggccaaaataaaaaaataaaaaaaaattattaaacttttattaaaataaaattatgtgtattataaatagcttagttggttgaagtgtatgacatattatacaatgtcataagttcgaattccatatcactttttttaatttttttttttatatatatgggccatttacaaaaaaataggaaaatgacgatatgttttgatatatatggcataaaaatttaattaccttaaatatgacattttaaaaaaaaaaaaacttaaa

SEQ ID NO: 119554 - DNA, 2258 bp, Cannabis sativa
  modified_base (37)..(61): a, c, t, g, unknown or other
  modified_base (2219)..(2224): a, c, t, g, unknown or other
ttttagaaagtttatatttaggatgttaataaacatnnnnnnnnnnnnnnnnnnnnnnnnngtaaaataaattccaacaccatttgcttgatgatgggccacgacagagaagcttttgatgatgccatgtctgttgcaaaaatcagtgaacatgtcactgtcaaactgctttccattgtctaacacaatcttctgcggaagttcgaattgacatatgatgttcttgacaataagttcaaggaccttgttggaggtgattattgccagggtttcagcttctgcccacttggtgaagtagtctattatggctatagcaaattgtacccctccttttctctttgggagttgatcgattaggtctatcccccacactacgaagggccaaggagactacatcatcgtcagctcattaggtggagctcttggattttttgagaatctctgacacttgtcacatcttttgacgtagtacatcgagtcctcgatcattggtggccaaaagtacccctattagagtatctttttggataggcttttccccccagcatggttgtcccagaagccttcaggcacttctatcattcgtcgctcagccttagccttggtgacacatcttaagagcagcattgagaaacttcatctgtacattgctccgtctaggattagatacctagcagcctttcttcttatcatttttgcttcattcttgcctactgacaaggcttcggtttggaggtaagctgcaaaaggtgtcctccatgttggactgtcgtcaaacatgtcgacttctttagggatggtaatactaggtttctttaggaactatattgttaccaggttttccttgtctgtaattgtgctacttgccaaacgggaaagtgcatctgctgtagcattctactctctagggatctgcctgattgtgtagcctttgagctaacttaacaagtcattgatcttgctctagtaagccaccattttttcacctcgagctatgtattgacctaggacttgattcacgactaattgagagtcactaaatatttccaggtgtcagctcgtgctttatgtgccatcttgaggccggctattaagactttatattcagtcttgttgctcgaggctttgaaactgaatttgattgctccatgtaagtgctgccccaggtgttataagggcaatgcctgcactaaacaattggtcagtgaatcttccgtcaacatatggagtttccatgttggttctttaggtttttgctgttgttcttgctcttgcttcttctttggctcttatttttctcgtaaatcttgacaaatttcaagagatgaatttgtgcactcagcgacgaagtttgtaagggattgaccttttatgaccattggttgatatatgatgtcaaattggccaagctcaatggcccacttaagtagtcagcctgatgcttcaggtttctgtaaaacctactgcattggttggttggtgtacacctttatagggtgtgcatggaagtatggcattagctttctagaagccaagagcaagttgtaagtcagcttctctatgagtgtgtatcgactttcagtgtcaattaatctcttgtgatgtagtatacagggtgttgtacaccgtcttcttctcttgtgaggacaacactcacaacatgttatatgactgctaggtacacgcctaactcatcattgacgttattcaactcttaacttctttattgacgacattcaaatttagtctataaatgcaatgtaaaagataaagatctattcaactatttatatcaaaatatgtaattgttaattaaattctaatacaactattacaaattttctttatatgcataaattcattactcttttatttttttaaaaaatgacgtactgtactttggtaaatgttaattcattagaacatatacaaatgagaaattgtaatgaccactataaatgagaattctacacaatagtaattttttttgtgtgttatattaagagtaaaaagaaaaaaagtttagtagactaattgctcatattataaaaaaattatttaaaaaaggatattggtggctaaaccatctgaactttacagtttgtaacagttaaccataaaaaccgaaattttggcaacataactacctaaatactggttccgttttgctctgcacccctccgtccaaaaatcacaattaagtgccacggtggactgtnnnnnngtacacacttgtacacgtggcaaaattttagtgg

SEQ ID NO: 119555 - DNA, 1458 bp, Cannabis sativa
tgatatatccgactgtgcaaaatcatcggcaataatagtatagtcgaaggttttaaacaatcacctatactataggcgatgatgcaaaatcgtcacctataatgctcactatccctaacaattttgcacaatcgcctattctacccacttttctaactgtcgaataggcaacagtcttagagacctacgggattactttaaccaactgtttaaaatagcctagaaaacttagttttttagttgtgagatgggtgatttaaggccactttctttgtgtaacgtggtttataagattttttctaaggttatggccaactatttttaggtggtgctaccacatgtaatttgtgacacaaagtgcatttatatcgggttagttgatttttgataatatcatggtttcattgagattatgccctacttgaagcataagatttttataaaagagggggtcatggcatcaaagcttaatatgagtaaagcatataagagggtggagtggaattatcttagatttctgcttcaaaaacatggtttttcacaacattgggtgcaccacggtgagatatcatgttgttcatggtggtcataagattggacctattgttccttctcgagagattagaaaggagactatttgcctccttacttattttttatttgtgctgaagattttttggtgttacttttacggtatgagggaaatcagttaataaaggggtgtcgtgtagctaggggtgttccatcaatctctcatatgttgtttggtgatgatagctatctttttgtccaagctaatacaagagacgctcaaagagtgatggagattctttatagatttgagaggatgttaatacaaaaggttaatttgactaaatctactactttctttagctaaaatgtgagtagtgctatttgggaggttgtttgtgctattttaaatataaatgaagttgaacagaatagcatgtacttgggacttccaagtacaatgggtaggaacaagtctactgtattgggttttttgaaagagaagatgagaaaacgtatacaaagttggaataataaactcttcccaattatgctaccagaattttccttttgattgtgggaacatgtcatgagttggaacaagtcatgtctaatttttcgtagaagtcatccacgaagtcctatcaaagaattttatggatgagccgggagaggatggggcatagtaaggaggttggtgattaggttttctctctcttcatgatttcaatttggttatgttgggtaacaagcctggaggtttctgactaagcctgattctttagtttctagagtctacaaagctcgatactttaaaaaggagaacttcctttcggtagatttgagtggtaattgttaggttataattaacctatatttcgggtctttaaagttagcattatctcgtctattggtgtcttttggagc

SEQ ID NO: 119556 - DNA, 836 bp, Cannabis sativa
tttttttaaattaaaaaaatcgtatatctccaaattttgatatttttttgaattgaacgtgttcttcttcggattcttaattgtttcacttttcaaatcataacagagagaagtaagtaaaggaaggcatcaatggctactactatggattctcccactgctgttcgaaagggtgatcctttcctttccttcaattttctttttccttatctcgaactgaaactagaaacaattacccaatttagggttttaaagaaagaaatattgggtctttatttattaatttttttattgatacattggattttggagcagtggttgttcatctgagagccactggtgatgctcccattctgaagcaagcaaagttcaaggcaagctttttcatggaaaagattcaattttgcatttggggttttctttttctgccaattgctataatttttaactgttgttggattattttggttggttggttgatgcagatacctggaactgacaaattcgccaaagttatcgactttttaagacgacaacttcatcgagacaccatggtagctactcatacatacatacatagatttatgatataccataaatatatttgtatacattgaaaactactaaggaagcttttgtttgtttggtttctcagtttgtgtatgtgaacagtgcattctcaccaaaccctgatgaatctgtcattgatctttacaacgtaagatttttcatttactccattcattcatccatttatctgccaattcattaaattttcaattctgtgtctttaattggttttctaagaaggtaggaagatgtttgtttcaactttc

SEQ ID NO: 119557 - DNA, 747 bp, Cannabis sativa
cacctcataccaaacgcccccataaaataaaagaatcaaagtagtacttagagatgcacatatatgacgaaaaattaacagagagtgttgtcttatttctatctccgtttatttttcataaaaattgagacgaaaaatttcttaatgagagtagagattgaatgaaaaattaaaaagattataataaaaatttaaatatataaaaatatcaaattgtgccgtacacattaattattatttaataaattaattattatttaaaatataattcaaaattcataaaaaaaatattaatgtactaataaaatataaaatattattaaaaataaaataaaatctccatcccgtttagacaaaaaataattcttattcctactttattctgtatatagacaaaaatctccaccaaggcgagtctcccgtggaacccgtccccataagaaaatgtacatccctagtactactaccgcaggaaaaaggttgacgataacaagaatagatcaaagactgggtttttcaccaatacttaaaccccaaagtaacaggttaggatttatcctaggagtattacattctagttctttcatgttcatataattcattcatttcgagtatttttatttaaaatttagttaattatcgtcagagacgacgcagtaatgaaagtgtggggctataactccagtaaaaaaaattcgtgttaaaaaaaattaaagtgccgtttggtaacatttttattttttaatt

SEQ ID NO: 119558 - DNA, 595 bp, Cannabis sativa
ttttataaagtagatgcttttttttaaccaaccaaaaaaaaaaaccacatatgtacgtactcactatcataccatgtgtaacactctaatctataggggcacaacgtgtgtgattttataaactagtttatagtaataatagattaattaattattaaaatctgtgataatattaaaaatttcactaaaataaaacactagtagtggacattataacgatactaaaactttgttccagatatccctgctataaaagttttaccaaaaaggactatatacaataactaatcaaaatacagaacagataacagtatgtttatttatttatttattcttaaataaaagtatatttatttattaacggtacaagttaataaagttaatactgtcgtgtttattaatttttttaaaaaaatataaaaagtttataattaaaatgttttccactccctcctcaaaagcataataagtaaataattttaaaaatttttaaacctatccaatttagtttgttatattttttttgttggttgatcgtgttttttatttttatttttattgattatttttcattttaaaaaatgttatttatcat

SEQ ID NO: 119559 - DNA, 897 bp, Cannabis sativa
  modified_base (393)..(410): a, c, t, g, unknown or other
  modified_base (605)..(630): a, c, t, g, unknown or other
  modified_base (701)..(712): a, c, t, g, unknown or other
attttcgtcgctaatagtcacttatagcgaccaattaataccagcggataattaccggcggatttcagcggtctggtctattaataccggcggatgtctccaccggtaatacagagatttgttgtagtgttaagatatagatttaagaaatacaatagtgacgactatataagtgaactatgataatgacaaggaatgagatacaatgatgacaacatgtgagatacgattatgaaaataagtgagatacaatgagacaacaagtgagatacaataataacaataattttgaatgatcgagatatgaaactaatgctttatggagaacaccgtaatttttttctacaccaccctatttatttattgttataaaaataggaaaattctacaatnnnnnnnnnnnnnnnnnntatattgatgcacccttatctgttttagcatccaaaaaaaatttttagtcaatttttttctcatggtcatgtacgttatagttatttaagacatcttgcaaaattttaagaaatttgaaaaagtttaacacgtcgaaaactatgttcaaacagtgtgttgcacgcgtgactcttttattttatacgcgtgtaaannnnnnnnnnnnnnnnnnnnnnnnnntattgtaaattattctgaatttcacaaaattttgtaggttatcttatatagctataacgtacatgaatatnnnnnnnnnnnngactaaaaaattcttctggataccgaaacaagtcatgggtgcatcagtacattttttttaaggggatgcattgtagaattaccctaactttgttatccttctctaggccaaacgaaccacggaaccaaaccccactactcatataaccccaacctcgatcccccgcctctctctctctctctctc

SEQ ID NO: 119560 - DNA, 1448 bp, Cannabis sativa
ttggatcggtttttaattgaatttcgagattgacatccaataactgatccaatccaattagaatccaacttttagcatctaatccaatctagttataattggatatctaatttttcataattgaattcgattagatcgattcggttcaattggattggatgttgtccaccccttgttagtattactcaaacaatctttggaagtatagatattttgggaggtgacttaaatattagaacttgaatctatacaatttaaaaataatttaattattttgaaaactttaaaatatgagcctcacatcaaatatttggttaatttataattttatttttttttaaaaaaaaatatttttagaattataaaaaaatgaatctttatcactgtcgattgaatggtaggacaataagagtcactgcctcgggccccaacccaaagaggcccaattatttatttatttatttttatataaaaaaaaactatgaaagctcacacatttttaggccaaatttttaatgaattgtattgaaatttagagtttcaaaaggctcaacccaaatgtatctttaaaaaaatagtctaatttagtatttttttttattttgataaatattcatagttgcctattgtatatataattaattgtacaaaatatattttttaaggctccaaaattttgtcttaaacccccttaaagcttgaaacgatcgtgtttcaaatctttactttagataatcacacaagagacttattatattatttttactatttaaggaatgtaaaaccttattcgattatctttaaaaaaagtatgaatttgtatccattcaaaaatgaaattagggttttttgtttctaaacctaactctagaaacattgataagccactatagaaaatagttacttatttattatttagttgaaataaataattaatacatttaaattttattttagaattatactacaagcattaaagtctttagttaatttttcacacttaagattaatattaaataaattttattgaaaatcataaagtgttcaaaataaaattatttaaataaaacaaactttaaatgtgcaactaaaatttggaacaataaattcaaaattttaaactaaagttgacttcttcattgctcttttaaaattttcttattccatcatgaactttgcaaaagtcgttcttcgaatcatcttcgtcttctgtttacaaatctacaagcaagagagaaacaatgtgagtggtttagaataattcaatccaccattattaaataaaacaagaagaaaaactaatcatatttaccttcctctccaactttgtaactctgtcaaaatgtcgatcttcttagtgttgaccgaggttttcggcaactaataaaatattataaagttagagagctgtaagaaatttagaaaaggattttttacgtggttggggc

SEQ ID NO: 119561 - DNA, 707 bp, Cannabis sativa
  modified_base (676)..(682): a, c, t, g, unknown or other
gatatcgtaaaatggcgatttgataatcaaatttaagtgaagatcgattgaaattaatgtctaatgaactcctttaaggtaaatttaaggtaagtcttatcaatgaaagctttaatggattggtgatttatgagaatgtgagtattacctttatgttacttggcaaatgatgtttaatttttattgtaacaagttactattcacaagtggtttggttgtaaaccgatttctttcattctggatttttcttttgtaatgaccgtgagacccaaactttataatctatgcccgctttatttctcaaaagaaaggttactatttctattggtgagtagaaaaggtagacaaaaacagttactagtaacacatacccttcttgttctggtgtttgctgcttcaaaacaagcttaatttgttttacagcagtgttaataatgacatgtctattccacaaattagcaccccaatttggatttcgatcgagctaagatgactaatttattataattcaatcaaacagatagaaaattaagctcataataatactattactactacactgctctatacaactgtaaaggtaataagtacatgatagttaccacaaaatgttgccacaaaagtatcacatagttaccaaaaaaatataggagaaattacactctataccattttnnnnnnntcctcttttatttttaccctctttt

SEQ ID NO: 119562 - DNA, 1383 bp, Cannabis sativa
ataagtgatgaaaatacttctgtctctttattgataattgaatgataaagattacattgaaatagagtttttttaagggcacaaagcccaataccaacagctagggataagggaaatttaaaaaggaaaggccctgggacgacacgcgtgtgaggcccaacctatacaatctaacacctttaaaggtcatatggagaaaaggtgacctaccaaatcaatggtcagatttcacctgaggatgatcaatccaagccagcacatggaaagaagttggcctataaatacccctataaaacacacgatagagcaagactcattcttccaacttttggtaaactcgcatgtagtaagctaaataatatattgagaaactctacaatatccctactaagcttcctcttctttaggaggaacacaaggaaaaccaagtttcagtccattgtatccctacttgtataaacagttaccggccgatgagcctaatataatgaattccatgactaaggatagttaacgcctaaaccacataaaaatctcttgtttgttatcatgttatttattctgctatttctttcctaagctttaaatataataagttgccaaaaatctcgataaacattttggtgctttaattgagagctaaagtaagagagaaccatgcacgatggtcaccgacgcatgcctgtaaaaagaagatcatgtgcaaggaaagaagaaggaatgccgcctaatttcttgtgtggggttggtttgaggccaggagcgtgttcgtcagatacatcatcaaaaatggacacccacacccctatccagtcaaagaaagtacaagtgatgaacgcgtatggtcttgaaatgctcatgaagcctgtgcacgctaatagaagctcaaatctggccagccaactgcctaaggaaatggctaaccaccggtctcctcaaatcgaagtccctcgctgtccaatggggtatgacagacacgatgaggtgtaaaaggtgttggggctgggcaaagaaactaagacccaatgcgactacgatgaataactcgcaaagggtcatcagatataacaactctatccagctcatgactttggtactggtgctgatgcaagggccaaatccattgccaacgactacttcccctgccttttcactacgtcacgaagttgatcgaacactgacgttgaaagatcacatagtgacgacggctgagttaataccatcagtatcaccaatgcctgctgggtttatagttaggtctggttatggtaatgttggttggaactgtaatgaaggctttagtaagttggattagtaaaggcaattagcagtaatttcagttacttttatgattatttatgaaattaattatttgtggacccc

SEQ ID NO: 119563 - DNA, 1800 bp, Cannabis sativa
aatacgggaggaagatgaattagatcctcgagttggaatagaaagaatgatcgaaacactggaggatattgaggaagtcagcatgaatgaagcagacctgaacaaagtcatcaaggtggggcaaaatctatctccatcggcaaaggaaaaaattgtgtctgtagtgaagaagaacaaggacacactggcatggagccacacagacatgactaggattaacccaaacgtcacgtgccatgccttaaacattgatgagaatgagaccccagtatgcaaataaaaatttatattattatcattaaggtgttatgttcataacgtcaaactttggaatgaacaacattgtatatacacacatgaatgattcgataaactggataaatattgatgttctaaaaactcctcgttcataatttataagtccacatatatgttggaagagttatagtaaatatatgattatatataatatatgatgatattttaaaagagataacaataatcttatgagatatattatcaccaaaataattgtggatcatatgtgcataaggaggagacatattcatgttgaactctttttttcttagtttaagttttgtcccactgggttttcctaacaagatttttaacgaggctacttgaaaataattatgaatatgaaatatatattgcattcttttttctcttagctcaggttttgtcccactgagtttttctcacacgatttttaacaaagtaactttaaatcatgttgagatacttgtaattcatgagcaagtaaagaatgtgtacgactgagatcattgatgggtacatatgaattacacgcaataaagaattatcaacagttctctatgaaaataatattgcttgcattgctcaactaaaaggaatgtacatttaaggagatataattaaactcatttaatcaaaattcttctttatacatgattttcaagaaagtggtgatattgactgatgttcaacaaattcgatcaaatgacaatcttgcaaatgcattcacaaaatcattatcaacaccaacatttaagaagacaacatataacatgtcaaaaaaaaaaaaaaaagaagacaacatataagattaaaattcctcaattaaaagatcttcataaatgcctaaatgaggaagaattaatccacactacactctttttcccttatcaaattttttgtcctaccaggttttctagtaagatttttaataagacagatattatggatatttaaaagagggtgtgataaaatattattaatggatgtctaaattattaaattatttatcgccataaatgtttgattgtatttacttatattatattgatttgatttctcattcttttagttttattcttgtataaataggaattcatctattggaaagagttagaaattgtaatttactttctctttctctccatcttattcttcttttttttttctctattttaaattattcataataattttataacggaatttgaataatgaagaaaatatttatagtggaaccatacaaagaatttgattgataaaattatttaaggaaacttgttgttattgtaaaaaatttaacaaaaatataaatggttgatatttatacatattattgtgtaaaataagtgtgtatttaacattattctattacaccaaatgaaattagttgtatagtaattattattattgtaggaatttttaagataggattttactatcttgccccctacaccaacaaacaaaacaaatcaaatgataaggtcaatttcgacctttccc

SEQ ID NO: 119564 - DNA, 1199 bp, Cannabis sativa
  modified_base (55)..(66): a, c, t, g, unknown or other
taatcaagtggtagtattctgggtcctttatgttgatgaaattttgattattggnnnnnnnnnnnngaaaatgactaacatcaaggaattgcttgacactctattctaaatgaaagacttgggggaagctgcttatgttcttggtattcaaatcatcagaaataggaagaacagatctcttgctctctctcaaacaacttacattgataaggtgctagagagattcacaatgacaaataccaaaggggtagtgatgccttctagtcgtggtctccggttatcctgaacagatagaggacatgaaggacccagaatactaccacttgattacacgacaagaacatggcttgaaacatacagtgggtcaacatatccagtacacaatcacacaacatgggatgtaccacagaacataaaagatatccttgttctgccaccaaaccagaaaataagatttggaagaccaacgaaaagaagatttatagctgattgggatacaaaaaacagaataggtgcagcaaatgtggtcaacattgtcacaatctaaagacatgcaacaatcaaccaattaaatagatacaactgaattatttgaattgtttaaatctgtatgagaattttgacaggatgaaatgttatatttgatagattgctactaattggcaaagttgaaatattttactagtagttgcaaaatagtttctggatagttttgacacttattaagaatttattacataaataatttcaaaagaaatagttttaaagtcagatatcagatttataagttgtataatgagaagaagaaaaaagttgcataacaattggtaatatattgagataagatgtcaaaaattaaatgacaagtattttgactaccaaaaatagtttgtacacagttgcataataatttttttatagttgtacgattaaaaataaaccaaaaacattaattgtaaaatcataacactgttgttaaaacataaaaaaatgaacatattataatggttaaattaaaatatcctataagttgataaccagttccataatataaaacgtatagagtacctaaaaacatttaaaaaccaaaaattctctaaaatgaaaatcaaccaagaacaataaagtttcccttaaaaatgaccctactttttcaatttagaagccttggaagacttgttttgcttctcatcctcgct

SEQ ID NO: 119565 - DNA, 643 bp, Cannabis sativa
ttttatttttacctttaatatttagttatgttagttaagctcatattgtaacatatagcaaagtttattattgtaattttcattgaaggggttcgaacttctaaagttccttttttttttaatatcttgaattgaaaagcagagctaaatgtatatggctttgaattctgtcctagttggtgtcaaattcctttatgttatatcggatggttgtgtgggtcgaaaagaattgcccaaccaaatctcatttgggaggaaaatgcaaattggtacccaaaataaaccttttgaaagtgatttttcttaccaacttttcacaaaacagtactccagttcagttatgtcatttgactagtactaaaaacatcataatccaactataaaagaaaattttcagtttggtgcactattattttagagaaacgcaactaaatggccttatttttaactttataaatagttaatgtgcatcttttaaaataataaagtaaatgccattttttattttttaatcgaaatttctctactaagtttttatcaactatttttttattatataaaaagtattatatgttttattcttttagattttgccgttgttgttgctgtctaatatgttatttaagcatataattagtttttt

SEQ ID NO: 119566 - DNA, 1074 bp, Cannabis sativa
atgatgatgatgatgatgatgagtctattgaagtgttaaacagttttccaaggtatcctaaaaccagggacaagtctccaataccatgttctaggccccaaaagaaaattagaacaagtggtcctgttaaagcaccaactaacaacctatctcatcttagaaggtctaaagccaaaggtacttactctaaaccaaaatacattatttgtttagaaaacagaacaatagttttagtaattttatttctgcattgtcttttcatacctttgaagttatgaaaaagggaagcttaccaagtaaagtagacaaatctacccccaaaagatgccagaaaccgtcatctgtcaacagaaacaccacagctcttgaaagagccaatctctttgagtctgactatcctttctttgctattataatgaaaaagtcatatgcaactagtctgagaaattttgtaagtgaaatcttatatatagattgtcatttcaggcttccttgatcatgtaatgtatttcacttaaaaactaattaattgatttttgttttaatataaatttatggcagcatgtaccatcctggtttgcaagaacatacattattaagaaacaatgtgaagctagcctttgggtttcaaatggtgaatcttggtctgtccattacagagtcgtaggtggatcaaacgcagccgaattcagtgaaggatggaaagcatttgcactggaaaatagtttggaagttggtgatttttgcaaatttgaattgactaatagttatggcaatgaaatttcatttagagtttccattgttaagtgtgatgatgatgcttatgatgacttaggtgagaaagaagtgttcttaattatcatttataattcagtgtgtacaaaaatggctgtaggattaacttataggtgttgttttttagctgcaaagatagcagctacaccatctaagcgaaatgtgaaacttgaatcttctttggcgagcgatgatgaatccagcatgatttcaccaaacataatttcagataatgaacaagagaaattttctgttgaagattcaggtatgaatatgaat

SEQ ID NO: 119567 - DNA, 1607 bp, Cannabis sativa
tttttatacaattgcttacaaatacttagtgatttattttaagtcacggatttaactaacatgtgtacaaacttgtctgccataaagtctaaacataccattatggtatactctggttaattttttaagtgaccaagaatttaaattttgcttggtcacttggggagcacctaaacccgtatagataaaattgcacgagaagatatgttagcaaaaaacaaagaattaagtttgtgcaaaactaaaggttttattaggcaccaaaacattaaaagtttggaattaaaagttgtccgaccaaccgtgtgtctgcataaaaaatataaaacaaagtttacaaactgcttggtcagctaaattgtatcaagtataaggccattaaggctgaagagcaaaagtaaaaattatgaaaagagaaagcgaaggcatcttcaaaagtccattggagtcagaggtttctggtactcagccgataggatgtcatcttgctgttggatgaaaaagtttgggtcaattgctttagactactcggcattctcaccaatagcttcaccaacatattcctatctttcctcagctcctctttgactttttcctttccacagaactccaacatgttgatatattcctcatgagtaagataagaaaagttacctttgggattggccttccagaactcataaaagagtttgttgctgatagactcatacttttggttgccattcacgtgagccttcttcttgtcttttagagcctcgaccaatttttgagaggattcactcaagtctttgatttttccctcctaattgagaataagttgccaaagtccgtccctctcgttagtaagctagtgaaatctctttgcttccttctccaagttagcctctaatcactcaactgagggtatgttaacaagcttctgctccatgttggctatttgcttgttcacctcaaaagtcttcttatttacctttgtaaatctagtctccttttccttggcatcatctttggctacctagatggttttcttcagctcgctagacgaaattctagcttgggcgatagaggtcttggccctagagtgtcagtgaccaagcttcaagttcacctaaaaaatgactaattaaaaatatgttggtcggtatataatgaacataagccaaaaagatagaaaagctaccttggtaagctctctcaggtgacctctgactaggacatcaactgattgttcattagctcctcacaactgttcagtgatgtcgtacatgaccctatcctagtagtattacaccacctccttagccattttatctttagatcacacatgaatggttgatttggaagacttttgagccaacaaagtaggaaaaataggaagatgagtattggatgtccttttagatgatacttgaaagggaaatggggggctagtcatctagaatctcaacttcttcctcttgggcgggaggagcaagaggtggagtcaacgacatgcgttctctggaaggaggagtcacttctccttgtctcactgctttggcaggaggctattggctagaggttgttacgaaaattgtaaatagtacgcaagtgcacgtaatcaagta

SEQ ID NO: 119568 - DNA, 2780 bp, Cannabis sativa
taaaataatttccaacatatgcatgcctgagaatggaattgctaaataggtctcgcaagacagaggagaagatgggacaaaatactagaactttgatacgacaggtagtgaaaaatgtaaagtgtgaaatggctgctgagagtatttattaggccccaagaaaggtgtcttccatgaaaagtgaacggtttgactcgttcgcccaagggaggtttgacggttgaatgagtgggaagctaatgaggcatatcaactcccaactgttagcttctatcattgcatgcatcattaaaaggggaagcatgttcaatccaatcgtcgccatttttagcatcccacaaaaaatgcgcccagtaggctcgcaaaactcaaaagttagcatttaaagccctgacaaaaaaacaaaggcaataataccttctgacattgatacttcaattggcggctgatgacgtgatcagataaataattcccacgtgccaatagtcactcaggaagagatactgcaagctcccagactgtggtacgtcctagaagcttagggggtaaatattatccatgttttcgtgatcatgacacgcgaattctattcaggataggctaagaagtcattagctgaccaactctctcaactgatgctcctccgagaggataaaagacccagtttacaaaaagggcctccgtgattaggagttctctgattaccaataactcacaagtcatctgtgagctaaagtcttcccagtcctaggaatcgaagccatctgagtatgagttcttttcagaagggccaaggcatgttaggatacgtcaaaccgggctacacccttagcccacggaggctctgcctacacgtgctagacttcgaacctagtgactaggcttttttaggtacgatgtcagaggttgtctcccacgacacgttatcatacagagcacgcgtgtccttgtgtactagaccaaatgatccaacgactaggaataagataaattcaaaaaggaaaagccctaagataacactcgtacgaggcccagcttgtacgatctgacactgttaaataccatatgggaaaaattcacctatcgatccaatggtcgaattcggcccaaacgatgatcaatctgaggcagcacatgcaaagaagttggcctataaataccccagaaaaagcataagagaagaggaccttttttcggagagaagactcattcttcgctatttttttgggaaaacacatttgtattacacctaaagaacttcaatatattcctactaagcttcctcttctttaagagaaacacgggggaaaggagtttcagtctattgtatctctacttgtataaacaattacccaccgatgtgcctaataaaatggactcatggactaaggatagttaacacatgaaccacgtaaaaatctcttatttattatgttgctatttattctgttgttcctttcttaagctttaaaaatatttagttgtcgaaaaactcagtaaacgacaacataaaatgatttttgatcttttattaattagtaaatttgattatattgaattgagttttatttagggcataaaatctcaatagtcctaactttgttttgttgttggaagagccttggtggtgttaaacctccgacccattgaaccatgaaactagaaacaagaattcaaaggtagaagaacaatgaaagagaaagaaagaaagaacagagaaagaatggagaagaaagaatgatctcattaattgaaatgtggtacacgatatatacagcaggtaattgaatcaactaacagaaaacagaaaataacagaaatgagctaactaactaactattttaaccaactaactaactaattgttagttgccttaacacctcctctcaaactcataattgaatggtcttcaattttgagtttgctcctgaaagtagagaacctttgactggatatggctttggtttgtccatctgtgagttggtcaaatgcagcaacatgtttgatgtgcaccattttattccgaaccttttccctaacaaagtataagtcaagttctatatgctttgttctagcatttaaaaacagggttctgagtaagcattatagtgctaagattatcacaccatatagtagggggttgaggaagctgaatgtgaagttcagaaaataggtaatggagccaagcgagtttagctgtaacattagcaacactcctatactctacttctgtgctcgatcgagaaatggtttgtttctttttacttttccaagctatcaaatttgatccaaaaaatatagcataaccagaagtcaatttcctatcatctggatctgatgcccaatcagcatcacagaaggcaacaagatcaggtgactctggtttggtaaaatgaaggccatggttcattgtaccactaacatacctcagtattcgtttaacttcttgccagtgtgtggacagaggtctttgcataaattgacacactttattcacattgaaagatagctcatgccttgtaattgtgaggtactataaagcacctacaatggatctgtacgattgaacatatgtaagaggttttatcctggtgagatgataagagaagtccacttgtcaatggtgttggagaaggcttggatcctagcatttgagctttgattgcatttgacaaagatggataccattattcgtgaattaacctcaactcccaaaaagtacctgagggaaccaaggtcttttagagaaaattgtgttggaatttattttaccacgatct

SEQ ID NO: 119569 - DNA, 1199 bp, Cannabis sativa
ttattaaacaacatgacacttaatcctttggttagaggatctaaaaatatcaacttggtcttacaatattctatcacaatgtctcttttcttgaccaattagtctctaatattgagatactttatttctatatatttggaagcactactaatctcattattcttttagaaaaatacaacaaaatcagtgtaactatgattttttaaaatttttatttggaaaccaaatagtagttaatatttatatatatattttgaattagtagttaatccaaatttttagatactaattggaaggtttttattatgtttggataccagtaattatatgtgataccattaaatatataataataatttgtgacaaatttttaaataccaattagtaccaaattatatgcatgatactaattagaaattattgttttaatttttttgcataaattattattttaatttagatactattaagcacagattaatataatttttatatagaaataatgtggtattatttttattttagttagataccaaaaagtagtacttattctttaaattattaatttataccatatttgtaaggatgttactaatgggtatataatttatgtaataagaacatacaaattaaacaaattacatttatctaccactaaatattacaaatataaattcaaaaaaaaaaatatatatttagctaccacttaatataagcaattaagcatcctaaaaaaatataaatttaaatgctattacatacgttaaagataaaaatataattaagaaaataaatttaatatataaaataggaagtaaatacaacatatataaataaatgggtacaataaaataaaatagtaattaaattttaaatactggttacttaagttatttaatatgaaaaattgggtacattaaactatatatcatatattagtaattatttataataaaaagtatttagatgtaaatttttctaaattaaattcaagattaatccccaacccaaagaggcccaataggtccaattaggtacaaatcaaatgtatcttaaaaaaataatccaatttaatacttttttttttttcttatgtgttttaattgttggattaaaaatcctatgtgggcacatatgtataatgtatatgctattataaagtgtgatacaaaattaagtgaccaattatgttatgggta

SEQ ID NO: 119570 - DNA, 1246 bp, Cannabis sativa
ttgtgcattagagcacaattgtaaatagtggactaaatatagcacaaactcattttttgtgccaaatttagcacaaattttagatcttctattggagatagtctaatagtattggtaaaaaactaactagttataccttttataaaaaaataaaaaaataaaaaaactttatttttatatcatataattttttgttacctctaaaaattatttgtatatatcttaatacttaattggttatttttaaggtatattatggtaattataatttaaaataaatctaggcaaccttaaaaattctttcaaaattaataagttggcatataatataacaagctatcatttttatatactaattattttatatacctttttgttattttgaaagctagttggttatcgtataatataatataattcaattaacgctattctaaaatgaatgttaattaagatttaaaaaaatataaacggcaactaaccaaagggttctttttctggaaatagcaaatatatatatatatatatatgttttccacatttgaaaatatttacattgaagagtagatcacaataatatttttttaggctcatccgagtaacgacgtgaccagaaattatttttaaagtttgagggaaaagagaaagaagaaagagagaaatggtattgaaacatactcaaatagtggtcattgacttaacttagtggttccacacttcttctcacaaagagaagatctcaagtttgaatcctcctctcctaatgtcaaaaaaaaaaaaaacaaaacgtactcaaataaataaaaatattattgatacttgatcgagtcagttttgacaattaaataaaaaaaataagggatcaagtgtaaaatgctcttatttttattaggactgaacgtattggttgagtttgacttggactcgcccggacgcgacccggccaacctgtttcctatgggcaggtcgggtccaacctggtcaactcttttggccaggtttgagtttgatttttgctaacccgcgggtttagattgggcttaaatctgcccgcggatccaactagttttttttttctgttttaaatttaatatatataacataaaataaataatatatttttttatataagattatagtaaaaattatatataaatatatatacattaatgaacataaaaattaaaatataaatatgattttttttatattgtttttctcatatatattttatctattaaattag

SEQ ID NO: 119571 - DNA, 2173 bp, Cannabis sativa
gtcctcaggctttacataagtcatcgactacgatcctttttttttctttttttcggtatgatgtcggcactaatagctgatgaaagaagatataataggtagtgctaaaattagaaaagacactttagtttcattagtttaaaaaaaagtagcaaaaatctaactctaaagcccataatgtatttggtcctaagagttagatatcagtccaagtctttatttaagctcatctcatttaaacctagccctaagtgaatgcctatataaagaaagtgatgagaagagaaaatcaacctaattcaatgtcagataactctcttctcttctttctttgtaatttcaaaatccactatgcattctcactctctaaattgtttaaagttattttgagtatcaacctacactattcaagttgaaactcaggcctttgtggaagactgtgatgaacacaatcaaagtagagaagatctaagttcagttcttggtaatagtactctacaatagaaaggaacaagggttggagaattgaacggaaagagacataatattctgctgcaaccaatgtaaggttctttaaaccttatatgtgtttatttcatcattttaggagtgttcatatttaggttgttagattataaaattataatcaacatacatattagtaaatatagatactaataaaataatttccaacagaaatatcctagactgggatcttaaggtaatcaagccttcattggcgcaactagaaagcacccattccaatgaactgggatgaacgaatggagccagagactctaacctgcacctagatgatgaactttgtttaattatgttgaagatgaaaatttaggtacccctgtccgagatgatattggaactctgggattaatttattgatctgggtgaaaaatattacaaaacacaactttagtttatatttttattttaaaatctaaactttcattagaaaaataaaaccaaacttataagatttgaagagagcttgaaattgaactattccaaataaatttatttacctcttaacacttttcaagcttacttatgagctagtgcatacctctaatacttttctagctaacttttgagccattatattagcttgtcttggtacatgtatgatagaactaagataaacgataaaaagacaatgaacctttaatatctccatttacattttgaaagtagagaaatattgtcatagaaagacattactcgattagctacatctcgagaatcaaagtttatactagaaattagcaaggatattactttagaccaattgtgggcacaaagcaaagcttggccctcataaatagttttgatgaagttgccaacatcaagaactactaagtcagccacaaccatctctttatcacttcaaaccaccactccataacttatcctattagacttagaatcaaaagcaacatagtacatacacatttacctaaaacactctggtgagaaggaaatggattgtttggcttcataacttaaaaaattatttagtttttaaaaactataaaaaacaaatcttttaaaatttaataggatgtgcttggccaaatttttttaaaataattttctaagtgagttacaaaatacaagaaaatacattgtcagtgaagatgttagttaggacaagtggctcttttctgttaattgtcagttagtgagctgtgcgattaggaaagagttgttactctgtcacaactcctttatttaacagaattcagttagtattgtagtggattgttttatctataaatatcacaaagcttgtgtattcaaacacaactcatttcatcaatctcaacttggtatcactgctctctcatttttttttctttctttgcttgattttgatgcttgaagaagttttccatggcgtcttcctccgctactggtcttaggcctaaaggctcttcctcttccgctactacgtatactccatatatccctttcgtgcaagtcattccaaatcacatcgttcgtctcaatcttcaccttgatcaaaataacttcttctactggtgatcataggttctgtccactgttcgtgcacatcagcttgaaggatttctcagtggaaatcatccatgaccttcggcctgttgggttttatgtcctaaataaaacctatttcaat

SEQ ID NO: 119572 - DNA, 522 bp, Cannabis sativa
tatacaatttgaattttttcttaatctaattttaaaatataagtacgaggtgataattatttattaatttttaatgttttgtttaacaaaatagttagtaattatagaagaaataataatttttagtacttaatatctcaaacaaatacacaattgtgtaattaccttcaattacactcaattctaattcctcctggagtacaaaaaagctcattcgaatttcgctacaatttgtcttaaaccaaaaacataattaaaataaaacagaaaataataaaacctgattaaacatgctttcttggcatccaatcacatcaaaaagaaagaaaaaaaaaggccaattacctaatttaaaattacataaaactccattaaaaggaaataaataaagtaattaaagaactcattcacaaattccgagaaaatcttttataaacaagattattaatttaatttaatttaatttaattttgaatcaagctaaaataataataacataataaaagagagagagagagagag

SEQ ID NO: 119573 - DNA, 2730 bp, Cannabis sativa
  modified_base (2668)..(2703): a, c, t, g, unknown or other
actcaattgtactatcatgttccatgatgtaagaattaagaatttccacttggtcaactttaacgaacaagtcaaagaacacaaataatatagttaagctagaacctaaccatcttaggattaagatatattgatctaagatcaattaagtgatattgacttagaaagatataacaataagttcatgatatcttatccaagttcaatatcagtctagtctgatgtatactccgtacatttgatactagtatactttagcattgccctagaaaggtaataccacttatccaagtatacgtaaattttatcgctgattatcatgtaagtgtaaattcaatgcactgataaatcatgagacataaaatttgaagcatataatcacaattactttccactatgatgaaatcactaaaactgtgattaacaatatgttctagatttaacaaaatttttatatgaaacgataaacaagaaaataacatgtaaacttagatgacttctaatcttctatggacaacaaataagattatattgaaattatttttctttagggcataacatcccaatagaaatagagtacgaaactaagctcctagaacaaggttcatatgtagaagatagtgtggaaccagaagacaatgcgcagacggaaactattatggagttggaagaacaagatagaaaagaccaaactgaggtgctagaagggtttagacagacaagtctagttagtaggctcgtgataatacacggagagagatccatctttcagcaaggtttgtagaagcagacataatagcatttgcactggcgggagttcaacaaattgaaattgaagagcgtgaaagctatgaagaggaaatttcaagtggaaaaaagtctaaatggcttcaagccatggatgaggagatggattcactacgaaagaagaagactttggtatttgtgccaaagctagagaataagaagattgtagagtgcaaatgggttctcaatgtgaagaatgaaccagtgagtttcaaagccaagttagtggctaagagttttactcaagtggaaggtatagactacagagatatcttctcacttgtggtaaaatataagacaataaggttgatgttgtccttggtcgcccaaatggagtttgagattgaacaacttgatgttaagaccgccattcgaaatggattcgtggatgaagagatctatatgaagcaaccacctacattttaggtggaagggaaaggagtagaattagtatgaaagcttaatatatccctatatgattaaaatagtccctgaggtaatggaataagatattcgatacgtatatgactcaaattgggttcaaacaatccacatacgatcactgcttatatttcaagaatttagagcaatctatagtcgtgttcttattgctctatttggatgatatgctaatcatgagcaaagataaatctttgaccaaaattacaaaagcaaagcttataagagaatttgagatgaaaaagcttggatatgttctaaagataatttgtattgaagtctcatagaatcgaaggaagtgattattagcttaaagcagtgtgggtacatcaagaaaatcatttagaagttcaacatggaagaagcaaagagtacatccgttccattaaggggtcagtttattttttcgaacgaacaatgtcctagaaataaaaaagagaaggaagatatgaaggatttaccctatgctatggttctaagatgtttaatgtacgtgatcgtgagcacgagaccgaatatatctcacgttttaagaatcttaagtcggttcatgtccaatctgggcatggaacattcgaaagcccctaaatggttattgagatatttgaagggcacttagaattatagtttgacctatgaaaaagcaaaatgataataagaattgaaagggttcgtggacacggactacgccttgaatagaaataccaaaaaatcaaccacttcctacaatttcttgatgttatacccgaaatttggctattaatcagaagctgacgtgtatcctacacaaggaatatgaatcagctaaaaaaaatactaattaaattgcataattaaaagcaatttaaaataactcattccaattaattaaagttgatagaaaatattcaaactcgatgactacgtgagaatatgcaagaaaagaataaataactattaacagatataattgacgaggcaatatgtccggctcatataaagagagtaaataataagaacgtgcaagacaagaccacaacaatcttgcagcttattgacccacatactttggaataaaagcttgcaactgatcgacccacatacatgagcagagtgaaaacaactacactcaaccttctcgcttctacgcaacgtagtagtcatctcactaatatcattataacatgagaatgctgcgagaagaagcatgtctacacttgcatttttttcctctaaaaatagataagaaggataactcatactcaacgagtaacaaccttcatagttagcataaccatttaaaggataaagacaaggagaatttgggtagttattagatattatcccatgtgtaaataaatgaaacgtttcatcagtggttgtaagtgaatcgctccctataaaaataaggctaattaggatnnnnnnnnnnnnnnnnnnnnnnnnnnnnnnnnnnnncccctgaacttttaaggccattgaaaa

SEQ ID NO: 119574 - DNA, 552 bp, Cannabis sativa
tctctctctctctaaagatccactgctatatatgtccgtgttaatgacatcttaataaagctttaaaagaaaattaaagattgacactaaaaaagtgaggaaactattaagattgcccaacacaattgtttttattttctattttttaaaggttggattagtgccttccaccaacctcatcatatacataaataacaattacatatttttttattattttttttctaactaaattacaattagatatttgtgataataaactaaggatggcccaccctttgagcaattcgatggtcttgatcagttgatgccccatcgctggttgggacagaaagcttaacacgtggcactcatgttgtgcaattatattatatatcacgactcattttcttttcttcaaaatattttaataattttatttgtgtttttaatcaatttaattacacaatacaatatttattttattttatatttttttttctaattttaatttttatatattattattaaataaatcataaaattttattaatgacaatcaactaaaataat

SEQ ID NO: 119575 - DNA, 1057 bp, Cannabis sativa
  modified_base (48)..(52): a, c, t, g, unknown or other
ttaaaaacaaaaattttacttttactttgtgattaaaaaattaaaaannnnnagtgttaccaaacggcaccataacatgtgtttatgataattttagtagtttatacacacaaaatttgtaactaaaatataactaaatccttttcactttatattatataataacaatcaaaacaatctatgaagagatggtaagttgtatgaattttcttaccctttttcatttctcaatttttactacttatttatttttaattgttatttttcatttaatactaataaaaaaacgtaaggccttcaataatcataataataatgatttgtaataagtaacttaaattatttaataaaattaatacatattttattttttagttatttttcaaatatttctcattctttattttatgaaattttcacatttatttaaatattttttccttaataaacctttcattttttttatcacaccttttcaattattaataattaacttttattaacaattattacacaaattaatgtatatatctatttcatgacctttggtttgtaatcataattaattattacacaataataagtaactattatttttactatacattaggtttagcgatcaattttttcttctaactaacacactatatgagtgatgatatttattaattattatatataaataagtctaatatttgtacacatttatttatttattatttggtataaaataaactattactacaacaattgaaaaaaaatataaaaaaatgataattataaaaatttaggatactaaaataatttacattttttgatagattttgtagtgaaaaagaaaagaaactattaaatgataaaaaataaaatctcattttttttttaaaagaatgcctaatgtttttttttaaaaaaaaaatggactaatagtttaatacttaataataaatgggattttttctataataaactaaaaagggaagcaatttacatttataacctaaaaagaaaaaataaacataaatagaaaacaaaactttctatttacaaaaatacc

SEQ ID NO: 119576 - DNA, 534 bp, Cannabis sativa
atatatagatttttaagtttaatgagtagcattaaacagagactgctacgtagtcattgacttacacttaaaggtcaggtacttacgaaagttttagaaatataacttaagacttcttgtatatagtagtgatcaaaactaatcagtgatttgtttataacaagatctaatggttaatattatgaataaaaatattaaatatacaataaataatttattcttttaaaaaatacaaataaataagtaacttgttggtgacttgttgtatggttaatgatttttattgaattatatatttgattcaaataatgattctttgttttctttctaatccataaataattttaaaattaattattgaatattatagtgtcttttttataatttttagaaaattattatggagtttatttattctacacaaattgattatcacatcctattgtatgcatatacatgcatgcaaaatagtaataataatcttcatcataaatcacatcctatttgtataatatcaaaaaaaaaaaattaaat

SEQ ID NO: 119577 - DNA, 1445 bp, Cannabis sativa
  modified_base (1387)..(1404): a, c, t, g, unknown or other
ggcgacgtcagaccgtttgatagtagaatactttaatggagatccatccatcagcattggtcgactacgcaacgtctttaagagttgcactgagaaggatgatgtttacaagttgggtattgcgctatttgtgatgggtgttttgattgggaaagaggagaagaccctagttccgccaatatttatcatgagaatcactgacaacctctcgtttttctacaagtacccctggaggaagatttcttccaacttgttgaaagaaacttagagtaaggacttcgtagaaaagaagaagcatgtggataggaagattgaaaagggaataccttagaaggattcaaagtactcggccgatggatatgatgtagcattttagtattgagattatgagtccatcctagagcttgctgagaaatttacgattagaaaattgcatcgctttcccaggatggtgaattgtgacagtaaggaggtgacactcggcaaagatgaagtcatcagattgtgtgcaaaaaatgtacgttttttaattcattgtatttgttcatgtttatttatttatttcattttaatctaagtctaataatctttttgttcttatttgcagttgacagtgcaattcgttttatgttcgtggtctaatgaggcaaagttgttgaccaacgtcactggaggtgacatgcctctatttgtaggtatggaggaattggttgttggtagtgatagacaacctactcaggatagtttgcgcagtctagcttcgaagctttcacacacgctagaacaacgagcggaggaagctagaatcttctaaaaggatacaccaccacactctccactattaggcgctcgttctgttccatcgtctccatcgatatctcattctgcatctatgctgcagtcaacatctattcccaacacttcacagcctcaggaacaaatatcttctgccatattggcgagattggagcgtgttgacagggaataacttgctttgaagcaagcccagattgatattctgaaaggacaaacaaagattatgggttacttaaagaccctattagcactcatgggaaatccaagaaggcccaatgcacaggcagagccacagccaaaccccgtctctcttggagatgagttcatactttccaatgattaccgacttgatgatgtggaacatgtactccatatacctcagaacatgtcgatcacgtccattagagatacgtaagtttgagaggtacatgttttggagactgttccaacaatagtggagaagagaccgaagaagaggtcgaggtggtttgatcatacactgaaatgaagaagaagatgaagtcatcgatagtttatgtggatgttgacctgttggaattaattttaccannnnnnnnnnnnnnnnnncaagtatgttgatttaacaacctgaatatgaacttctaaaa

SEQ ID NO: 119578 - DNA, 1439 bp, Cannabis sativa
  modified_base (1239)..(1256): a, c, t, g, unknown or other
ttattagttttgacttaatatttattcaagccctcactcaactaaatttctggcttcgtcactggtggtactgactttacgagactggttttactgcaaagcaagcattttttttttcaaaaaagaaaatgtaaaaacaaatataaaatacattatgtcttatgaactattttgtgaataaaaattgtgtatcggttatgattttaaggaaggattaattgcggtaaaattcttaatacttttatttcgctaacaattaatctttaaaacttaaattttgatcataaaaccttcaaaatcataatactgttagtaatttacgacttccatccaaattactagtgaaataaaagtattgagggttttggttaattgagtctgggatgttttggtagagcctttatttaaaaaagtttttcagattaatttttttttcatgtgtatgttataattatttagagtaacctgtaaatttttaaaaaacttcaaatagtttatcgtgccgaaaataaaagttaaatattttgtaactgttttttcttttatgcatggtataagttattacttgaacttaaatttcgatataaactatttaaaatttactaatagtcctaaataattacaacgtttacaatcatgaaaaaaattagggttaaaaactctttgaaatatcgaaataaataaaaaaatctacccaaacattattttaaagagtgtactaattttttttttctataagtgatccatatttatgacacatttatacatttattcttatagtattatactcaataaatttagttcatatagatatactaaattataaaagtttgccttttagctaaattaatttttatataggaaatgaagtacttttaacttttcatgaacataaagcatctctaatagagtattatatcatttgtaatggatggtgtaaattttgtattaagtttgacttaaaaaataaatcaatgctatatttagcttaaatcttataattgtgcttcaatacaccaagagtgaaataaactatattttaatagaaacgtgtaaaaaaattaacaaaaatagtaaatttttattgaaaatatataaaaattatagggtgtttttacaatgcaccccttaaaagtaatgcgttgacgtaccccttatctatttctgcatttcagagaattttttattctagtttttttcataaacgtgtacgctatagttatttaagacattttgtannnnnnnnnnnnnnnnnnaataatttacaatatagaaagtaatattcaaacaatctatttcatacgtgtataaaagaaaatagttatgcgtgttacagactgtttgaaccctattttggatgtgttatttttttaaaaaaaatatctcaaaatattgtaggatctcttaaataactacaatgtacatgagtataaaaaata

SEQ ID NO: 119579 - DNA, 1802 bp, Cannabis sativa
gggttggctaagtggcgatgaggctgatgttagagaataatcactaaattttcctaagactacaaaggaaatcattagcttcggtccggaagtccctccgggagaacaagctaccctatcgaaactccgaaagtcaagcatatctagagttgtgataagaaaaagtaatgggtccagactcgcgctttggacgcattaaatgcagtatggagaaaacgcctacaaattactttgaaaagacgtgttagagctttaaaacgttattctctgatttcacactatgacgattgcataatgaacagtcaaatcatcagcagaagctaaaagtctatcttaccaaacacctagagcaagtctgggaattgtaaaaaaaatggacaggcatgccctattgtctaaatttgggaaatggtgcaagtaatactcatacaagtacagcaacagttacctttttaccatctttatgagcatataaatacccccaactacactcagtttaggggtcgagaaaaatagtgagaaattctttgtagagaactactgcattaataacagtgactcgtgaactaaggctaattaacgatctaatcacgtaaaaaatccttcatattaagtttcttctaatcattaaaatgtctctaattaatagttgttgaaactcttggttaatgttttggtgctttcattgagagttataggaagctttccatagaaggtaaatcatgaatagattcctggtacgatggtgttgactagaaacaactcacgtcgaccacatctgcccgaagatcttgtgggtccagatggagaagaagtggcttcaagggtagatgttgaagaacaagacaaaactaaggatcccaagtatgagggaaaccaagaagagtatgaggagtacaacgatggtaattataccgaactaattgcgttgagacaaaaagctactgaccatgaggttaaatttgcagaataaaaagagcaaaacaagcgaatgcaagagatagtaattgctatgaaaaaagtgatggaagtcacaggcattcatgtgcacccgaatgtgggccctctcgaacaagataaaatgggagaatgacattcttagccgtcaacaaatcaaaaataaaagaaccgggagacaagccctatctggttcccttttgaaagtccccccaagggaaatcctaaagctaatccggagaggaaaaaaaaggtttgagatccgcaaaaagtttattccaatccccctaaagggaaaggtccacatgggggcagattcccctagggaaagactagtcctcaggattggggagattggaggagcatattcatgcaccaagagcctggggaaagaaagggaaaaattcaaaaggaccctccgatcgatttaagaccaaaactcaatgccaagcacagggacctcaggacttgtctagaattaaaaaataaaactgtgaaagtttcgaataacactttaaatgaaggaatcctggctgaactcgctattctccgaaaggacatagctaaagtctctcgaaggcaaaaagaagatgatttagaatctgactgggaggaccgggagccttgcgccaggaatgtatttgaaaaagaacttcctaagaacttaaaaatgcctgaaatgactctgtatacaggagacacagaccccaatgatcgcttgtcaaggttcaaccgggtaatggtagtcatgagagtcagcaatgatagaaaatgcttgtgtcaaaactgtatgttagagaaatagttcgtcttcacggtgtcccaaagtccattgtttctaatag

SEQ ID NO: 119580 - DNA, 2004 bp, Cannabis sativa
aacctcaattggaactagaaacgacagattctaaggctgaggaccttccgactcaaaccaccattcacaagggacaatacttaccctcaagaatcacttgtgaagattgcctataacgaaaaccacgtaaaaaatcctttgtgttcatactttttatcttacaacctttatttttctgtgcaagattgtcactgttaggctcaaatttggttaaccaaaatgtgcgttaacagctgtagaaataaacaaaacattggtcagaaaagtgaaagacgaggattgatataactgagcatgaggaaaacaatcacttacgatttttacgaaaggaggttgtgccgattggggaaagaccagatgtctagaagaagttgtctttgaaagaaactttatttggcaagtccacaatgattttaggctcgctggaatgagtaccaagataatagaagccccctgtggcattcttcctcgctggaacaaccttaaccggatagtgataatcgatttctactggtgtggggcatccccagcttagaatttcatataagaccttcaagctagcgagaatcctgtaagcgataggattcagcttcattggagcaaccttaaggttgtttatttagtctttgaagtagtctcgaagaggaagtatggcccctgcactgatatgctcaaggctccaggcgtttatactagtcaagccactgatactagtctcaccactagtccctggggtactgcttgaaaaatgcgcaggggggaaacaactgaactcaccctcttgcactgaactaactaggcatgatcgcctaagttggattccacaggtcttcaatatatcacctatgttgcctgagatagatcgcaccttcgattctattaactaagcttcaaaggtgactttggggtcttgtggagtctttgatgtacatggcttgggaggcattatttcaatttccaagtcacctggttcaaaagcaatcatgactttgggtaaaaataaaggctttgccaaaggaataaaggacacgctgcgaggttctggccaggccgcatttcacaagaatcaacatttgccttctaagatttcttccaagaaacgcctatagcaactagcattatcttcctggtgggttctcactatgtgttccctaaccctagcatcgttcaactctaatttggaggtgggttttgaagggttgggtttattcgggatggctaattttttaggaaactcaaattctaaagcttctggacgataaattcctgaactagagtgggacattgttgcaagcagaaagtagtcccaatccctgaagagaatcttatcaaaccagaaggtggtgagttggagattctaaaaaacctacgtattgcttgaaactagtatggagctaaatacagtttaaccttaaaaactaccaaaactaaatgagatggcaacgttacaaacaaattaaacacaatgtaataggtatgtaaaggaggaaagaaacttactatttgaagttagggcttggggcaatgaatggttattctgtctgcaaatcatcgaatctagtaaggattgctttgagaaaatgaagtcggagaaaactcgtggaaaaaatgtcaaggacagagatggcatgcaaatcctcaggcaaactcgatggtgattcttagtgaaaaggcttaagaatttcttagactttctaaactggaggaaataatgcaaagctggttccttttttcttactttatatgatattaactttgttagatcaggaaaatgtttgatcctacgaattgaattcaaagaggaagtggaaaagatggtcatttaatactgatgtacctcgaaaccgcacaacccccaaaatcacaggacatgcgtcttttcaaaagagaacatgacaaaactgccctttgtaatcattaaaaagtactttttattaaaaaagaactttttaaggagcaattgttatgcccaaaattcgactagtacatcagaggaagacacgt

SEQ ID NO: 119581 - DNA, 1088 bp, Cannabis sativa
aaaaccgagagcagaaaaaaaaaacagagcaagaacaaagaatggaggaagaaaggggaaaaaaagaaaaaaaacaatgaaatgaaaatagagagggagagaaaagtacattagacggtttagtatgaaatgaaaactgaaaaagtaagtgtagaaggattaacaataataagcttatcaaactgttaaagtttaattttatttttaaccgtaaaataacataagttattcattatttgtgcttcattcccaagcccgttacatattcgctcttcagttaagcgaaattgtatgtcattttccctttttttctttttttttttctatagaaatcttgaaataattaatatgttttttttaaaaaaaagttgaataattaatatatcttttgttcttaaatatatgattttctatttttcatatgaattaagtttcgaattaaggcataggctttttctcagtattgtgaacaagttattttagttgttgattttttaaagtaaattctcttaattttttttttttttgttaattctgttaaagttaaagctatggtaataccatatttttgtacattgagattctaaattcctatattttaaacatacagacacttattcatctcaaaaaaaaaaaaaaagaactcttcttggcgcagcccatacaaatgtttggcccagcttctttttgaccttacatttattcagcccaattcatttaaactaaccaatcaacctctactacaattttctgatatacacacataacaaacaaattctgaaagacaaaataagcaattgacctgcttaataaagtatcagtatgtttattaaactctaattatagtattagtgtagtttaaatttgttacatgttaaatattgtgtcaaatttagcataaaatatagcatgaattaaattttatactagagtaaatattactttttttatttactcttttgtcatccattaatacaattaatggttttttaaatttttatttatatatttaatataattttgaaatttttacatcaaaaatctaatttacacaatttattataaaaaaaacctctacacgcttacat

SEQ ID NO: 119582 - DNA, 2031 bp, Cannabis sativa
ctttagccttgcctttacctacacataaacgtagaactgtgagtcgacagactcagtaagaaaagcatatcgcatatcacataatatcgaggcttaacagatgaagaacgttccatacaagggtacaactactgtaccacatacactacgtacctctttgcacaagtgttggtagggtttgtttgtaccctgagtaccactgagtgatataccacacacaccctgtactttcctgcacttgtgttggtaacaccgtaatgcactccttaagaatatacacgataccaatgcactctgtaccatttccgtacaagttttggtagtgtaataaacatataaccatgcgtatacacttaacatatacatacattcgcatattcacattacatattatacacagttcttacctcctttcaagattcaagtgagttggctgacctatatttaaagtctcgtgctggatggatgccctaaccacataacataaccaggtaaatgagatgttaaatccctaatctaggaaaccggaacctacaattcaaggtttttctattactaatagggactaaaatatcctaggaaataggaaaacacccaactaaggcactgaaatgggcaagtattgagaaaacacgttgattggggaatcttccaaaactggttaaccaattttacaggtactggcaaaccagttaaccggtttgcaccagttttcccccaaagaactcccaactttttcaaaacacatccaaatgctaccaaaccttccagagtacctaaaacaagcttacacaatattttccaaccaacggaaaccagaaaaacagactgaatcaaaatgtgccattaaaggcctaattttgagtttagaaactcaaacttgttcaattccatcacaacacatgaaaactagcatccagaacataaaatcaactcaaataaagcccaaaattcaaaccaaacacaattccaaccctaaacagcccctatatctcaaaatcacataatcaaccaaacttaaaagcttcaaaaatacaaaactatggttctagggttaccttagcttcaagaacacatgaatccttagataaattccagaaaagtacaaggtttcgaagatgattccttcaagttttgcttcagctgaaaaagagaaagagagagttctctatttttgtttttttctttgatttttgatttttcttagtttcccaacctaattcattcattattcttcaaaaagggcagctgtcaacatacacaaaagccacctaatcccctctttaatatgacaaaaatacccttaaagcttaaacttaggttaacttcaacgtaggggtaaaatagtcaaaaaccataaccccacgtaaacccagtattctattttctccaacatacatgccactaagaaacaggttctagacatacccatgtgctaaaaatagacatttatcgcattttccgttgtcgccaagcaaaaattataaaaataacataattaatatataattcaaataatacacctagagtttaataaaatctccggaattgaaaaattagaaatataatgcccactttgataatgggacccataataaaataaatacacaagtaattataaaaataccaataattaatactaattgcctttactaatctacattatgaaattgggtcattacaagctataaaaggacaaactgataaaaatatcagtgaaataatttcttattacataaaatagaaaactaattttattttctattttttttttccaaatagttacttagggtcatgttattattgttattttggtaatatattattgtatttgtttacataaataaaacaaatttatacattttataaaaatagtgataaatcatttaaacttcaataaaaaatagctataaatataataaattagaaataacgtatacaccatttttttttttgaaagaaaggatgtatcatattaaattaaatcagctgttacaggagtactaataaatctaggacaagcatctgtcc

SEQ ID NO: 119583 - DNA, 2172 bp, Cannabis sativa
tatataataatataattcctcaatgattcataattatttaattagggttttgctaatccttttcttaatttcagggtattacaacacttgtatcctttatagctgggactgtaaccaagaaacaagcaatgagtagttcgaaaggtaagcttatgttgttggtatggcttgagtaggggataacaagagcagccaaatgttttaaggaatttataatcgggtttctgatgaaacaatacctcaaatggattttgaaattgtaaaacaggagttggaaggcgatttattgtgtatgcagctgtagtgaaagcatcccgccaatgtgttaggggcatttgtgcttgtgccaagaaagagaggcccatgtcgacaacatgtcgatgttttctttcagcctgtctctgctgctggtgagtatgggcacacgggtgtctgaaagtgatgcccaaagactcaagaatagattgcaatggcctatattcacctccccaatctgactgtatagccttaatttttgttgtaaattgcaattcaacataagacttaaactgtctaaaaaatagaggcacttcagatttggttttcatggggtaaatccaagtaaatttggagaaatcatcaatacagctaacataatatctaaacccttccattgaactgtaagatgatggtccctatacaacggtatgcacaagttgaaaacaagatgtagttttaggaatagaactactgaaatgcatactatgtaattttccatattggcatgcttgacaaaatggaagagagttacatttagtggatgaatgtagactgcttagtacatttttaactattcttgaggaggcatggcccaatcgatggtgctaaacttgagcttcagtaaatgttgcagcagggttttcttggatgcaattgtatgcagcaggcagagaaagaagccctttgctgagctgtgtagatttggcactcgactgagagagatccaagtgataaaggccatgcttaagatggccctgcagaagtacttagcccgaaatcttgtccttgattatacatgcattagaatcaaagagaaatataatattattatctgttgtaagcttggaaatacttaacagattcttggtgatattgggagcaagcaacacatcattgagtattaattttttgttttgatgaaaagtagaaaattcagtttggcctatttgagagattgaaagtttagagccattaccaacagttattttggctttgcctttgtaatcatgagtggtattgagagtttgagcatcgaaagtcatgtggtgtgtggctccactatccacataccagccattatcttctactaggcaattagaatccgaaataagtgcctgtgggttgtgtccttgaggctgagaggaggtggagctggtttggggatcattatcataacgatgatagcatttttatgcaagatgaccaatcttgccacaaacgacgtgtcgttttccacatggaaaatgacatgtcgtttttcatgttatgttacagacgtcgtttgttgcaaacaacatgtcatttttcacactatggaaaacgacattcgtttttcatcttgtgaggcagccctttggtgagtaaaccgacgtgtcatttttccccttaggaaaaatgacgtgtcgtttttacgtgtgtttagcccttcaaaatggaaaaaacgacgtgacattttactttttgcaaaaacgacatgtcgtttaggtagtgccttttttcaaaaaaaaaaaaggaaaaattctgattttttttataaatttttatttatttgggatattaattattttcctattttgtgttaatttagtcaataaattgcatttagtcaattttctatcttttaatacatatatttagtataaattgaaagtggaaatttgtttaatctagtaatttattacatgatttatttaggtatgtaattattgtgctaatttgtataattgtgcatttaattatatattatcaaatttatgcaatttattgtctaaattaataaattttgaaaaaaatctgcattaattgcatattaaggaattcgtatttaattaattatcatacattaattgtatcagatagaggaggtcagtattatggtagatacacagaagatggacaagcacctggtccatt

SEQ ID NO: 119584 - DNA, 1080 bp, Cannabis sativa
  modified_base (186)..(202): a, c, t, g, unknown or other
  modified_base (342)..(342): a, c, t, g, unknown or other
aaaattttaaaaattttaaaaacaaaaaaaaaaatcattttcaaaaaatttttaaatagtttttttattaatattttggactcttaccccaacctagatctcggtacccgaacttggaccccaacccagagccagactcgaacccggccccagcatcaaattcgacttaaataaaatcaacaaatnnnnnnnnnnnnnnnnnttacagaacacacttttgttttttgttttaaaattgaaaaacaaaattggttatacaacacatttttatttttcaaaaataaaattttaaaaacaaaaattttacttttattttatgattaaaaaatttaaaaacaaaantgttaccaaacgccacctaagtttctcgttactaaatttataagtctgccgattttttctgagtataagtttctccatcgatcagtacgcagaactgtatgttagagaaattgttcgtcttcaaggtgtcctaaagtccattgtttcttatagggatccgaagttcatgtcgagattctgggaaagcttacatcgagccatgggtactcaactgaaattcagcacagtatttcatcctcagacagatggacaatccgaagggagtattcaaatcttagaagacatgctttgggcatgtgtgttagactttgaaggatcatgggtaaagtaccttaccctgatcgagttctcgtacaacaacaactattaggaaacaatcgggatgactccttataaactactctatgaaagaaaatgtagatcacctattcattgggatgaagtaggtgaaagaaagttcttgggtcccgaaattgttcataggacaaacgaggcagttgataagataagagcgcgaatgttaactgctcatagtagacagaagagctatgcaaatccaaagtgacgggatattgatttccaagtgggagatatggtatttcttcgaatatcacctatgaaaggtattaagcgctttggtaagaaaagaaaacttagcccgatgttcattggaccttttgaaatccttaagaggatagggcaagtggcgtatataggttggctatgcctctagcgctg

SEQ ID NO: 119585 - DNA, 527 bp, Cannabis sativa
  modified_base (46)..(48): a, c, t, g, unknown or other
gtatgttattttttattgttctttagatattattttcatgttactnnnatgtagttttcttattgttttcatattatttttatgaaaaactgtaaataataagaattgccctgtggttcgaataatacagtgccaatgttgaacatatttggggtttttagaggtcgattggtgttggactaacctaaactcacaatgttgttttgaattaattgagagtttgagcagtaggtaggtaggatcaatcttgtattttttttttcttaatttctcctctgaaaaattagtactttttttattatttttttcttaatagtgtggtctttctatagttagctcaaggccggccagagagggtgtagaagcttaggctttaggcggctccataatgttggaggcatcctaaaataaaagttaatagcatatctttatctttatatattaaaagtgtaaacggcatttcttagtttaacagaatataccttaaaaataaaagaatattctgttaaatttaacgatgttaatag

SEQ ID NO: 119586 - DNA, 3154 bp, Cannabis sativa
tttagggttttaggtttagggtttcagagttttttgggtgtagggtttaggggtttagtttttagggtttagggttaatggttttgggtttaggattacgggtgttaagatttagagggtattggatttagaatttatggtttagggtattgtgtttatggtttagggtttagggcttagggtttagggtttagggtttaggatttaaggcttgagttttaaggttttgagtttaggggtttagcctttagggtttagggtttaggatatagggattatgacttagtgtttggggtttagggtttacagtttagcttttagggtttgggttttgcatttgtggtttagtgtttagggattagggtttaggctttaggctctaggggtttgggtttagggtttaggctttacagtttagagtttaggatctagggtttaggggttggctttaatgtatcgagtttattgtttagcctttagggtttagggattaggatatagggtttatggcatagggtttagggtttatgattttgctttttgggttttgggttttgcatttagggtttagtgtttaggggttagggtttaggctttaaggttttgggtttaggggttaaggtttagggtttagtgtttatggtttagggtttagggtttagtgttagggtatatgtttttggtttagggattagggtttagagtttaggattttgggtttatggtttaggatttaggctttaaggtttggggtttagggtttacaatttaggatttaggatttacagtttagggtttagggtttagtgtttgggtacaggtttcagatttagggtttacaatttcaggtttaggattttgggtttagggtttaggatttaggctttagggtttagggtttatggttaaaggttttgggtttaaggtttatagtttaggatttaggatttacagtttaggatttagggtttatggtgtccagttataggttttttgggtttaggatttaaggtatagggattaggggattagtgtttagggtttagggtttacggtttagggtataaggtttcatggtttgatgtttaaggtttagggtttatggtttagggtatagagtttagggtctatggtttaggatttagggttgtcagttcaggatttaggatttagggttttcagtttaggatctagggtctaggatttagggtatatggtttaggggttagagtttagggtataaggtttagggttttgtatttagtgtttagggtttaggttttgggtttaagaattagggtttagggtttacagttttgggtttagggtttaggatttaggatttaggggttagggtgtaaggtataaggtttaagatatccagttcatgatttagggtttagggttaagggttaagggttttagactttaggattaagcatttagggtttggggtttaggatttaggtttatcgatttagagtttaggatttatggtttagggctttgggtttacggtttatcgtttaggaatttttttgggttaagagttcagtggtttaggatttatgatttagggtatgggttttagagtttagggtttcgggtttagggattcaggcttctttgggtgtagggtttaggtgtttagtttttagggtttagggtttatggtgttgggtttaggattacgggttttatgatttagatttagggtaatgtatttaggatttatggtttaggatattgggtttatggtttacggtttagggtttagggcttagggtttatggttcagggtttagggggtttaaggtttagggtttaggatttaagtcttgagaattaaggttttgagtttaggggtcttgcctttagagtttagggtttagggtttaggtgtagggattatggcataggtttagggtttatggtttagcttttagggtttcgggttttgcattttgggttagtgtttagggcttagggtttctgctttagggttttgggttttggatttagggtttacaatttagggtttagggtttagggtatcgagtgtatggtttagggtttagggtttaggatttagggcttagggtttagagtttaggggttaggagtttagcctttagggtttagggattaggatatagggtttatggcatagggtttagggtttagggtttatggtttagcttttagggttttgggttttgcatttagggtttagtgtttaggggttagggtttaaagtttaagctttaggattttgggtttaggggttagggtctaaggtttagtgtttatggtttagggtttagaatttagggtttagggtttagtgttagggtataggtttaggaattagggattaggttttagagtttacagtttagggttaagggtttgggggctttagggtttagggtttaggatttaaggcttagggtttagggtttagagtttacgggtttagcctttagggtttcgggattatgatatagggtttatggcatagggtttagggtttattgtttagcttttaggattttaggttttgcaattagggtttattgtttaggggttagggtttatggtttaatctttaatgttttgggtttaggggttagggtctagggtttagtgtttatggtttacggttcagagtttagggttgagggtttagtgttatggtaggttttgggtttagggattaggttttagggtttatagtttcgagtttatggttttggggttagagtttatggttttggggttagagtttagtgtttagggtttagggtttaaggggattagggtttaagggtttacggataatgggtttacggtttaggttatagggcttaggggtttagtgtttacggtttagggtttaggggttttgagtttaaggtttaggattaagcatttagggtttggggtttaaggttatgggtttagagtttaggatttacggtttacagtttattgtttaggattttttagggtttagtggtttaggatttatggtttagggtaaagggtttagagtttaaggtttcgggtttaggatacagggtttagcgctttatgttagaaatattttaccaggatctacatttactaccaaatatgtttcattaacatccta

SEQ ID NO: 119587 - DNA, 4353 bp, Cannabis sativa
  modified_base (2709)..(2710): a, c, t, g, unknown or other
ttattttttattaatatttttggagatatagtgacacacaaaaagtgccactatacttatttatttatttattttaatatttttttggatataggattttatatttttatttaaaaatatttatttatttgtttatttttattgtactgatattaataatttatttttttctttgcttatttatgttattggggcaaaatttcaaaataactaaataaaaattccaaattccaaattaatttttataaggtataaacatcaatttcattcatcataaataaaaaatccaataaaatttcacagatagacaaatacaatataaattaaagatctagctaatcccttaaaaattaacatatatgaacacaaaataaaaaactaaacctaaaaaataacataaaaaataaaattcaaggaaaaacaacaaatttcagatccaatttatccccattctaagttaccaccatgtctacaagctcaaaaccaccctatatcagtaatcgatcctcctcgcgtgcgccctaaacttgaaagtttctcaatccattcctgaagtcacttgagaaggaaaaaccattaaatctaagactaaaagttagagtgggagatgagcaagagagagagagagagggagatcgggagagataaatataagagaaatggtgcactacttgtctatgcttgtagacggaggaggagttaggcgcgtgaggagggtcgacgacaacgacgacagattcgtggagctgcaatcgacgacgaggggcggagttggagcttcggttatggtgaacggacagaggttatctggcttggctgaaagaaatttactagagagagagagagacagaggcgagaaagagagatactgtaaaaaaaagttagggtttttaatttattgcaatttgaatgaaaatgagagaagggttgtatatacacgcgtataaggaccttattttctttttttcttttttaattttttttattaattcagagtatacatgcgtacaataatgggacctatttttcttttctttttttttttctaatttttttttattaattgagcattaacttttttaagtggaacccaatatttttctaggataccacgcttaatttattaccataaataattaattcaatttagatttatgatatagtgacgcgccaaacacgttgggatacttttacctagtcatacctgccgtgtaactatatgttaattttttttaaaaaaaaaataataaaaattatgggaattactttttagtgacacttcatatttttagtgacacttcatatttttagtgacacgtattgtaggacactaacattgaattttagagtcattttgtgtgtgtcactaaagctcacccttaactctttagtcacccgtacatttgtgcgtgtcactaaagtgtgtcactaaaaggtatgtttgtagtagtgaaaaacaattaagtaattcatatatattttcctatattatttaaaaaaaaaaccattctacgtagaatttttaatttaattttaggatagttacattagacaccttaaattatatcttaatatcaaaaataacttgccccatttaaccatgtccaatataacgtttctgcataattacataccgttttttttttttttttttattagttacccacgtttttagctttaatttacacatttttttttatttatgatctttattctagaagttaagaatattcacaaaaggaatcatgatggatacacatatttaatgttatttattttctttaatatctatatatatattgtaaactagtggcaaatcacattaagggatgtgcttcattttttttaacaaatttttctattttttttttgaaaaataatcatatatatatttttaaatttcaataataaattttgaatacgtaattattgttcatgtctattacatctatcacttttaaagcttgcttaattcacacactcatattttttctgccattattttcttatttgtttcaaatttaattatgttagagtgtattagaaattgtttatttttcagaataataatttaaaaaaattagaaatataaaaatttgtcaaaataaactaatagatttagtaatatatacaatatgatatgttatataaaaaggccaacatgtaaacaaagaatgaaaatttatttcaatatgccaaaatgtatgagtataggcatagtatagccatattaaataaacttatgagcaggacattttatgtgagcaagacattttatcatattcaaaactttgacaagtgcatatattgttatccaagtttactatgtaagtttgtaagacatgttatagtcatgtactttgcatatacaaccaaatttgatgtctcaacctgaaaaaatagactaattaatttgttattttatgggcacacatttcatttgaaacaaaaaataaattcttgtttcaatatacgaaaaatagactaataggtttattagtgtatatcattgtgtttgattatagtttactttgtattgaaaaaataaagtattccaataaacagaaactagtaagtttattgacatatataatgataagtcatataaaatgaaataaattattgttccagtatacgaaaagaaaaatgaaaatttgtttcaatatgtcaaaataaactaatagatttattagcatatacgatgttagnntatacgaaaaatgtaaacaaagaatgaaaatttgttttaatataccaaaaataaactaataagtttatttgacatgatcatcatctttttattttaaaattgatgattttatcaaggtaaccaactggtatcttatcaaaagcataattaattggtctaaaaaatgtcgtatttgtaatgatttaaaagttatttgtaacttcattctttatttaattaatcaaaatgcatatattaatttacatttaaaaatataggtgacttaaatatttatgatgtatattttttaaaatatagtttattaaaattgtattttattgaattataaattgttattttcaaaagtaaatttgaaagttactcaaatgtattaatataacctaaataattagttgattattcaaatgtatacatgtaagttttaaaggtaaccaaaatgtatctcaaattatataatataaaaataatatttttttttatgaaaaaattactggttggtttattatcaacatcataagcaactaaaatgttacttttgaaacacaggaaaataaaaaaaaaaaatgaattttaggattagtttagtttcaggcatattattttagaattaatgtattttttaatgacgtggcaagatattattgtaattgagatttgttaatttatttttgtaattattttgtgttttacgtacatttatgaaaaaaactaaccctgaacctaacgaaaatacattaaaaataaataactaaaacagatttttttttcttcttcttagtgcatttttttttcttttattttttttctttatttttgtttttaatgccaattctccatctttctcaaatttaattttttttgtgtgtgtgtgtgttaaagagtttaactaactattaattcttgtcaaataatgagcaatagcagtaacatcaataaacaacataaagatatcgattttctattcgtatttattttcttcatattttataatatattttttgatatattacaaccttttttttttttttttgtattaaagagtttaactaacttttaattcttgacgaataatgaacagtagcagtgacatcaatgagcaacatcaaaacatcgattttctattggtatttcttttctctatatttttttgtatattataaattattgtcaatattctgtctactttttctttttctattatatatatatatagattctcaatctttctttcactcatcaaaatatttctcgataagttggagaaatataatttttttttataatcgatgacttcaccgttgtcgataattttaaattatatatgatttattcattagtaagaattatttaaatttaaatgatatatatgttacataatcaaattaaaatttaatatttatatatatcttaatcaaaaaaataaataaaatattaacataatcaattatatataataatatgctgctgtgttttaattagatcacaaaaaaaaaataattaatcatactaaatccaaatatatattctatttaatttatacataaatgtaatttttttaaccacatatttgagagttaaaactttttttttaatattttaataaatttattattaataataataaagatctcttaatcttaagt

SEQ ID NO: 119588 - DNA, 1169 bp, Cannabis sativa
tagatttgttaggatggtgtgtataatatgtacttgttttattttctttctccttcgttgcataatacttctcatctttgccgaactagatatagaaagcataggtcctttcttttttcttccattccatccctaaacataatatttagtttgcattatttttggttctagaaaattgttaattatttaatttaatcccaacaagttttcgtcaaactttgaaaagaatatgcaatatgatcaagtataagcaaaaggagacgaaatagatgttacaggataatgtttattaattaaggtttctttattagttagttgatatcttacctagactgatcaagagaagggtcatatacataattatatatatcatatcaagaaaacacatgaataacattggtttttaaattaagagtatattaaacgttgaaaaagataaatgtatgatcattaatcaaactatgctctatattgagccttacaaataaaaaataataataaaaaaagactatgctatattgagtgtttgactactaatcataatacttttgaaaatgataataataccaaattaccagtgttagacatatttctcataatttccaccggatataattttaatttatggacaatttgatgggagattacttgagtatgtacaatattcactcttcattttaaaattaatatattaattataacattcacaaaataatatattgtgaaattatttatggatgacatctatttctaataaaagaaagagaattaattacgaaatttttacactaaatactcaaaattttattttttattatgagcggaatttctttttaaaaatattgtatattgtttatactgtgtgaagtttcatatgttgttccaaacactattgtctactcgagtattctcaaccccttctcaaatatacaataaggcgataaggccaaaaataaaacaatggtttgaaaccattaataacatttatattattagctatcgaagcacagtgttaagtatgataactacaaacaaatgaaaaatgaaacaatttaattgattaagagaaaaaatatcaaatatttaaatggtcacacattatagaattaaaattatcaatgcatcattcttcaaaaaaaaaaaaaaaaaaaaactaacacacaaaacta

SEQ ID NO: 119589 - DNA, 758 bp, Cannabis sativa
taatatttcagttttattttgttacattttttattaattttttttttttttttttggataatgtctaaactaaaatattttgtaacgtttgttatttactttctaatttgttaatgttgtgtcaatgtgattttgcagattagggacttaaatattgctgaaaaagaggaggatattggctactatgctggttatgttggtgagtttattattttattcagtaaggctcctttagtaagtcgtataagagttgtattgtattaaataataaataatacttagataaaacaatatatttattaattatatattaccactaaaatttttaatttgaattattttatacatatgatccgttttagtttgtattataatatttataaagaatttgagattaaccttaattttcgactcagatccagggacttgaaccccgaactcaggactgaatttggactctcgagacttaaaccaagactcgagacccggactggacccaaaccccggactagagtcacataccccgaaccctagacccggacccaaacctagacccaaaacctaaatcgaacctagactcagacccaaactggattcggactcgacctgtagtcggtgttgcagttgagtttattaaaaatatattataacttacacaacctatcagtggcggacccagaatttaaagtgagggggggcgtaaataaatttaaaaagaaaatataaaatgtagttagtggggtttgaacctttaccct

SEQ ID NO: 119590 - DNA, 1673 bp, Cannabis sativa
agtacacgtgtggagtgtcactaaaaatctcaatgtgtgtcactaaaacctgttttttctagtagtgacagtggctttaagctctttaactatggcagtgaacctgtcgaagatgctacattgtacaaatcaattgttagaggtttgcagtatgctaccataacaagaccagaggtttctttttgtgtcaataaagtgtgtcaatttatgcaaaatcccttgcatacacattggactgctgttaaacgcattctgaggtacattgcaggtaccttagattatgttatgctcctcaaacttgtttcagacttctctcttgatgtgttctgtgatgtagattgggcatctgatccagatgacaggcgatctacttatgggtactgcatctattttggtggaaatcttatagcctggatatcaagaaaacaagtcacaataagtaggtcctcctctgaagcagaatttcaaagccttgccaatgttgttgctaaagtgacctgggtttgatctcttcttcatgaacttcagattcctcaagcagttgttccatctgtgtggtgtgacaaccaaagcacagtcctccttgctacaaaccttgtgcttcatgctcatatcaaccacatatagattgacctctattttgttcgagacaaagtcctacatcagcacatcaatgttaagcatgttccagccactgctcagactgttgtttgtctcagtaagtcaatctccattaccaggttttctgaaattcgagaacaactgtgtgtgatttccaaaactacactcgatttgaagggggctgttaaggaagctagttagttagttacttgttactgttaactaactaactcggctgttgagtgttctttgactgtattgatcagaaggttgttatcttctttatgcctatataaactgttttgtaatcctcttcattaataaatgaatacggaacactctttttttaattcttctctctctgtttttgtcccgaaaccttacaagggcatttcacataagctagtagcgactggcccttttttttatttccacccttaatagtgccaaaaacccatattctgttgctaatatacaataagcagtgaagagtctctacggattataagtcttttgctactcaacattcatgctgtagtgtaacactaggatagactatatatatatttagccaaacgattcggtcacgcttattaagtagagtaacataatactctcctttaattataaccattaagtgttgtataattatatccaatggctcaaaacatttatagggaaattgattatgtttttttaaaaaaatctaacatggatttaataaatgagactagcaataggggtatgcactttcccctccaactaccgggaatttatttaacacttatgggtaattagaaaaagataaagataaaagtgaaaaaacacttaagaaaactctatctacttaagaaaacccatgtatcttattctcacaacaattgtcttaatctttgtggtaagtcgtatcctatctccgcttctattttcaaagaagtgatgccttacctgatggtctgagcgtgataaatgagaagctcaaggtccctaatcatgaattgaagttgaaaatcatgggtaacaaaagttgtatttgttgggaatattttacc

SEQ ID NO: 119591 - DNA, 1706 bp, Cannabis sativa
  modified_base (47)..(63): a, c, t, g, unknown or other
atgtgaaccatgcaacataaaatgcagtttctgatctttattaattnnnnnnnnnnnnnnnnntgaaatgggttttatttaggacacagaacccaacaaagacaaagtgaaaatagaagctgaaattgggctgaattgctaaagcattggtgcaacaaattcagcattctgcatagtgacgtggaaaaagttgcaaaaggaatttcattcatccacatcagcacgtacgtatcagccatttaaaatcacgctagctggctgttgtggaaagaggagacaaaatctagtgggccaagattggaaatgaatgggcttttatttttatggtattacattgtaccatatttacctagcaaagcaaccaagttcagccaccatcattatcaagaaggagctgcatttttagaagagattaaatgcagaagaaaaaagtacaaaagaggaagtaactaaagaggaaaccacccgaaaaagaagaaggaggacacaagcttcatttgtttgatttgctcttctctttcttctatttttctcctttgtttaaatacttgaagttcgttaaattgtaaagaattaggtagcagccatggatgaactacttttattttggattttgtttattggtttgaacatgagctaagcctcttgaggcttgaatggctatgaatccctatgcttagtatgattatttttagcatgtttaagcaattttgcctttgttcattcaagtaagcttgcagtttcttgattgttattacttggccatgagtaacaatttactaagctagatttagttctgaaaaggctagatctagtaattacaacttggatgatgcaagtgaatacctagatgtaggtttttcttagtaaattaaataggaatattttatttaccttgcataacttgagaattgatgtttaaatgttgttttgcaatctaatttgatataggaatatattgatttaagtggtagaacttaaattgttcgttttggaaaaatctcataaacatagaaaaattctgttaactctgtgcaactttgttggaacaatgctgaagtaacactgcaaaacttagtagattcaacataaggaggatttagctattcaagtctatttttctatagatactttttcttacagataattttccagtagtaattgtgctattttaagtttatttttagtgccactaatttgttttacttttatcaatcatttattcattttgtttaattttcttttaaaacaccttaagttgttaactagttgattttacatttattttatttacaatccctgtggagacgatcttacttatcattatattacttgttgtcgattacgtgcacttgcgtataaatattaatttttacaacacacgtcgatttaattactttggtatttgtaattatgaatgtcttttgttgatttaaaaacatatgattgtcatagttcaatatcaaaggttaaattggaccggtatgttgagatgctatcaaagaactatcattttttaaagtggccacaaatatttttctgttgttcaaccaatgagtcgttttatacaaaattattttgatatataatatatatgtattttaattattgttgcccaagtaggagaatgttaaattttttatttgggcttacattaaattttattggttttattaaaacttgggttgattggatagttctttgct

SEQ ID NO: 119592 - DNA, 838 bp, Cannabis sativa
atttttaatctttaattgaaatggatgaaatggatttatggattttatttaggacacaaaacccaacatatatgccccgataaaagcctaaaaaaagttggtgggaagttctagcgtgacttttttggttagtgtgcaaacttttgacgatgcatatttgcaccgttaaaattgaaattgaaacagttcgttttgtttatttggggggttttttccatctttaccagtgcatcatatagcttttactagcgcatttcaagtttctaaaataaattggggaagactacctcctcccctattttttggtttttttcatctctccatattctcactccccctctctgattctcactctctttctctatccatctctcctatcatttctctatatctctcatcctctctctctcaaacaaaaaaaattaaaatatattctctaagttcggtcggccaccactactccaggtccatcgtctctaggcaccaccgctctgccgcctccgattctccattttaggtaaaatcttatattattttaaacatgtatttgtttatatttttatataggtataatctattaattttgtatttttgtatatttagttttaatatgtataatatttgattgtatatatataatatataagtatatgtgtatatctattaatatgtatgtatattatgtgtaagtgtatatatttatataatattgtatatatatacatatgtgtgcatgcgtatatgtggatataatagtgtatatatgtatatatatgtgtatattattggagattattttaccatgatctatatttactaatatgtttcttgaatataa

SEQ ID NO: 119593 - DNA, 1470 bp, Cannabis sativa
atattagtgttaatagtaataaacagaaggagaggtgtttggggtcgtcaattaattctgtcgttgaggaagaaaacgacagtagccctaacagccaaacgacagcttcagcttcgtcgtttgagcgaaaggtctcgagatccagatctgttggctgcggaagccggagtttctccggcgatttcttcgagagaatctcaaccgggttcggtgactgcactctacgacgagtcgaatcccaaagagaaggcaaatccaaagtctcagccgccactcaacgcggcggttccggcaccggagaccaccaatgcatgaaggaacgcgttaggtgcggtggcatttttggtgggttcatattgacttcttcgtcttcttcgtcgtcgtcttcttcgtattgggtttcgtcttctgctgaagatatgaacggaaaatcagtaacttctgccggtggtggtggtggtgggcctggcccacttgtgaatggccgcagtaggagctggggttgggcctttgcgagcccaatgagagctttcagcaagcccactagctcaaatggcaagagggatcatcatcatcataatataacgagacaaggttcagataagaacagtactactgcagctactcccaacttggcagccattccttccttgctcacagtgagaagctaataataataatattaaataataataataatattactgttataattactataatacaccattttaattcatagtttttatattaatgttcatctgtgtattactactactactattatctcttgtttatttaaaatttagctctttttttgtgtattaatgggtgtgaaatctctagtccattacatattagtggtgtaacaacattttcatgttaaaaaaatttgtctctaaattatagttttgtttggatcataaaaggaagtttagctgtaactctagctctgtgaagaagcaaaagataatttgtgacttgggttttgttttctgagttgttgtagtttgtattattaaattagttaatattattgtaattttctacactgggatcatattatattacaagcaaagtaataaatttatttatttatttttgtggtgtttctgaactgatctgttaacttaatttggggcacatgcacacacatgtttggctggtactagacaaaattgggtatcaatatcatctatgtgttacaacacttgtgcaaaaatcactgctagaaaaaacccctacttttttttttttaatttatataaatatgggataatccaattcattttagttatggtgatcatgtgattatatgagcaagtgaggagtcactatgagccagagaggcagagccaggcaggacttgggtgaaattttcttgatttgtaataatttgttgctcttgtttgtaacgtttttctttctataatactctgctatacttgtttgaaatatggtatagagaaa

SEQ ID NO: 119594 - DNA, 2579 bp, Cannabis sativa
tatcaaattcaactcagtgttggtatggaggaataataatatagaatcttcacaaacctttttgtctagagtagaactttttcgtgtggcgccttataagcctcttagcctttgtcatcgtgagttgcctagcaaagggagacaactctacgtcactttcgctccaatcaccttggaaattattttccgtttcacccctcattgtcctcaaaacaaacgcctttgccttgcgtcgttgagtattgaatagacctctaattgaagtgacaaagccatcgcctgctccatcacttggacggttaggccaaaccaacgggtactgatcagattttcctgcctgaccttcattgtcgctgaaattaagatcgctatcaggcacactagacccagtcagttctctctgactatgtgctttgtctttaaacttcttgccctgtaaaaatatagtaacaattatagatttaacttggtgatcataagcttaacaacaacaaatcattaactgctggggattacagacatgtcccatggaaataggaagtaaacaaattacaaagaaacagattattatgattatcccattggaatatacttccattatgaattcatttcaccataccaagaagaaacaacaacctcaaataacaagtaagatcattaattaataagaacataattaaaggcagagatagctttagatataaacacaaacatgcattatcttttttcataaaaaaaaattgaacaagtgaaatcgtgacaaacctgcatccccgttacggactttaagacaccccatatgatatgcttcttaacacgtgagaataatctccgccaagtccccgtaaactcaacgcggtgaaatgtatccattagtaacttaagatcattcacaacaaaccttgatccctcataagtaaccagcagctcaacctgcatagaaaaaaatatatatctaaattttatcggacaagctacattacatatgaaatatgtgacaagcatatgaaaccaacctggctaatcttaatattatgaaactccatcatttttcgtggtctagatcttttctcctcgtgtgattttgctacttttttctcttcatgggatgacctaccagttttgagattcttgggatctttcagtttattctttgacgattcatcttgttgctcgacagaatcaagtggagcatttttggaagaagaaatactctgcaagaccagctcagtagcaacagactctgccacagtctcttcccatgatctatcaaaagaagaagttctccgtaacactggggttggcctgctaacaatattatctgtctggttttgcaagctcaaagcctgcaagtgtgttttagaaaagtaattaggaaaagtcaagtaacaaatacatgagtggagggacttgaataactcacttgacaagaatcagatacaatagagggttgaccgacggatgacaaggagacacttggttttgatgggttctcattctcttttggagtgtcatgagttgaagagcctttcttaacacgttttgaacccgcagttgtagaaaccttccagacttcctgcatttgacaatgtgaacaagcaatggtttcagatttatagacttttctctcagctcaacttgcattaaaaaatgaggtacaatttaagttattaaaatcttcaacagacctgccgcctctgtgaatcttgttcttcttcggggaataaatattcccacatcatccggtacatggtctccgtcagatggattttaagggggtaaatctcaacctgtagtgaaaacaacaatgtgtaaagcaagcaacttgttcacaaagcatgaatttccgaagaaaaagaatcctcattagacatgttcaacctttttcacacagaagttatattttaatgaataaataaataagcatgctattaagaaaactctgattctaaatctattatagtggttgttggcaatgcacatacagttagatgaattgagacatgtgtggtttgtaaaatgttgttaagtcttttaggtatattgcctagctggtcccctttagatgtaatgatttcattaataaaacatttccttatttatatataaatatataaatatatataaataaggccaaagctctcacactaggaataaggccaaagctctcacacttccaaaacttgtaaagaggagaatttacaagtggagaattacctgaaattgttcaaggatagaatgaccctccttcggagctccctgttttgcatccacacgaagcataacttttctgcaccgaaaattaacagtacataatttcaaaagaattttctaatttacacctttctttttatgcaaaatatctacactgtgattgcttcaaagaaagaatcaggacaaaagaaagaaagaaagaaacagaaagaagaaggtatagaatgactgatcaattgaaaatagcaacttattggcaccatttttgagtattggttaagaaaaatgttcatactttccccactctggtggaggattccatgctgataaaagcatatctgactttgcgttgggcaggcagtttc

SEQ ID NO: 119595 - DNA, 1513 bp, Cannabis sativa
tttttttttttttatgtttatagtgctagggttcttgcccattgatggggtaaataaaaataatttaaagacattagggccgatttggtgaggcccagcccgtgaggctttgatcttctgttgatgtaaataccatataacgttagtaattgtcaaaatatgcgttatcttagtggcgaataaaggcacataaatgcttgattgacaaaaactttttttccttattcggaagatacgaatcttggacatgatattgaaaataaagcccagatattgtgggattcggcaataaagttttgtgatacggagctggatatttggaggcctttatcatctttccagaagcattatcttgatgctatatggagccctactgtgctgaaggtttatctcgttcgagggttcttgccaactgatgggataaatacaaataatatatgacatttgggctgatttggtgaggcccagcctgtgaggctttgatcttctactgatgtaaatgtcatataacattagtaattgtcaaaacatgtgctatcttagtgaagaataaagatacataaatgcttgattgataattattttatttccttaattggaagatacgaatcttagacataatcttggaaataaagccaaggtattgtgggatttgaaaaataaatttctgtgatacgaagttggatatctagaggctcgtttattaccttttcgaaagcactattttgatgttatttggattcctactgtgctaaagtttttatctcgcctggagaaatcatctgtccgtcattcggaagatctgttgatatcatctagagatgtgttgtgctggaggtatagcttgtctaaatgaatcatctgtccaacatctggaaggctttgactttgctaatggatctaatctattatcttggttgggccttcatctgggcctacattagccgaacaaaaccatctagaaattacacatgtcttccttctagaaacacggataacatttacccccaagctttcaaaactctgcttttcagaagcttgcattcttcctttcaagtagcatgaggacacacaaatgcttgaaatattgaaacccttttgaattccgatgcaaaaaagttgtggttgacacctttcatactttttgttcttttccagtttttatcatggcaaaagctaattaacatgaggaggttaaaatttggagcaagaagaggtcttgtacaaaagattttcttaagagaacttcaaagtggagaagcttgtcaccacaacaaaccttaggtgaattgttctgattgctgctcaccagagcataaaagcctatcacatcaaagatgttcatagcgattctatagaaattaaaaaattcattacaaagatattcgcttatgaggcaaagaaagccatcatgaaagacaatacactacaagaaatgtcacttttgccaacacatttttgtgctggcaaaagttggtattgcgctggtaaaatagaatttacttgtgatgtg

SEQ ID NO: 119596 - DNA, 1947 bp, Cannabis sativa
atggtaattatttactttcatgtaatatggatttaaaacgatgaatattgtttattgtgttgatttggatgtgttcatgttggtttatgtattatttaataaatgaatgtgatttacgaaatttttccatgaaaataattttattttcattctaaaaatatattttttggatttcttgtgaaaatttaagcaattttggtttttacaacactcaattccaataaaaaatgagagagttatggttttttgaagtttcaggttgaatgggtgtcgagatgccttaatcgcacgcatagaaccacttggacaaagtactcctgcgcgcgcgaggcagacaaaatctgtctgaagcttggcatcgcctgggttcggacacgtgtcacacgcacttggaggctgcaacacaccgagatttctcggcaggtgaggttgcaggttcgcctgctccacgcgcgtaattgcttgcagccttcttgggctgcacgtgcaaaattccttggcagtaggtgcatgatccgatttttgggtgatttttcacccaattttggatttttccaattttcaaaccctaatttcaaaataaaatgttatttttaatatatttaaacttaaatattaatttttcaagttaataatatttatttttaatagattattattaatttttgatattttgaggtttaaattttaaaaattaattattttattttttaaattatggtcatattataaaaattagttaatttctttaatatttatatattattttattataagattagatattttaatattggctacatttgaaattaaaagatgacaattctttttatttgaaatattataataaaattatcttataatatgaattaaataattaataaatttgaaattaacctagatattctaaccataatatttttaatttcataaattggttattttgttgaatatttattctttataaataaaaagttaaaaaatgatattttactcatgtgactcaaacatccatccatcgcctttttcgtcgtcgccgagcaaaaatcataaaaattacacaattcatatttaacatatataatacttctagagtttaataaaatcttagaaattgagaaattataactctaatgtccatttctaataatgggacccacaaaataataaattcatgcataattgtaaaatattaataattaacgctaattgtctttactaatccatattctaaaatacggtcattacagtgtgcacccatcgcaacatgggcctaactccagatgccgaagcccccatcagcacatttacttaatttctctccatgaacagagagcctattccagtacaaccccgaaacactttcaagcccttatagggtctcgtatttctggaggttaccataaatccagaatttattaatgtactgatcaattttcaatggaatgtcattcaacatcaattttggatcattctcctgctcctggcctcctcttccgactcaagctcttcttgttcgagctttttggacatgatttccatggaaagaaagaaaaccaagcagttagctacccaaactatctagtatagagagggagcaaggaaagcctcccccataaactacttagaaaggttcccaccagatttactatgcaaaaatgaaagccttcaggggtaattcgttctagataggaaatcaagaaaatttagaagaagaataaggaagaaattgataaagtacccacaactagaagaatcctgggcatagaaaaattttgctcgcatttgtgcagcaacacaactatttctgagaaatttttaagactaaaaattttgctcacatttgtacttctttcatctgtctaaacctagtaacatgatagggcccatccaaatcatttgacctgtttgagcctatatgtttgctattggacttagatgcatata

SEQ ID NO: 119597 - DNA, 1328 bp, Cannabis sativa
  modified_base (69)..(72): a, c, t, g, unknown or other
  modified_base (414)..(419): a, c, t, g, unknown or other
  modified_base (1295)..(1303): a, c, t, g, unknown or other
tgaaacactatataaggaacatgatgctctcatctcatccaactttttaacctgccaaaatctagtttnnnnctctgtcagacaactagtagatgacagacaccttctatacaatttttcaagccttctttaattcatagtcggcccttagtgatagagtcctatgcccacacatagaaagtcaagtactcaatcatagtgggtaagacggtggtaacaaaaacctgaaggagagaaagagatccaaactcagatcttgataatactctgggaaaaaagaacaagggttagagatctgagcagaaggagtcataatattctgctgcactcaatgtaaggtttcctaaaatcttatgtatttaatttaattgttttagagatattcatatttagatgttaatcaacatacttgtnnnnnnatctagatcttggtaaaatattattcccaacccaatatttatttgcgaaatacttatgacacaattgaatggagctttatggaaaaaatgttgtatggatttcaattccctgatcaatttatacagcttattatgacttgtgttcgaacccttcaattctcccgcttgaccaatagctcacttcacagttattttgaagcaaagagggggctctgccaaggggatccgatgtcaccagtaatttttgttttgggaattgagtacctaactagaattctgggaagatttgatagaagtctgattttgtttttcatgactgatgtaaagatctaaagttttatcaccttatctttgttgatgatgtaatactgtattgcaatagggattataagagcatacattatctcttacaaggcctcaagctattttctcaaacctctagtttgcagcctaatgcttccaagtctactatatattgtagtgggatgtcttgtaaagaggtaaaacgcatacttgatgcctcggggttcaaggagtgaagtaccatttacctacttagggatttcactttgtgctaaaagaatctcttctaaagaatgcaacatattggtagataaaatgactaataaaattagatcctagagcactaagaataattcttttgcgagcagggcagtattagttaactcggtgcttcttacaatacattcttattggagtcaggtcatgctactacctaagaatattctaaaagaaattgaggctatatgcagagctttcttatggaagggacaacatatgatgattggtgcaagacaaatagcctgagatagtatttgcaagcctgaagaggctagtgttgggttttatgccctnnnnnnnnntccatttcaatgtaatccattttat

SEQ ID NO: 119598 - DNA, 872 bp, Cannabis sativa
  modified_base (324)..(326): a, c, t, g, unknown or other
  modified_base (839)..(845): a, c, t, g, unknown or other
tataatacaagctaatacagactatttattatgtattaaataatacaacatacattgtattaaaaaatttgatcgtaataattaatacaatacattgctttatcaaaacatagtgttattatttaatacaatacgacccttatacggcataccaaacgagcccttaaggtattattaagtggtgtcttataaattaattaatgatattattaataattattaaattaaataacattattattagatgttagtggtatctagtattatttagaaatgacatttcgtaattaattagcgatattctataaaatttattatattaannnatatgagacctgatacttaattattaataataatatcacattttgaaaaatgctaaatactactagtgctttttaatatttttctaaattaaattatgtggaacataatatttaattagattaatagtaatattacaattctaagtagtgtggtgcttgtaatatttctattatatagaagtggcaacacctaaacttgggtgtggcaacacctaaacttgggttgcacgtaaacaggttaagagaaatgtagggtaataatatctccaatccaataataacttgatttcttagtcaaaataaacttgactcgaatagctagctggccttttccaaatttggctcggctcatttattagcaaatatgcgctctctcgtgatatgttcctaagaatcaatatgtaacttatgggggtgtttggccttttatttatcagagctaaataaatattaataaaaaaaacgttttgattggtctacaatgtatcgatataattatatatatatatatannnnnnnagggatatgattttgtctcgtgattgt

SEQ ID NO: 119599 - DNA, 1793 bp, Cannabis sativa
  modified_base (1201)..(1204): a, c, t, g, unknown or other
agtataccgtagggagcccgtgaaggcccattattctcaagactagaacgcttttcatcaactccgacgctgtgaagttgcaaagggttcctgtacgattcatgcatgcattcctaaaattgtaaactcagagtagattaataccccatataagatagctagctacagattaggaacataattccaaatctttgacctcaaacaaataaattttctgcggtttttttaacaagcttagtaacagtgacttatttcataattcttaactaaaaaaacaaacaaaaagataatagtaaagaattaaactaacaacagcattggattcatcgtcgttttcgaggctatcttcggtgacggcatcgcgatcaacatcgctgatggattccatttccatatcagcagcaggacgcgtatcaacggtgttaagatcgtgcagaggacttgatatatacgaattcgccgatctcataccgaaatgctgaaccgggactctactccccattccgtctaatcactttaacaccctaaataaattcaaaacagaaattcaaaaactaacagccatggaattcgagctctttggatcctgtaagagcagaggaaaataagaaatggtttgaagtaagccatcggagcttaacctagcttaaaaatggagtattgagtgtaagaatggggaacttggctcagtaatttgaaattatacatatatatagatagatatagggggaaagttcaacggctatggagaaggagagagagagagagaatccaagcctgtagccatacctgagcttcgcttgtggagacgaaaaaggaaggtttccgaggctgagtccgatctctactccacaccagctcccattccaacattttatagtagcctagtagtgatctagtaagaccgttctcacactttataacataagtcctctctcacctcacttagtactactccattactaactaatttttatttttatagctaaatatataataaattttttaaatattaaaaaaaaatctcacaaaaatatttttttatgaagtttctcacaaaacacataaatattctaaaatatatattgttattttaaagtttttattctaaatatatgagagtgtttggtaatatttttattttttaattttttaatcataaaaatacaaataaaatttgtatttttaaaattttattttnnnnaaataaaaatgtgttctataacttcttttattttttaattttaaaaacagaaaacaaaagtgtgttctataactttcattttatttttattttttgattttatttaagttggataaaggtctgagtcaggggccggggccgtggttcgagtccgagactgaggctcgggccgaagtccaggtcttaaggttcaggttgtggtcgaagtctaaaatattgattatggaaataaaaaaactgtttaaaaaattatgagaaagtgattttttttttttttaatttttgattctcaataaaaatatttaaaagtgaaagcagttttatagaatatgtttttaaaaattattttcacttttttaattaaaaaatagaaaactgattaaaaaagtattaccaaacgcactatatatgtatctataaaggagagatataaagcgataatatgtcactctaaaatttctctaaataccactatttttttaagggtaaatatgctgcataaatacctaatgtttcagattttatacacttaaataccttatctttatattcagaggcaaaaatacctaatgttacaattcttttacac

SEQ ID NO: 119600 - DNA, 1615 bp, Cannabis sativa
  modified_base (72)..(73): a, c, t, g, unknown or other
  modified_base (1566)..(1572): a, c, t, g, unknown or other
caccctgcaaaatttcatggaaaaactccaagtatttcttatacttccttcacatatgtctacagagaaaanntcatctatgttcctggcagagccaatatatattttttttttcctttttttatgtatccaaccaatgtgcgaaaatgttatattataattttgtaatgttatattataatgtgcgaaaatgttatattatgattagttgtaattttattaatatcagtaggtcttataattttgttgcccacaacgtggttaagtgggcttttactcaccatttgaacgactctatttcggtttcctccttaccggagaacttattttgtaatgattgggagggctaactatttcgttttttatgataatacgcttattactgaaaaaatattattcagtgttaataatagacactgttggtgctaaggtatataggaaaattaaatttgggggccatatacgtaattaagagaacctagctacacattaattatttattaaaaaaataaaaaactagaaattatggattgatcccttcacctacctttagtgccgtccctatgatagatatgataagcttaacaaaatctattgagattattaatgttagaaaacaattatattattgagtgcttaccaatatctaagaataaaaattatattattatattgttgagtggtaataataatagaaattattgactgcaaagaatagatatgatagggtaaaaaaaaaatacaaaaatgagcccaataagtttcgaacttgtgaagtaaaggttgtaatattgactgcttaccaatattcctaaagacaatcttatattatttagctacaatgatattatttaaatattagaagagatataaaagaaaatttgtattgtaaattttattgtgatagaattaacaaatacatcataaatattgattctaacacttaacaaaagaattctattagtttattttaagaaaaggagcaaaataaaacacaaacaattgagtgacgggggtgtataacatgattttagcatacaaaacagcgttgttttgaaaaaatggttggccaaaccgccgtaggcagtttgcagtgcgtagaacgcgaaaaaatacccaaattcaaaaaaaaaatcgcctcaaacggacaaccggatcaaaagttattaatgtttaaagttttcaaaaaattttatgcaaagtttaaccatttttttaattttttctattcattttttttcttaaattattgtttcattttattggtcttgaaaaattacatgaaaaagagtggtcacattgttaaattggttaaaaattgagaaagttataccatttgaaagctacaaactgctactcactcacctaacaatctgcaccccatcacaatctgcaactcatctcaatacataacacgatttaataaaaatcatgtgatggtcacgtgacatgcattatttcatccacaagtaacatttcttttcccattttatcaaaattaacatctctgaaaaaatgtgttttatttacgaaaatcaaaaccagagctctctctctctctctctnnnnnnntctctctctctctctcattttctgtttgtgtgagttatatggg

SEQ ID NO: 119601 - DNA, 2125 bp, Cannabis sativa
ggtgctcatgccattgcgggaaggaatatgattgtccaaagtcagcattgatcatctacaggcaaagcgagatgctgttgtccaaatcagcatcaactgtctttaaggataagaataacaagcagttatgcggttatcaattgttatccacacgtattttaatgaaacatgatcgattcccacatttcatgaagcggttatgtaattcaaatttagttccatttatatatcttattattaatgagcatttgattaaatttaaaagaaataataatttgctaatgagaatttaccgttagagtgctctgaggcagttattttgtaccactttttggttttctcttcttttcttcctattcattcatgttacttcctttaaccgctacacgaacttgcatcttctcttttcttataaatcactgaattctccctatctgaagtatgaatccattaactaacaagatgaagggaataatgatcctcactgatgaggacgactcaacactgattttggataatgatcaagacgaattaactactggtatttgataatgttctggttgcacgaattcttacaataaaaatagtttttctttctactatgcagaaacaaataaagtttcattggaatggcagatttcacactaaaatcactaaaaaacctcctgatctctttgttctaacctttggatgtgaaggagacaaacaaagggttcttcttagggagcctattcattttcaaaatcatcacattgtgttgtacgcaccaagtgatttacaaaatgtctcgctagatgatctcatctactctccattttgggtctaatgctatagacttccttttcttagtaagtctaaatcgttggcaaaagcattaggaaacatcattagacaatttctggaagtccatgatgattcgatggaagaagattggggtccattcttaagattttgcatcaaaatggatatcactaagcctctgcttagtggtcaaaacattagactccaacaagttcgtgataaattttgggtggaatttcgttatgaaagactcccaaaatggtgcatggaatgtggtaggcttggtcacccatattagaaatgctatgtatggatggaaaaatcgataatggagtagtgcctgatctactttatggacctgaattgaaaggggttgcactaccaaataatggttatgataggtacagaaccgatttttcgaaaggaaatgcttggcctctacttacgtgtttggctcgaaaatccttactgctgcgattccaaaccttcccaacagacaagcatctcatccttggccactattaccaggagaatcctttgatcaacaacaaaataccaattctgagaaacatcactccagttcagtaccagtctcaaatgaccccttacccacggttaggattgctgctacttcacctaactttgttttgtccacgaggaatgttcagaataatgctactattaattcctcaactaccacaaaggttatgttcgcaccagcattgctaaataatactaccaaccattcgactggtatgatgaccactaatatggcctcacctatctctgcatcaaactatcccacaccagcaatggaaatttcagatgttgatgacttgactaaactttatatgccagatattggtataaaaaacaacaccattgcaacctacccgcccatgccttccatagttaatgctcctctaaatgggactggctctcaacacgcaacatcgaagtaaatcacaactacacatgctgtcattaacacaacattgcagcaaacaattgataaagaaaactgtcctccaaatcgatagccaaatagactgcctgaaaacacctcgatcaggaaaatactcaaaagatgaaagggtccacaacactcataatcctctctaactttgtctactagacaagagacaagtcaaaacacttccaatttttaaatggatcaattggtttttttgacacatctgcagtggctgagactcaaccccgcaatcaaccatgaaaatcaatgcgcggggtctggggaatctgagcgtgtttcgtcatcttcgattgcttgtcaaggagaaatctcctcatgtattatttatta

SEQ ID NO: 119602 - DNA, 737 bp, Cannabis sativa
aacaaaaatgtaacactattgataattattgggtttccgatgttatgtcttattccatagatagaaaataaaagtgatatatccaacaaagaagttagcataattgctaatttgattcagcagactgaaaatgagaccaatattccttgaccaactttccaaaaagtgaattttctttcttcattaacttcattggctcatcatactccactatttttcctgaaaccataataaaataattagttgaacaaattttgtaatatataatttttgccaatcaaaaactcaattaaccatcatattttggctttactaccatcactcatggcaagaaccatattgcaatccatgacagttggtatcctatgagcaacagttatgacagtacagtttgcaaattcagttctgataatcttttgcaggatcatatcagttgcattgtcaatggaagcagttgcctcatcaagaaccaatatttgacttctccttagtaaagctcttcccaaacagaacaattgtctttgtcccatactccaatttgatccatcatccacaactgaaaaacatgtatatgtttatatatttatattatattcacaaccaaaacactactaataatttaaaaacaaaacaaaaatgttgtcattaattattacctaatgagtccaaacccttttctttgtctttaatagcttctttaagttgacactttccaagaaccttgaaaatcaaacaaa

SEQ ID NO: 119603 - DNA, 1657 bp, Cannabis sativa
  modified_base (1608)..(1613): a, c, t, g, unknown or other
acattatttgaacgtaaaaatgtaaatattttacaaaaaatggtaccttatgtaattatttctatatattattgaatagttgagtctggatatgaaaagagatcattttgatgaattaaaaaaaaattatggatcaattttatttgtaatggtttttttaatatagcattaattgggtagaatttttttttaaaataaaaatacatgattctaaaattttttagaatatgtttttacagactctaaaatcctttaacatctcttgaaaatggtctctaaaggctaaaatttcaatagtaaaaaggacatagagttttttgttcaacttttttttttttgagggaagttttttgttcaactttgatgattatgactgcagaattttgtaatagtgaagattcatttattcatatattctctttgtgtgttgtgcattggaggggataaaatagaatcaaatgctatggtccctcatgcctcaattattattactctaaaagctataatttcctataaagtgactttagcaacaaatcactttagtcgttgtggagacaaagatacaataatttcatttatttaaaggcctatggcttacgtgccctttgctttaatcttctgatcattattgatggagaatcccaagttaaaatggataggacatttttcggtattataagtggtggggacagctcgccgagttggattagtcttgaacttgccaggacattcggtattataacacaactagaaaacgaatgcacggttgttgaaatatataaaaaaaactaaagaaatttttttaggtaggaatattatttttacttttattataggagccttttctatttccaacatctacaaaaattatatttttattatttttatgagaatgtataatgtagttatatcaaacattcaatttttttaaataatttataatattaaaaaatactaaattacaaacacatatatatatataaaattatacacgtgtaattaatttttagtaccataaattatttaaaattttcaaaagatagaaaagaaacctaatataactataatatatatacattgttatatataacattggaatgtattacaccatatactatttttttaactttttttttttaaatttatgatttggatttctaaagtggttgtagcgctagttgcaataggagtttctgtacgattttttgttacaatttaggttgcagcgctagttgcaataggagtttttatgtaaaattccgtaaaatattaatgcaaaaaaactgttttgaagtgtaaaaataaaaaagcccctaatttttttaagtgttgaatatagaaaacatttttatagtagaaaaaaaaagtgatatacctagtatttttcagaaattatatacgacttaattcttacaactatattttttactattaatttaattttcttctaatgataattactctttcaattaattattctaaattcaaataaaaaataaataaaatagtgtactgtaattaattatatccaatatttattattatgatacaaaatataattaaaaatggctaattagaatttttgccccctgaactttgacatatacnnnnnnatgccccctgaacttttaaagtcgttaaaaatgccccctgaact

SEQ ID NO: 119604 - DNA, 2578 bp, Cannabis sativa
ctgccactttcgccaatgctacatatgagagactgcctttggaagatgaagaggaggcggctggaagtggaggacatggcggaggaggtggcgctgaggattcgccgactgggatgactaatggtggtggtggaggacacatgggggaaggtcagggattggctgatccgtcggctatgccccctgtttacaataatcttcctccaaatctcatacctaatggagctcatcatcatcatcagttgggacctgcccatgattcttatccttggtctcatcctcggccctcttattgaaaactttaccgtaaaaaataggtaatttcaattattgatcgctagctatttaggggtgtgaaaaacaaaaacaaaaatattaataaaaaattccatgttttattagtactttatatatatatttgatgttttttttaaagaatttctagaggggagagaaagagagagagagagagatcgagggagtaatatatatatttatatatttatggtgatgatgaaacgaggtagcaagtgttattaattatcattagtgttgttggaagctttcctttagctctatataaatagcagttttatgtaaattacagagaagatgatcttattgttatatatatgttttcttaatttgaattgaataagaagggagatgatgatcatcatcttttgatggtaattatgaagtaaataatgccattttggatactttcttataatctgtagttttaattgtatctcttcacccttcttttaataattgtttcttattagtggagaacatttcacatatatattatatatatttgatgatgagctggaatgatttgtttgtagtagcagttagatattattatatgatatgatggattagacttcgaagatatacaaatatgttaggtcgagactccatttatatatttatgatcaatgtcaaaatgattttaattagaatattatatggtttatatatattatactactttggaacgtttatcttgtctatctttctctctccatctagctatattttataaatggagatcatatgtcagaaaatttgaggatgacattttcttaattaatacaatatattatatcatattgtatatatgctagccaattttgcttcaactaaaatgagtcaaatgtcatatctcggaaatttattgtaaaaatattatttttgtttctattattagggcatctgtatttttttttagccctttttcataaaattcaattccaataataattaataattaaaaattaatgtgattcaaatacgttctttaaagttattttaatatttttgttaacttttttacatatttttattaaaataaagtttatgttactcctagtatatcaaagcacaattgtaaatttgtgtcaaatataacattcactcattttcagctaaatttaacacaaaattaaggttatctattggagatggtcttataattcatattcttatatgataataatgtacattataattataccacgtcctactagttttaaaactttgattaatttatagtatcaaaaataaatttagttgcacgagctagcatataaaaaaaatttaagaaacttgcgcgtgtcaactgattatataaatcttattttaaataagtaaacttttcattaatgtgtggaatacatattataatatactttgtgatgtaaaaaattgttaaattattgaatagtggtaggattataactcaactactcaatcgatttggtattggaagaaaataatcaaagtaaaaagaaatgtataggtgataaattttcaacaattttttatgaccgtatattttttagtaaggattatacaagactttagtcccagcacaggaacaagtcgatcatcttgtttggctaagtgttgggtaggcttgttattaatcctaaaaaaatattcatattgtggttatttgttttagatagattgcaactcttggagttatttttttttttctattgtaactacagtagatgatgctttgtagaattgtagatactaaaaaaaattattggattggaaatatacaagctttaacttccctctcttttgaggtggttatctcgggccaagctttgtaaatttaggaagcaagtttactcaacttccttggctgtcgtagtaaaccatatagatatcgaaataatgaagtactgtattgatctcaaagtcttaaactcttacctcacacattgtatcgagtgaagatggatattaaggggagaatttcacaaatttttccaaagaaagtgaaacaggtagacattaattggtttgagaaatttaaagcaatgtataacttttatttgcatagcagattatacataggttgatgtaaagagatacttttgaagtaatacaataacctcattgataaaacagtatataaagttataatttctttcacatatcaaaaataaaagcatcctcatcgattggacaaaagaataaaattatctattataattttttcctacttatatatatactaggtggttgttacgtgccaagccacgtagtgttagtt

SEQ ID NO: 119605 - DNA, 927 bp, Cannabis sativa
tcttatattagtgatttttatttcccagcatatactattggttaacaggcttattataatgtgtctatttctctttatagctcttcttggtaaagccaatgtatcaattaaaagcaactaacttaatttggtgtatgtaattatggttggcatgcatttcattggctgaattccaatattttgttccaattagtttgaagtcacgagatcattattaacaggggaagtagtgggtcatgggaactgaaataaaaccagtagtgactttgaaacaattattgtattgttccattttgatttcagttaggtccctcattctatttatggtgtgattgcccgatcatatttgtagggctaaatcatcaggttttgtttttttttttttggttggatggggatggtctggtaataaaaagatggcccttgtagtttgcaagtagagcacataatatgtagctcatacaatcaaagattccgcctctcacaaaccagactggaaaatgaaaataatcaactggatctatagtgtttgaaataaatagattgctagtatgaactgtataaagttatgctgcaaatccagaacacaaattcaaagatgggcaagaccaaaattaacaaagataatcaaagctgaaatcaaaagatcaaaacagaacacaacataactggtaaatattattttataaaaaattcgtgtatatatgtgaacgaggaaatatatcataatacatgagtttcaatcctaatttaattttgcattggtaattggacttctatgcactattcaaaaagaatttagtgttcgcacagaaatgagcgaggagatcgagactgatactttatatttataggtgagatattttattagtatatacgccacattaattgtcagaatattttagcgaggagatcgagactgatact

SEQ ID NO: 119606 - DNA, 996 bp, Cannabis sativa
tccagtttctatactagacattttgtactcagaaagttgatttaatgaagttgatatttcatcaaaattgaaagatcatacctttttacaattgatttgatggatttcggtatgtttttactaatttttaattttattgtttgattctcctgaattaattagagtttaattcaaattatagtattctaacatctagtatcaagagcatatctataataattcttaaagatttataacaatattgttataattttcaattaaattttggtatatgtatatatagaaaattataaagtgttgcttttttgtttgttgattacagtttcatatatttatatataaattcgattacagtttcttatatatatatatatatatatattaatgtgattttaatttttttatgtgaatcctccaccaccactaaattaggaacaaatgtatgctgcaatacaagagaccatacgataacaatgagatcaaattagaaaattgagagagcagcaagtttggcttgcttctaatcttattcctctggcacctctggttgtgccgcaggacgtgggaaatcatttggagtcgttttatgagtggtttagaaagcagaacctgccagtgtttgagggtggtgctaacccacttaaagcgaagcagtagattaacatgataatgtctatctttgactttatgcgagtcgaggggtaacgatcaggttgggtgtgccatattcatgctataagagcacgctcgtatatggtggaaaatcgtgtctcaaggtcatgatcttaataacatgacttgggatacatttcaaactttattttatgaaaagtattacaatgaatccattcgtgctgctaagaccaaagagttcatacgactgactcagggcagcatgacagtgacaaagtatgctactgtaacgccccaatattttgccttattttacaaaatattaattttgatgcattaattaaaaagattcaaagctgtttg

SEQ ID NO: 119607 - DNA, 1981 bp, Cannabis sativa
agaaacaataaatatacattggtagacctatcaaaaagaaatgcctaaattgtgagtattaaaataggtaagggtaaattcttaaataatttaataataatagttgttgctgcaaatatttcttcaaaattccgtacaaccatattttttgtaagtttttaattatttttgtttatttatgaaattatcttctgaaaaaacgtgtaaatgtgaaattagtttcaatgggccggggtctggtgatactggacttaggataattatgatttattattaagaaattagctaccaatttaaatttaagtactctattctattggttgagcctaatgtcggcatacctacactatttaaagggtagagtttggtttcaaaccttttatcacactttttctttctctatcaagtaatcttcacatatgaatttcataagatttgttgtatctcactccttatttctattgaagaagccataaagctctttctataaggtctgggaataaatgtttatacgacaagtatctctacttgcaagactttgtgatactattattatttgctcaatccctttatccatagattacttttcaagatacttcaacttctcatctacttagatttgagagtttaccttagttactaaatcttcaacattttacctcctatgcatgtacatatcggttcccacaaacctaaatttaatcttttaaatcctagctaccattagataactagatactattttaagggtaactagttacatatattatagtaaccggttgccaaatacttaaattagccttctatgtccttgttaacttcccacaaacttatggatgatgttaggtaataagaaattcatcaacagatctttcaacttatgtataatttccatcgtagctttcgaactaaaaatgactttcataggaattttatataaagaagatttttctttaacacgaaagtataaacaagtgggtaaatatctcttaattataagatatatatttataatcaaaagtataaaaaagaattggtatattatcaaagtaagatctattaatgatatagaagcaacgaaaccaaccatagttaccaaaatataaattttggcatatattattatcaatataaagcttaatgtttggatctctagactcaccattacaattttggtatggtactagtagtgcatttactcacataatatataatcagattgacttctgattttttgttgggattgatgaatcataatcataaatgtataaaaatatatataagttgtttactttgttattaggagaagccgtgacagcagctagagtccaataattgtttatgagctatcttagaaagtccgctgacagactacaaaaggtttattgctttatttaataaaaaaaatgaatttaattttatttctttatttagtcagaatttttggaataataattattctattttaaaatggaaagaaaaattattttaaaataaaaaaaaaataatttttttttgtatgtattttaaattttatttcattccacttttatttttattcttatttttatttctatgttttctttctaattaaatgtcacttaagtgtacaatctctatataaagtattgatatttagcactagtaatacttaatactttatatgtagtattgtatgattaattaactatattttttaaagttattttttaattaatataatactcaatatttaattatattgtagaaatatagtacttgtataaaatatcaacacatatatattaatccaaactgcttttatgacctgattctataaagtcacagtgtcgaccaatttaatttgactctattaattaattgttatggtggcgtttggtaacacttttttaattagttttttgtttttaaaagtagaaaagtgaaaatatttttcaaaaacatgttctataaaagtgtttttactttacaattttataat

SEQ ID NO: 119608 - DNA, 960 bp, Cannabis sativa
cccgaataattcgggccacagtcggcccgtcgggccgggggcccggcccggcccgcgaaaatggcccagattgacattcctagttagacatctgtagagcaagtagactgtagctcttactgcctctgcccaaaattgttttgggagacctttttctagtagcatggctcttgttgcctccataacagtcctatttttccttttagatacgccattttgttctggtgcctatcaaacagtgagttggtgctccaccccttcatcttcagagaacttgttgaattcattacaagtgtattctttacctctatcacttctaattgtcttgatatagtgtccactttatttttcaacacaggttttaaatcttttgaaaatataaaaaacttgggacttttgttgaataaaataaaaccaggtcattctagtaaagtcatcaatgaagagaatgaagtacctattttgatcatttgatggagtgggcattgccctgcatatatctatatggaacagctccagtggctttttggctctccaagctttgcctgacggaaaagattgacaatgttgtttcctgatcatgcatccttcgcagactgtgttaatctccttgattgttgggaggtctcgcataatattcttctgtttgaggatctttattagcccgtggaagttgaagtgaccaaaccttctatgcaaaagccacgactcatctatttgcgcttgcattttcacattgcttacatatctcaattgtatgagaaagcatctgttatctctcatttttttcctttgcaatttgaaatgatttatcttgcttatcatagattatgcaagaatctccttcaaaatgaaaagagtaatgtaacgccctaaataattaggcacgctacccaaaatgattatgaaaccgtaatcccctaaccgggattactaattaaaaatagcgcagaatttaaa

SEQ ID NO: 119609 - DNA, 777 bp, Cannabis sativa
  modified_base (727)..(744): a, c, t, g, unknown or other
tattgataagagcacagaatattttcaaggaaggagtaagacagaccctttagaaatttttatggttcaagattttccttaacaagagcagtggtaatctttgttgttgttgttttttattttttgtttttatgttcttatttcattaaattccttttgtgttttttgtatctaactgcttgtttttaatttgtcacagttactagttactgtggtgtttttgttataaagtacgctgagtattttattcatggattgattgacaagattccgaaggagttggacattcctattgttcgaaagaagttgtgtgttgagctctttgttcatgataagaagaaggaagtgagtggttatgaatcaccttcagagtttcctgggaggatggaaaatgatggaaagaaaaagaagtagttgtttaatgtagttagaaacacttttgttgcttgttgttttgatacttttgtatgggttattgttgactagtttggatagttatgaacgttaaacagatttttttttttttgtctagtcattttgttaaacccatgtatggatatttgaactattttcagtacctttaatatgatattaatgcaggttgcttttggagttaagtttgaagtttaattatttttccagatgtgaaatataatgtaagattactatggaagtttatcactttggttttttgttaatgttagtattgttggaattattttaccannnnnnnnnnnnnnnnnncaagtatgttgtttaacatcctaagtatgaact

SEQ ID NO: 119610 - DNA, 1345 bp, Cannabis sativa
tggcggagcggtccggttagataagttaccaggttagaactgatgccgtagtaggcaaacctctccgcaacctcaacacctgtggaattattttcatttcaatcgctgtaatgtacaccttctccattgatgacatcaaatatatatatatatatgtgtgtgtttacctatgatgaaagctgctgatctccaaccgccagagttggttttcgaaacaggacggcctttgaagtcaacggcaccgtcggcgacggcgttgactagcataggagtttcgacttcctccgccatcgacgacagctctttttctttttaattagatgaaaaaatgtaactaattaaatgatgggaaattttgtttacactaacaaaatttataaaaccattttaataatttttattttatacacgcttcgctagcggcagtaaaattattatataaatattaatagattaaaaaactcgatattaaataattttgaactatatacgtttattaaaaacaatgataaatttatataaaaaaaccttagaattctaaaaaccaattattatacaatttcttatataagtaaaaaaaatacacaattttcttaaatgaacattatagtgaagaaaaattataaaaacaataaatttatagaaaattcatcatataattttaaaacaaccatcatcaccgtatttcatttttagttaccattgcatttaaaattgatgtcatcaccgtatctcacttaacattcttttcaatggataaatacttacttttattatgtaaagagaaaaagagtcataaaaaataattgagtttaggattttgatatttttagtatattagctaataatttcttttaataaattatattagttaatattaactctatatctttctccgaaaaaattattgtatatgtagataatttttttaatatatatatatttatttattagttattatatatagttgtatagttttattttttattttttttaattgattagtaatctttaattaaataaagcaaaattaaaaaaaaatgagagaatttaaaatagaacaaaaaaaaaaaattacaaaaataagagaattaaagagagaataaatatttagaaattttaattttttaattttttaattactaattaattatcataaatttaaaaaattataaataaatagtttgactttgatttgttagttattatgtatgaggagatatttttttttttaattattactataaataaatagtttaggatgattctacaatgcacccctttaaaagggatgtactgatgtacccttaacttgtttcggcatctagaaaaaaattttagtcta

SEQ ID NO: 119611 - DNA, 910 bp, Cannabis sativa
gttaggttttaattattttttttttaatatttgtatataaatattatatatttgaaataaataaaatatattaaaaaactgaaaaaaaaaataatttagtgatatattttaaaaaaataatgtataatataatgtaaaagttttttttaaaaaaatagtaattaattaattttaaaggatactgtaaagaaattatcgagattgcttttagcattttgactacagaaatacataacccaagaatatagtaggccaatataataaagattcaaactaagcaccatgttaaacaaagtagtatgatactctcttcgatgatgagaaaagagaaatagggtaatatgtaataataatttttttttttttaattctatatatttatatatttgtctaaaataaaaaagaaacacatatattgtgttggtctcaacatatttaagtgaaagtaaaaaataaaaagtggcatcccaatttttaagagttttttattttgatttttcataaaataaaaatctaaatatatacatggttggaataaaggtttcaaagtatgttatttattaattatatgagtgaggaaacatgtatttttcttctctaagaagaaatatagggaacatgtggttggattaataactatctttcaaaacattttccattaccaatagccatttagataagactaatcattaagaagatgcatgtgtagtgttttgtgttacacactaactaacatagatgtcctctaattttgtggtggggaaccacttttcttttgtatatatttctctccctatatatattaacaataactaaatttgctctgactttttctatttttgttataagagaataagattaattaaaatggtaaatatatataggtgtactcttaatgggtattacctat

SEQ ID NO: 119612 - DNA, 1120 bp, Cannabis sativa
aacttaaagataattaaatgagaataatataataaaaagctaataaattattaaaaattgaaagaagcaagattaagaaacaaattcacataggtcgtacatgattctgtttgaaaaatcatgatatgatgtcaaaaggcattagagctagtcctttggtattttctccctccccttaataattctaaaagataataacgaaaaaaaataatataataaagagtacaaaaaaaaaaaattaaaagaaaaaaagtaaatacataataatttattaacgtaaaccaaaaagataaacaaatcacttctattgtaatcatgatcactattatatattgatatcaagattttttaatctggttaaaattttcttaaagttatattactccatttttatttttattttttgtggtttatgtatttttacaattttaaactataaatatatatatttcattactaaaagtaataatttagattaaaaaaaaattatgtataggagtgttccataatgtagtttactcggtaggcaagtgtactacaaacactttaaacgatatcatcaatagaaaatcaataaattataacctaataattcaaattagactttatctttgctttgctttccttttttgttttttttttctatgcgattttcaattggatattgaataaaaacgacttttattgataccataaaaccaacaaataatattaacaaaattattgaccaaatgaaagaggaaataagagtacgatacagttgagtttgattaaaaaaataataataaaaacaatacttgagtcaagcgatgtccaaaatatagcgacaaaatagaggcgtatatgagcgtgagtgtgttcataatggcaaaaaagacaattccaatcattaatgttttcgagcttcttggaaaaaaaaaatagggaggctatgtagctccatggaaacaacaaaaaactctacatgagttggtcgttattagattgggtctccaccgactgccacacacttgtatgctttcatagagaaaaaaaaatgtgattgagttaggaagattccaacttgaatatttgaagataatttgttagaagttacaccttattctatagaaataagctc

SEQ ID NO: 119613 - DNA, 720 bp, Cannabis sativa
  modified_base (33)..(35): a, c, t, g, unknown or other
  modified_base (638)..(642): a, c, t, g, unknown or other
cataaaccaagaatttcagttatataggcacannntatatagaatagatatagattatgaaaatactaatttttatttaattatgaaaattatatttatgtgtgtatatttcaagagaacaatattacatcaatccttcaaataaaaattaaaaactatttgtaaaactttacattaaataaataagatattatgtaccaaataaagtaccatataaataacgcttaacaaacctttttctagcttataagttttttatttttttaaaaaaaaaaatcaaaataaatacgacaaacctaacaacaaaataaatacttattatttataagttagagtatatataaaaaaaaaaaatattaagattgcgagagtaaattatcataaagataaagatcactaaagtcgaatctaaaaaagctataattataaagagaaagagaaattgaagtcaaattcaaaaaagttataattataaagaagaagagaaacaaaaaaaaaaaaaaactatgatagaattatcatatggatgaaattcgaattgtaagatctcatgattgtcaattgcgtgaaacaaaaccataatagagttacaaataaataaagttcagatggtaagactgttgggaatattttaccannnnntagatttacaaacaagtatgttgactaacatcctaagtatgaatatctctaaaacaataaaataaacacataagagtt

SEQ ID NO: 119614 - DNA, 593 bp, Cannabis sativa
aatcgatcaagaaattcaccacaaaacacgaacaagatcactatcttattctagtgatgagattataaaattaaactaattgaatactacagacaaatacatagatgaaactcaaacacacacaaatttaactacaactaccactttgtttcatttcatgaaactttatctcagagtattacaattctctcactcttacaatctttttagttctaacatagatacgagaattcgatcactcgtttttacataaaaaagaatttacatgaaaccaatactttttccatctcgaggttaaaggtttctatttatagaagcttaactactaactactaaaataagaatggaaacctaactaacaccctacaggacttggaccaacatggaccaacaggaataggacttcatgattagaccaactaactaacatttatagttaaacaaaatttatcgtggtttttattttaggatattggcaaaaaaaactacctaaattgtatgttttttaacacttaaccacaaaaattaatttttgacggcaaaacctaccaaactcacattttattttgctcttaacacttttgtccaaaacc

SEQ ID NO: 119615 - DNA, 959 bp, Cannabis sativa
gatggaacatggcatctctacgattttccaatcttcaaacaacaagttttcttggcaaatggtacaattattgttggtaatcaaatcatcaccctccttaatattcagttcttttagtttgtttatagattcttgtgtagcaggaacatttgaaatgacatcaagtgcctctctaaacatactatcaagtatcatcgattcttgttcttgttcttcactagtgagagcaacaatataaaggttgataataacacacttagaggccacaaagggaatggtgttaatatgagtgtcgatgtaaatatctatttggctagcaagtatagatcctgcagttggatttgtcacacctactctaaatagaatagtttttgtgatgttagattggtcagaaaaatatgagtcgtgactaagtataattgattgatttacattttgaataatttgttgagaaggacatattttatggcaaaagtttaccataaacactaacaacttattgtcttgttcaaagtgaaagctctctaatggaagattatttgagcaatcaataattatactcatatcgtaaatggtatttacagttgccatctccatgattaataattgaataaattctataagaagagaataatattattatttgttatctaagtgttttgtgaaaatgtgttattaatatatatatatagatgaaaacaaaatatctaatcctattaggaattaggatacttcaaaaaataatgtaatattatacctaatcgtataaggataattaaagatataatgtattttttttttttaattttaatcaaacaagaattttcgttagaatttaaaatattttaatactgttagtttaatctgttaccaaaaagagatttaattggttcgatgttatagtttaaaaaataaaaatattactgttaagagttaaaaattattgatcgaaaaaaaaa

SEQ ID NO: 119616 - DNA, 2155 bp, Cannabis sativa
  modified_base (1128)..(1130): a, c, t, g, unknown or other
agtaatatattgctcataccatgcaaatcatagagtttttaattaattaggtgattaataatctaaacaaaagtttcaagaaagttgctaattaaataatatatattaattcagtgaatatatataataccaaatgttatattattatatattagtgtcattgagttatgaccaatagtgcaataacaatgtgggctaatctttcttattatgcacgtaagcatcaatacaatatatatctcagaccagaaagttatgtttcttttaagcacatcttatatttaaatataatgcactgaaattaaagagatagaataataaaatcagagataaagcaatctctcctgctacctttttcattttcttaataaagtgggtatagttatatatatatatataagtactaaagattacataacctggattatattttaactaaattaatatattatatatattaatatttagatatatatttgtgaagatatatttatagccccttatatataaatgtatgtagtgtatatattttaggctttttaatatatgctattatatccttaatggctcacgttacactaaattgattccaagatatttgatttggaagatctccattctccaacatatatataaacagtatattggtagctttcttagaagattatgttggatgctactaagatttggacttgtctacaaatcgatatattcatttaataataataataataataattaggttttagaaaaatattagtttattagaaaagaaaaaaaaaacatggagggtcatttgtattgcaatgatatcttgatatatacatatatatttatatgaattttggagtgattagtgaactcagcgaaatgtgatagaaaatgaattcttgattatagtgtcgtattttggccttcgcaaaaatatttttgtttttaaaaatgaaaattacttttatttttaaataattaaaaaatttaaaaacaaaaatatttctaaatgtcaccattgtattgaaatctgatcacaaatattcatcatatataataataaattatgcattttaacttatcatgcaagatataataggtagattttcgtcacattattcaataataataataatnnnaataataataataacaataattgatataaaaaatgcatagatcccttaagagtatccaaagggtgtaatcaaggctttagtgagaaagaaaacaagaatataaggcaactaatttaacaattttgattccatgcactaataaataatatatacgagtaacaaattaagttattattttcgaagaaaaatatatatttataataggacaagacctaccaaaagtgataggataataaaatagaagaaagaaactaagtgggaatgtcacaaagagatgatatagaataaaatagaaaagaaaatggaggttggagtacatggttttgcacgacttaacaataattgaaccattatagcacctaaaagtttccaaatttttttaatatataatataactattaattaatgtcctatatatattaatctctttcaacacaatgcgtccgacacaaacaaattaaaagtctatataagatatacttatatataagagaatagggatggtactatagaatgtagtctatatattgaattataattccttaaaaaatatatctagctaatagatcatatagataaatatattattttaagtatcatgcatggaagtggttatagaaatagactcatctatagtatactaacacttcctttatggaaattattaaaataaagaaatttaatatatagatgtgtgcagaagaatagtactagatatgaaaatgtattaagcctgtataaacccagatcgcttaataagtgttagatacatagcagtaacaacaacactagtgaaaaaaatgttgcctcaaaattataataaaagtatatatttatttaaagaaattaaatgttatcctaaaacttaattcttattcatattttagtttttccaatgattatcatattctggtatagctttatattctttttaagctattatatatatatatggaacacttcttaatgggtaatacacattgatgggcattaaaaaaaaataataaggtaacaatctaataacc

SEQ ID NO: 119617 - DNA, 1922 bp, Cannabis sativa
cgagactaaaaatgtcactgaatttagtgataaccagagtgcacttcacctaatgaagaaccttatgtttcatgagagatcaaaacatattgacattaagatgcacttcattagggatgtaatctcaagcaaagaagttcaagttcagaaaattcataccaaccacaaccctgcagatatgttcaccaaggcagtgactcatgtcaagttcaaacactgcctcgatttacttcacattgcaggttgtgattaaaccttgttcagatcaaggaggatttgttgtttatgatctatctcatgtcaactaattcacacgtgcaattaggagttagttggtcaaggttgttggtcgattattacagttaattttgttaactgtttttagttgtaatctttgtattctttgcctttcagttcagattgtataaatagttagatttttaattctttggtgtgattaagccttgtacattctctctcattgtaattctctccaagatcaaataaaataattcagattattcaaactgttcttattttttgttcattagttcttagctggtttttgtaccagtactgctgcaacattgctacagcattgtatgctgttagttttgttcttttgcattgattcttagtattcaatctcgattgcaaaggtgatcatcgatctcaacaacttttgtgatagtttttctttcttttttttacttaaaattgataatgaaaaattaaaataccatttaatacatgttcttatttgtattttttttatctatttaaaaaaatggacaagagctcgcgtgactcttcctttccaagaaaaaatatattcttttatacatactagttcgacagggtcatcgttgtggttatcaacctccgacaaagtagatagtgcctaagctgagtaacactcaactataacatttaatttctctctaagatgcaattttattgtctttatctgattatcgaaatgttgctggatacggtgatcaaactccatcaacatcttcgcaagctctattttattcattattcgcatgtgcgaattgttttgttgtctttaatttgggttttggcagaccattccgtcttaaatattatcgctactatatattctttcaactttgagattggagtttcagttctttttttactaacaaattaggttttagtttcaatttctacgggaggagataacattttgatttcatagtttgattaggttattttgatttcatagtttgattaggttttagttttgattttcacgggaggggataccattttaatttcatagtttgattattgttttgtatttttaatttatatttttttaacgtttaacagaagttaacctaaggattgaaaatatttaattagctattacttttctcttcctgttataaaataataacgataaaccaataactagggttagatagtcacttttaatatatatatatatatattttaaataaatgagtaaagacagacactttatttgttgatttgattgagcatgttaattttgtgacaatttttattttttatttaaattttataatgaaaagttgactcatcttttaatacatgttttcatttgtgttttttattattatttttttaaatttagacaacaacccatgtgatctcatcattctcaagaaaagatatatgtttataggatttttctaaggtggggaatttaaaaaaattcttagtttgttctaattgggcaattcaattgtaatactgtagttttgaatgcaacatatttaaaaattaggagtgattaaaatattttatcttattcatctttaaataatgtccttttttacttaatagttagtcataatagggtaaatgacggtaaaacccccaatactttagttttagtttcactaaacccccac

SEQ ID NO: 119618 - DNA, 828 bp, Cannabis sativa
agcccaaataaaagtctaacagaatattgtttatattgaatccaaaagttatatcttaaagtgttcttcagttctatatgattttgtttatgttttaagaattattggcagtgaaaccctcatacattttggatttaaacattttaatttttcttatatgtggcaaaatttctcttacttttttattttattttatttgtaaatttgaaggtttagttagatattatctttaaatatcaacttaattattgtcatttagttaataatttaatagtgatatttaactagcattttaaatttgtaaaacaagtaatataacgggttttgctaaaaaaaataaataaaaagttataaaaaataaaatataagtagtctcgcagtgaattactacacttttcaaaatggttgaaagaagcacttgaattgaaatcgacagttaccaattaatagatttccttcaactttggggaaaatatggtcctataagccattattgatatgtgcatatcaatagatcataagaaaccagaaatgtagaagtattaagtggggagcataactgaatctgaaatagattgataaaagtgacttgaagaaaattgtgatattcagttattatagtgaattgattgcaaaagtgaacaaaattcagtactcatatagtgatacggctcggcctgaaatgtgggccaagttaaagtttcaaaattcacaatttttattcgaattcttctcccacttttgggtgaattcggagcacagtgtggcgtgctgccccatggcacacccacactagggccattttgtaacatgagcatgccttggtgc

SEQ ID NO: 119619 - DNA, 788 bp, Cannabis sativa
ttatttagatcttattttcatgttacttttatgtagttttcttgttatttttgtgttgttcttatgaaaaaccgtaaaaatgtaagaaaaattatgtaaatgtaaaaatgtaacttatttcacaaaaaatagtgtcttatgtaattattcctttattttattttattatcattaggatgttttcttatttcacgctacaactatctaaaataaacatttctactcttaaaaaaaattaaacatttatactactttatcttaacaaaaaatactatttttaaaattcattatttgcaaaaatatgtgaatatagggaaaaaaatttgaaaaggattaggtggcctaatataagtcacgcacaagtagaggagattattcaatataacagagtgtcacacgtgtaaaaacaacctcacaattcttttttattttttctttgttggctgggaatagttttgagaaaagatattaataaaaatatatatatatatatataattttaatatttcattgaggctaccagctgtgtaacgccctaatgctaaggcacgttacagtgatttttcaattgcagtgctatctttgctaatcaaagaatgttttcaaaagtcgtcacaaattaaaacttttgatatcaactgtgaaacattataaacattaataaaatatttccaagtgccgtgatcccattgttaaacttttacaaaaatatacaaaatacaaatgtcaggtcgcatagcgactacaaaagggaaaccccagatgtcccgagaccaagcactccaggt

SEQ ID NO: 119620 - DNA, 2006 bp, Cannabis sativa
atgcttgtgtcttatataactggagaagattatagtttcatgatgttttccccgttacccagaagtgctaaattcgtttatttacttctttgtacaagggatttttggactctcataatgcgggttcctctatggacattcttctagacgaatactctgattttgaaagacctttaagagacactaaaagtaaatttcgtaaattaaataaagagatggaggatgactgggagcttccaatggattacttgtgagctatcttctgtcttaacagaatagatacaaaggatgggttatggatttcttatcttctgtgcctttattctttttggtatacttggttgttatggtacgtataaataaactataaaataacaaaattgtttgtaaattgtaaatgttatgcgctctaatctgatgtaccgaagtcaactttctgctgcaagaaaaatgcaatattagtttctaaggattggcgtgaggaaatgtaatacctcttgtatattttcgtgcacacgcctaattgctcaacagctatatatttatagatttatagagaactactttctaatggcatattccttatttttttttttttagataaaatagccagttatgataaattaataaaggttatttacaataacagaatatattagaggaggaatattctccaaccaaaagaaagtatcattcaactttaaagcagatttagccaacttgtgagttgttatattggcagtatgtttgacatgtacattaataactttaggaaaaaaaaaataaaagactaaaaacatctacaattaaatccttaaaagtaaaaattgtagtaaaatggcatttcaagcagtagaaaccatttaagtgtttgtctttttttgtgtgattggcaactccatctgtaaaatccaagttagattatggaacatagcttttgcttccattttatgagatgcaaagttacctatgatcggttttggaaaggcagcaacaacactaccatgagaggcataaactatggctccaactataatattcttggtcacatctaatgcagttgaacattagttcaccatgaggaggaggtagccacgatatgtgagtgtgagccgatggtagtagttttggagtagcagagtttgagtgtgggaaaaatttatcctgagcatcttggaagttttggagataagtggttgcagaagatgcaagggtacgcgctagtttgacagtaccaccgtgaacaacacaattaagcttagaccatatcgattgcatgatgccgatgatttcttctaattcaaatctgttatgaatgcttgataagtgcactagatagtctcctttaaacattgagtaggactgattccaatctaaagtcaggtctgagcagcaccacacggagcgcacatattcgcaactgaacatggcatggctaatagactcccaagcttgtttatagagagagcatcttgaattagttatgactttccgcgtgactaagtttgtagcaattgggattgcctcatgcacaacttttcaagcaaaacttttgaccttttgtggcaattgtagagaccaaaataacttccaccatgatgcaaaagaagtcgatgaggatgagtggtcaacattatcaagcttcgcagctaaatgatatcctattttgacggcacagagccctatgtgatggtgatgccaaataagagaatcattgttggggaaaaaaactcaatggcaaagttaaaattcgatctacatccaaagggaaaaagtattgcttcaatatatcaattttccattggcgctcactagtaatgagatttgccacaagcccatttgatggtcctgagtaatagatcggttggaaagatttgtggccaggtatccatgggtctaaaccactaagtatgtgtgttccttcccctacctttcagcgaagaccagccatcaataattctctaccctataaaattccttgccaagtcattgaaggggagtgactg

SEQ ID NO: 119621 - DNA, 2719 bp, Cannabis sativa
tatctagagtaaaaattcagcaccttattggattttttgagagataacaggatcgatgttagatgaatcagtattaagtgtatgaaatggaaagatattctcatggaaaataacattacgagatataaaaaattgattgttgttgatgtcatacaacttatatccgttaatcccttgcggatagcccatgaaaacacacgttcgtgctcgaggggagaatttagtcctgtgagcagatagagttgaggcaaaaacaagacaacctaatgatctcaaatggttataatcaggtttttttttgaaaaagacattcatatggggttttgtttttaagtaaagaagtgggaatcctgttaattagaaaggcagcagccatgacacactcactccagaattcgatggggaattttgcttgaaaatataaggcacgggccacattgagcaaatgccgatgctttctttcagcaactgcattttgctctggtgtttccacacatgtgaactcgtgcatgatgccatgctttgcaaataaatctttgaatacaagttctggtgcattgtctgatctgaaggttttaaaaatgcatttgaactgagtttgcacataagataaaaattgagggataacaatattagcatcagatttatgttgcatcaaataaagccaagtaaatctagaatgatcatccacaagagtaaggaaatatctgtgatttgtgtgtgatgctatgtgataaggtccccaaacatcacaatgtatgagatcaaaagcatgtccagccaatttattattatttccaaaaggaagtttcttttgtttggcaataggacaaatatagcaaggtttatgtttatacaaaagagaggtattacaatgcaaagtatctttaagaagatctaatcgtttttgtgacaagtgtccaagtcgagaatgccaagtttcagcagacacagaaagaacttgggaaggatctggtgcagtattaaggatgtagagatctttgacattgctaccttttccaatcatcctctggttggcattgtcctgaatataaaaatcattagaagtgaatttaattgtaacagggagatttctagtcatacagctagtagagataatattgtatttaaatttgggtgcatagagaacattagtgaaagtgatttggttacccaaaacaacagtcccactttgattagcatagaaacaggtactgtcaggcaggattaatttgacagtaggtattttacataagcattgaaacaactttatatttgagcatatatgccttgttgctcctgaatccataatccaagaattatccaaaggagattcagaatgatgagataaaacgatacctgaattacttgagaaagtgcttggttctgaggtgtttagacctgattgctgagatgccagttgattgagtaattgctggtatcgtgttgtggttaactgaggaagtagagcatgattttcttgctggttgctaccattctcatcagcagtttgaacttggtttgcactggattctttggacttgttcttgttgaaactaggtgggtaactatgaattttgtaacatttctcgatggtatgccccaggatgttgcagtgtgtacagaatggcctatttcgttttggaggttgattcttggatgtttgattgtccattttctgccaagcatttttgtttccttgaaaagcaaaggccatggcaggattaggattatttgcatttgaagtattacctttctggtgttcttcttgtgtaacaaggtggaacacacggcttacttcaggcaaaggatccattagaagaatactccctcaaacttgagagtatgaatcagacaaacccattagaaaagacataatgtgttccatatgatagtgatcttgaagtcttttaactccaccacaagtgcacccattgcaagtgcaagatggcctaaaattagttagttcctcccatatagttttaagttttgtaaagtacatactaacagattggttgtcttgtttgagattcattaaatcttttctcaaattgtatatatgggggccatttctttggtggaatctgaccttaagatcattccaaatggcaaaggcagattcatcataaagaatacttgatgaaatttctttggatacagaatttaaaatccatgatataacaatgttgttatttcttatccatgcattgtaaagaattgaatcagaaggtaagggtttagaaattgaaccgtccaacaagccgatcttgttcttgactgaaattgcgagaagcatggctctgctccaggacacataattgtcctgtccagtgagtggatgagagacgagagtgtgccctgggttgtctccatgatgaagaaagtatggaatcgcaaagtcttcaagaggatttcttgaagctgaaacttgcagagatgcattctgagtatctctaatggcggtttgaatcgttgtttcaccctgagattcttgacttgattgatgattatcttaagacattgcagaagatcaatcgaggggagaacgattgaatttgagcaagagagaaggaaaagaggttgcagcgggggagaacacagcttcgtcggagaagagaaacacgactatggctggaatggatcggacaggaaagcctatctttgctgctctgataccatattacgaaaaagaagtaaagacatttcattaatctgagaa

SEQ ID NO: 119622 - DNA, 574 bp, Cannabis sativa
  modified_base (385)..(394): a, c, t, g, unknown or other
agtaatgaaattaaatctgtttctttattgataattgagtagaaaagattacattgaaatagagttttatttagggtacatagcccaacaaaaacaattacatgatatatgattaaatatattataaaattatagagaagagaaaaattaataaaaaataataataatagaagggacgaaaaaaaaaataaagcataataatgagtagaataaggagtaatattttttaggataaaaataaatgacgtgaataggtatatgatggtttatatatgtactaataattaaattttggatatgcatacatatggtaagtgtggtttatatggtgtttttcataaataattaatttatgttagaattttttatagaaaatttattaaannnnnnnnnnaatatcaatttgtagatttatgctctaataaaatattaaaagatgagagaattaaggaaggaaaaggttgatgtatttggagtaatattatagtgcatatcaccgcctcatatctctcatacgtatatatatacatactaggcaatatagctgctattcgtgcgactaatttaatttttt

SEQ ID NO: 119623 - DNA, 1143 bp, Cannabis sativa
cggaggagtacggccttcagggacacataagccgtccaatatggctttgatggttctcggctcaagtgactcaaacgtgttcacaatcattcctgtagattcacataaatcattagcgcatgcaagaaaattatcataggccttgtcactgcggtcgagcaacggtttcggcatgtcagaagacggaataggcggaagtccaggtatatggaggagggtattttggtctttgaagctcttctgggaatttctgtgaagggtaggtaaataaaagaagaaagccatggcagacgctcccgaggtaatgaagaagaaacacgggattttaagctgtgtagagacagtgagcgtttcacaacagaagaagtcgatgatgaaagcgtgaacggtgtagtttttggatatggagacgagagcttgatgtacgagtggcttgctgtgtcggatgagatcgaagaggagattctcgtggtgaagcgaggctgagtcgatggaggttggtgggaggtgatggaaggtgatagaaggaatggtggcagtgacggtggcgatgtagggagcagtgtcaccggagttgtaaggagcagtggtgatgatgatttgaatggagagtgatggtttgaaggtgagtataagcttccctagctcaaccatggagattaggtgtcctatggctggtgctgggtacaagactattgttgacttcatatttctgatcagttgattgttactcagagtcagattgtaacaaacaatatatgaagagagctcttaataaattttacggttgggatgggtagcatgtgttgctgaattcatggacgaggacaatgacaatgacaatgacaagatattcttatgaaaatatgaaaataacaaaaacttttcttctgttactgtgggggttatttgcacacatcacattcaaacgaaaaataaaagggatagttgctgtgaaagtctccaaaaattttccaaaaatttaggatgggtacatattagtcctcaaccttaaaaattggctgtaatagtcctcaagtgacattttttgtaaatccgttggtctcttttctaacggatccgttaaacccaaataaattaccacgtgtcaaattttttattggtcaaaataataattttaat

SEQ ID NO: 119624 - DNA, 2879 bp, Cannabis sativa
  modified_base (1501)..(1506): a, c, t, g, unknown or other
ctctctctctctcttcttccctttcaaagccctaagaaccagcaagaatcaaagtaaacttcttcacaattaaacctattcttagctgaattaatcaagtctaggagctcttcaagctttgaggtaagtcctctacctattcttcttgatttctagggtttaagttgagtttctttgggattttgcttaaatttggggctgtaggattaattgagtttagagcatgatttttaagtttaattgaaggttgtttaagtatgaatttgatgtttctatggttgttatgttttgatttgattgggtcgagttcaagaattctaatctcactcaactatggtggatttgcatttttagtgtaattttgggttttgaatgcttgattatgttgattttatagtattgcaatgttctagaaagtttcaataggttaggaggtgttttggtttggttttgatgcaaaaccaagggttacccttttctgcagtagaaactggttaaccgattttacagggcacttggaactggtcaatcagttgaccagtggggaaaccctattttctaaaaccggttatctgttaggcgtgtttctctagaacttagttttaggtattttatcgatgtttaagctatttctaagctagtattgattagggtttgttcgattttgagtttagggcctattttaggatttagttaagttatttatcaagctttcgttgtcatgacataggatctgagatcatcgagcattattccagtcaagtcggcccgcacacttgattttggatttgaggtaagaaaagtcaattgcactgcttaccatatcaaataagatacgattattatcgtttgtgtcttgattatgatcgagtaaaaaatacagtaattaccattgttaagaatgagttattactctcttttctgctgatagatttcatacttatcagttgcttaattaagcaacgatagtgacataagaaactcattggtaatgaggggtatggatgctttataaagcatcgaggttagtttgtcttataaggcaaataaattaatcattattatttaactacactttgaataattgcttattctatatattgccttgtaagttgtacattgtttaaatactatgctttatgtaatatttgtgttttacttgcttttcttgctgagttttatgactcacgggtgctctgtggtgcatgtaaagggaaggaaaaactggaccagccatgaatcagagatctcccgacaatgtacatatcaaccgccatgttttgtctttcaatggataggatccttcttttgttatattttgaaaatgtgacaacattttgtaataagctattttgtagcattttgtaaaaaaaaaaaattataattaaggggatcctcgaatccagtggtattttgaattgaaagttaagttatgatttaaataattttactaagagtttttattaaactatacttttcttaaactgttagtttattattnnnnnntaattaataaaagcacacacgtggtgcccttacgattcaggacgttacaatatggtatcagaacaaccaaggtttaaagatcttgaagactggtcagatatgtacattggctgtgaagactcattcgactcatggtatagtaagtgttaattgttagttgattcttagattatttgttaattgcttgaattatctgcttactagaaatgtatgagttattagaacaacatgataggttataggataatagctactatgtatatgtatgtatggaaatgcttattaacattggttttggtttggaagattctaaaatgttggaaagttatggttgcatgtgtattagattatcacccaaggtgatttggtagggttaaccgcgagctttccgggctcggggctggtagtgagggtgtgaatcctccactaccataaaactaggaacaaatgtatgttgcgatgcaagagaccatccaatagcaaagtgatcagatcatagagcagagagtagtagcaagctcggcctgctcccaatcccaatcttaatcctccgacacctttggtagtgccacaggatatggaaaatcatctagagctgttgtatgagcggttcaggaagcgaaatctgctagtgtttgaaggtggtgctaatccagttaaggtggagcaatggatgagcatgataacatccatctttgactttatgcgtgttgaggataacaatcgggttggatgtgatatcttcatgctgtgagaagatgcccgtatttggtgaaaaatcgtgtctcagggtcatgatctaaataacatgacctgggatacctttcggaccttgttttacaaaaattattacaatgaatccatctacactgctaaggcagaagagttcatacgactaacttagggcagtattacggtgattgagtatgccaccaaatttgaccagttggcaaagtttgcctctgatgaagtggccactgaggctgttatgaaggccaagttcattcgggggttggaagagcatatcgctaatgacccactagctacgggtcctaataagaaattccaaggtaattagggtttttgacaaggtggaaacgaaaatgggagaacctatccagaatgcccgaggtgcaagagacgccatcaaggcaaatgtcaatctcgagcctgcttccagtgtggggtagtaggccatctaaaaagatattgtccacaattgcagatatcggaaaaaagaaagatgatactctggttccttctcgggtatttactttaacacaggcaaaggttgatgttggtccttctactgtgataggtcagatttctattgatggtattgttggatatattttaccaagatcggaagagcg

SEQ ID NO: 119625 - DNA, 3624 bp, Cannabis sativa
ataaaataacagaaattagtgttaattgtctttactaatccaaattactaaagcggtcattacaaagtccctataaatagtggcataatctcactatggagggggtcgaaagaattaatccagaaacacactcgagagagaatagtaatctaagagagaaaataactcagagatccattgtaagagctttcgagaggaagaacactttattccttctctcaagtcaatataaatacaaggagagtaggctattaccattcttacggggctgaacctctttaaaatttggtgtttattttactttactgtttttgctttcttttatttatcttatttaatcgctcttaactcactaccgttggctagaagcgaggtcaacaataaaaaaaaattgagtttgacttaagtactttgtatataaatatatatattttttatagagtgtagaaatatatatttttttaattaagtagttaaattaaatataaaaatttaaatttctcttttattattcgtcattggatcaaaatctaatggttttaaaattaatatttatagttaaatttatttagtaattatgaatgagtaatatctattgagaagtattccccatatatatatcaaaagagaaatataaaccttaccgttcgcaagatgagaggagggagggtgtgtaataatttttttaacagcccatatgcatctgtttacaactgatgcaagtatgccttatcaattgcgtcggttataaatagatgcaaaattgacacaaatgagaaaaatgcagcgtcattttgtaattgacgcaattgaccaacgtttctcaattgcattactttttgctaagttgacctaaaaaacgacgcaaaagagtattttcgttgtaatgatactttaagacataatctatgatttttatttcattttaaatttaatccatatgaaagtatgaatgtgatgcgtaaaaattctctgtcttttttttaacagggaaaatgaacaaaccctcaggttagacagaaataaagatgcacaaatttaataaggagaggactaaacaacgacactcacaccaacacaaagaggaaaccctaacaagaatggcacaaagccatcgtcacaaaagacaaggtgataaacactgttattacaacaaaaatgaaaaacttaaaaaataaaacctgatctacacatggaaaaccccacaaatatctagacaaagcacaccatcaagcgagaaccacctcgtataggagacaaatcaaacacgagggttcactgccctcagggataaacgtgcatcccccccttttcgattgtaatctccccgaagtgcccaagattagaaatgccaatatgaaagcctctagcataccactacctataactaagaatggtagaaatccccaaaatgtaaagccataaccacctacatcaagcacccaagaccacccaatcgttatctaacagtagccgccaccaccaccagcattgaggagtaaagatgacgggaacacacaactaccacaacattgttgtcggtaactgctgtagaaggaccacaacccccagaccccaaagactatgcccactagcaaaacccccccaaccaacacaagataacaataatcctagaactcacctcttaaagacccgagtaccacatccatagagcgaattggtgggcgcctgcaccatagctgaactcagaccagacgaagagagtagaacctctaaatgccagaacccacaacccaaatgagtgttggaatcatcgaccattgagacccacaaaacaatagggatccaaaactatcatctcagatagggaacgagatatatagatgaatggcatagccagcgacaccccaacagagagaaagaatccctagatcaagaaggagagaaaaagttgactcttacatcacattgttgtgcaacaaaaaggttcttttcaaaagaaaacccaagtttaaattttctcttttttagcataatgatacatgcacacgtaaattatattgtcaaaaaaattcaactaattgttgttttaaaaaaatcaactaattaaaatttgaaaaatactaaagagcaccaatggtacctagcactcttcaaaatagagcattgctatgggatgcttaacaccactatgaggtggcgtcctataattggtttgtatttctctataatttttattaaaataaaataagtgggatattcaattgcaccaatagcgatattacacatcacaagggtgttaggcaccatgagtgccctttagtatttctcttcaaaatatcgtattgctattagttgaattaaatatcgggttcgtatatttaataattatcataaaatatcgctagccctttgtaaagtgttaccttagagcatctccagtggtagtattttagagaatgcttaatgatgtgaaaagcttaggtaacaaaatataaagatgttataccattagagataaaaaaaaatattattcttgaaatttgtattaaagtcacacaataatattaatgctatgtttttttaaataaaaaattaaatgtgcaatgtatataatagtttaataaagattaagatttatatatatataataatgtgtgagtatttttagatgatatattattaaaagtaagagtgctaaaaataatatagaaaagatatcaaataaaatattatatctttaaatttgaatgattcgaaatatttatggcctttaaaaaatataataaaaagggatctcttacaatatcactagttttttttcttttgaagaaatatataatatcactagttggtgctaagagtgtacgtcagtcggtttagtcgggttatattatatttttaccaatccaacataaatatcgagttgtaaatattcaagtgtaacctgcccaattgaaaattagaaaaagttcaacctgcccaatgattttgtcggtttggttgggttaacccgtccaaaccttcttcactttctttttttatataattattattcttagtttctacttcaaaaaattagatttaaaaaaaataaaaatactttatttatatttcaagttaaaaaattctatagtctaaattaattttaaaatttttaatataagataaatataattgagtaaacatgaaataattaaataaaataataaaaaaaaagtaataatattgtatagattttaaacttcaacttcaatatctaaatacaataaaaattattaattataaagtctaaattttaaggtaaacactaaaatgtccaaactttaaatacaaaatagtttaactaataaatatgatttatgtaatatattatatacactttgattaaaaaaaatatattaatcggtttattcgggttaattggggggtttagaataatttgtaagccactgaatatattcattaggcaatttgaattttcattgtattatttcgggttgtatttttttgtcaatttattcagtttgatttgaacaatttattcggatggggtggtttgtaaattttattcaacacccctaattggtagggctgtacaaaaaaatttgtaaaccgcccaaaccgaaccgaaaaaactgataaaaattacaaaccgaaata

SEQ ID NO: 119626 - DNA, 1274 bp, Cannabis sativa
tgttggtagggtttgattcgtaccctgagtaccactgagtgatataccacagacaccctgtactttcccgtacttgtgctggtatcagtgtaatgtactcttaaacaatatctactataccaatgcactctgtaccataactgtacaattatcggtagtgcaactaacatataagcatgcatatacacttaacatatatatacactcagatattcatatcacacattatatacagttcataccttctttccaaattcaagtgtgctggacgacctgaacggaaagtcttgtgctaaatggatgccctaatcacataatgaaaccgggtaaatcacatgaacaaaaccctaatccggaaaatccgaacccacaactctgcgctatgttatatacactaggggttacactaattcaggaaacaggaaaacacccaattacggcactgaaatggacgagaatcgagaaaatgacttgttcggggatcctgctaaaatcggctaaccgattttacaggcctggcaaaccggttagccggtttgcaccaggtttcccccaaccattcatttcttgctcaaaactcatccaaatgccaccaaaccttccagagtacctaaataatgcatatacaacatattctaaccagtaattcacagaaaaacccaatgaaattcaacatgccattaaagacctaaactttgagttcaaggctcaaacttgagcaaaaccaattccatacaccaaaaccagctgctagaagctgaaaccaaatctaatgaaccctagaattcaaactacacaaaaactaaaccctaacagcccataacttcaaaaatcacatactcaactaaccttaaaattcaagaactaagaaaaagtgttactagggcttaccttggcttgattttttgctgaatttcttgctgaaaacaccaagaattgcaacaatctcccttagttccagctggtttcgagagagagaaggaaaggagagagtgttctttctaattttggctttttcttctaattttcatttaattgaattaaggttaggaaaacaattccttagctgaaattaacttgccaagtgtcatcataaaaggctgctaccaattcactttctttagtatattactaaaatgcccttaatgctaattctagcttattttcaacctaggggtaaaatggtcaaaaaccataaccctgcacagcctcggtatttaattttctccaatatatatcccactaaaaataaggttctagatttacccatgtga

SEQ ID NO: 119627 - DNA, 878 bp, Cannabis sativa
  modified_base (846)..(852): a, c, t, g, unknown or other
tttttttttagggggacagtcgccccacctcgcctctatgtggatccgcccctcacttagataataaaacaaaaacaaaaagataatattttcaaaacaaatttttattttgtttttatatttttaaaataaaacaactaaaacaattatgaaacagatattttaatttatcaactttcgtttttgtaattaaaaaaataaatagaaaaaacaaatatatattacagaatgctcccattatttttatattatttcaaaacaaaaagttaatagattaggtggaaatatatgcatgcaggagaatgaaaataattaatggcattttcatcataaaggattgagcttttgcttttaattttggaaagagaaaaggcaaactcacaattaaacacagaatagagtcagtgctcattattactacactgtgtcaccagagacagaaactttgtcattatcgtttggttatttggaaaaataaaaaacctagaaaaacagccatgttggaccaccccaacaaactccaccactatattacattacttagaggagtacactccatagtttctctatcaccttttaacttttatattacaaccagtttttttttttttttaaaatacattatcaaaattttacttatcttaaatttaatttcaatatattttatttatttttaatatataattttaataaatacaaatgtataaaaaaaatattaaaatgcaaaaaaattaataaaaaatatttaagacaattaatatatagtatccaataaatatataaaatgaatagtaaattatacatatatatatatgggtgactatttaatggttacatttttattgnnnnnnnatggttacatttttttttacctgtaa

SEQ ID NO: 119628 - DNA, 1613 bp, Cannabis sativa
  modified_base (1398)..(1398): a, c, t, g, unknown or other
tctctctctctctctcttcattctctggtttggtgattctgaatctgttcttattattttgtgcatgaatgtttgaatttgttctgaatcattttcatcctcttcgctcattagagattctgaatatgtgcaccttatttttcgatgcataccatgtgtttgtaaaaatacctcattagactcggattgttttataagtcgtgggaagcttgttttagagcttcgaggactttcaagacttacgggggctcttgtttttgtgagtcctccatggatgttaagctcttcttcttcttatacgcaaaattttatcacagatgttttggtcttgactcctctctctccaaaatctttctctctcaacaaccagtcatgtctttatttatttgatttaattttaataatattattttcgtaagtagaactaccaaacacgttttttaataagcttctttttatttatttattcattagtattatttttggctattaataagacaaccacttggattctgctcttttaatattatatataatgatagaattttggtttctcatgtgctttctagtccttcctatctttttctctatcttattttatatatatattaaaacaaacaaaaatgaaacgggtaaatcatgacatgatgatgcttttgaagattttaaaagggttttaaggagaatatggtggaactttcaaacatcaattaaataaataaagtttgtttttgtattagtgactctactagagtaaatttaatatcacatttattcgaatacttcaaaatatatactgcaatgccttatatatatttgtattctatagttatactcttttgtcctggtggctgtagttgctcttgtctttgttttttttactgtgaagaggtttcgagaatattagaatgtcgtggtaactttagagaataggagatcaagtttacatggagattgtagttgtagagctaagaatcattcattaacagaattggaactgtggtattatataatatatcttagttgttataaatattgtaatgattttgaaaataaaaaatctcaaactaaagtgaatagtgaacttaatctaacaaccatattttagtttcactaaattggattaacttgtagtattcttcacaataaagtgaagaaatgggggaggcaggcccatttcttgtatgtgtatatttttgttgtatgtgtgctgaaattatttagagtgctgaaatttgaatttatatagtttgttgtataggtgcatatttttttattttcttttatgtgatatgatgaagaattattcagtggattgtatgaataatggtaagtttcttttgcttaattatcgtcattgtaggataatggctcgcttaactgtaagtgaaagacaanttttgagaaagaagaagatcatgactctttatatgtattgtatgaatgtattgcatgtagtgcaatggttttttaaattatgggaaaaattattgaacatactattgaatcaagctctttgggaagacaattatacatacttgatatttttgtcaataggcaaattgtgcaccaaatagcttatgagagtgatgtcatttgttttgatcaactta

SEQ ID NO: 119629 - DNA, 844 bp, Cannabis sativa
gacaaaggttgaatatgagaaattaaagatattgcatgtatgtatttgatcttttgggtaatgaggttttaattacctcttcatcactaataaattttcgaaaaaaaaaaaaagattaaatatgtaattcattaattgcgctgtattatttttaggttacttggacttccacttagaattgaactttagcaggggtcaaaaagaaaaaaaaaattaaaattaggaggggctaaaatatatattttaaagaaataaggaaaaaatatatatataaaaaaaaaataattttttttttatatttttttagaatttttggggacatggccacccttgtatatatggtggctactccttccttgaaacatcattctcttatttctttagcgtaggttttgaacaaagagttcactctatcaaaatgtaataatatcttttctgatattaaaactctattcttttatgcatgttgtaatatataaatgcttaaattaaaaaaactctattatttaattttttgagggcacatctctctgattatgtgtgttgtatattttttggttagacaataaatttgttagccgatgtatattcttcttcctatatatctatactccagttccatttcactcgtaaaaaaattagattatattcaggggtgttcattggaccacatctaggtttttaggcttatctagatcggatacaattatatatatatatattggaggttagattttaccatccggtccaatctagtcattcgatcgatccaacatccattggatgttagattggatcggttctatccgttggatgtatttcatatatatatatttattggttt

SEQ ID NO: 119630 - DNA, 836 bp, Cannabis sativa
  modified_base (150)..(157): a, c, t, g, unknown or other
gtggttttatttttaaaccaaagccaaaataaggaatttgttttttttttgtttagacaaataaggaaacttttagactttttgttgatgagtaaataagagagagatggattatgtgtaataaaatgagataataataataataataannnnnnnnataataataataataaaagagtaaataaatatgtataaaaaaataaatagtaattgcacaaagccttatgtggatatacatttgagcttaggttaaatacattttacgaagatacgacttaccttgaggaggcacgacaagctacctttatatatacatttacgcaatctactagctagggatgaatagagataaaagaagaggaagaaaagacgtctagtctcatcaaacctgtctcatcaatctccaaagaattatattttttttctcttcccctacacaggctgtctataagcctcaaagcataacaagcttgtatacaagccactaatttcatttgaatccatttaactcaccttcaggtagacaagcttcaaactagtgtgcttacatgcatacttcttgtttgttttgttttgcattttcttttcttttttatcttatttctctctacataagcaaagttacattaatactgtttttatttatcaaaatacctatttatacatcatttcagccaagaccactgttcagaataattcttaaaatctataaatctctatttattaattaaacataatcataacttaaatgttaccataaactcgactacttaaattgccaaactatgaattcactataattactaaacttgataattacacaattacttctaaac

SEQ ID NO: 119631 - DNA, 1187 bp, Cannabis sativa
gatgggatggatattcattatccctcagagcaataaatgcaaggattaatgagagaaaagaaaggaagtagagaaggcttagaagagaagaaatgaattagaggaacacaaccatcacaataccaacttggatggaccaaatccaccatgaacggtggagcaacagagggatgcatgccactagagttctctagaaccaagagagagaaagccatctatcccggaagcatttttttgccttgtttgaaattatttaatattataatgtaataagattaataatacattagtcgattattgtctattgtatatattgaaaaatagaaatctcaagcttaaaaggtcattcatctaagaagcatattacaactttctctatacaattaattattttataagcaatacatttacttatattaaatattaattcagtgccttcctcataaaaattaaatatatattaaatattaattataatatagtgattcaatgtatacaaatatactgaccattgacaatcgtcattttttttttgacattttgtctctattacttatgaagcgaaaaagactaacgatatattatgattatatagtgtaattaattactttaatatcgaactatttgtggtattttattgatctattatctatcttaaaagattttttttttcacaatgcaagtcaactaattatttaaaaatagagaaattagagacaaattgtaaaaagagaatcttttttgctattccacaaaacaatgttcacaaaatacaattttgcataaacaaactagaaataaatagtgtaaaatttaaaaacttgacacaagagatggtacgtggtatcagtattctttcaaaaactactagtctacgggacaacgcccagagaatgaaatcaattagtaaagtatcaaagtttacaaaagcaattcatttaaacaaatttagactccctctagtgatttgtcgcaaccttttgtaattcaccttgctaatctgatctctgaaacacaccaagtagtgaactcccttaagctattgatgtgtgcttacttcctcccgaagtaaggcttaagcaaatcttctcccgaagataaatacttacttcctcttgaaatgagacttggaaaagtcttctcctgaagacccacacttgttcaaaactcactacaagaaatgtcac

SEQ ID NO: 119632 - DNA, 614 bp, Cannabis sativa
aattaataaatttattattgtaggtggtcatcctcaccggaatactgtgtgcctctattcttctttcaatactttcatatgctcgccacaaaggtcttcttggatcttaattaaatattattattatttatattataccccttctcttctctttaactaatttaatgcaaatttaattgttttccttttaccatcataataaatacatttgtatcaatatttttacaaattatattcatatcatcatatttatgtttatatacaagtttgtaaatgattgatttatttatggacgggcaactaagtattttgtattatttatgttgaaattttatatggatgagaattactgaaaatagcaattcaataagtggatcctcttcctttatgatcctttctctaatgtcttattatagtttctccaaaatgatctttgaatattacataatggatttggcatatcacctctttatcgaactctcctgacccattagagtatttgtagcattctttccacattatttttggcattcttacttctaaaaatacttcaatgtataacactctttaaaaatactataataatgatctcactgttataaatattaataatt

SEQ ID NO: 119633 - DNA, 625 bp, Cannabis sativa
attgtaacattaagtatttttgccaccaaaaataaacattaggtatttaagtgtataaaatcgaaaacattaggtatttatgccgcaatttacctttaaaaataaaggtatgagaatgtatactttgccacaaaaaaagaagaataaacatataataagtctttacttcaactttattatcactacatcatctcatcattataatagattatacacataaaatttattgaaatcaactgagaagcctaaaagataaaatcattataaacagaggaagaagaagactttaaatatatacataagaagctttggtaaaattttaaagtgataaatatttttaaaatatctcacaaatttattattatttttaaaaaacattctttttaaatgtaatatatgtagattttttttaaaaaattattattaattaataatattaaaaaattagaaaaattaaacgtaatatatgatgcaagttaggtttagatgggttaaaaattaaataaagatgtaaatttttaaaatatatatatatatatttataggtcaagactatggtaggacctagcaaaagttccctaccggtagggaactttttttgaccattgattttagatcatgtggt

SEQ ID NO: 119634 - DNA, 2970 bp, Cannabis sativa
  modified_base (73)..(75): a, c, t, g, unknown or other
aactccccaaatgttacaaaaagatgacaactaatatattcatatgttacatattattagtttattacacatnnntaatctatatattatattattatgaataatataacaaagagtgaagacaatatagaaggatctgaaaccagtgtgtcaagatgtgaagttaatttgtctgacaaatctattttggcaatggcacgtgttcgagatcgtattgcccaaacaatgtggacgacttataacaatagaaattagtcaattatattttaatattcgatgatacattcaagattaaatttatttttatagagatatattgtagactaatgattattttatatctactttagattaaattttttctttaaaaatttccacattatatttttaagcattataatattatattcacatattattttaatttatttttctaaaaaaataaattaaatattaaataatatgttattgaattacattaaaatttgtaatgtttatttaaaaaaagttaaatttcacagcatttgacataaaaaagaaggccgattatgtagaaccccacttgggatttgaggtttttaacacttcaaaacattatgttctttggatgataaaaagatgtgaatgtttggaatccaacggtgaggaaataagcactatgaagtaagagtaaaaacaaaagaaaattggaaaccgatatgtaagtttgtgccattattaatttttaaaggaaaaaaggtaaagtttttatttttcttcaccctctctcttcgattttcttctatttccttctccctcttcttttttttttctttttcttgagttttatctgcgattttgaatttcgacctctcaatatgactctctcctaagcccgcttcatctctcagttcatcacctaacctaaatcttaccagccactgcttattccatgaatttcatgtaatttaatcttttaaatttgaagcaccaatagaaaatagcacccttgacaatagttaccatatcagattcatcttcaagcatatattaggaaatcatagaattgcaattcaaatacaatttcatatatagaaataattaaataacaaataatatatattatgagagagagggacagcaagtatagtttgcatttttctaatattcattttgtatttcaaccctacaattagaatgaagttttttaattagaatgaagtgaccactctcttcaaaattacaaatcctagaatttaacaatattaagtagtttttcaccttcctccttactaggtagcaacagggtcttttcactaaagaaaacaaacaatgaaagtgccatggcaaagacgagattgaaggtgcaagggagacaaccaacaacaatgaaagcgaggtaagttcgtaagaaaggccccgtttctactggagatgtcaagaaaaccaagtcaatggatgcggtgcttggtatcaaaccgattaatttcacagatgaggagagtgcagacgaaggggatactcgactcaatgaacctgtgctgatctatttcaagctcctttatctccaaaatcctcactccgatcgattcaacgacaagaagaaattagatatgatttcgctactttcatggaggcaaatgctcaatgtaacaataacatctcacaaggtaagacctccattcctccaattctgcgatctggtaatattcaacaaaacttggataattcttttaagaatttggagaaggaaagagtgaagataactgaggatgatatagaagaggaggttaattttttgaactcagcaatcgtttgctatgttcttggagctaaccctcccctgtctgtaatcgatggttttgcaagacgtgtatggaaagataagattgataaggttggaatgatttcatatggagtattcttgatccgtttttataccatagaagacagggataatctgctgaatggagggtatatctttttcaataaacgtcctgttgtaatgaaaccatggaacccaaattgtaactttaaaaaggagaaccttaatgtgattccaatttgggttcaattggaaaatttggagttgaaatactggggagagaagtcattgttcaaaatcatagggcaattgggaaagccaataatggtggactcaattaccaaagagagaggtaagctaatgtatccgagaattcctattaaagtctcgatacatcaggacttaccagatcttattgattttgaagatgaatatggctacaacacatctgttggagtcaactatgagtggaaaccaagggtttgtgagcattgtaaaggaatggggtacaaaacaatcgattgtagggaaaagacaggtggtacacaagaatggattgtgaagaaaaaggttgatgaaccaactgggaaggataaagctcagactaatgaagcagatacagatggttttcaaccagttcaaaagggctggagaccaaaggaaactcgacaaactgagttgactgtaacagacaactcgtatcaaattttagaagaggcagagatggagagtatacatgagggtgatacattaggaaagagaaagaaggataacataggaggagggggagatcctcctctttccaatggataagaattctaagttggaacgtctggggaatcaacaaccaacaaaaacaacacatggttagacaatttatcaataacaataaggctggtttggttggtctcctcgagacgagagtcaaggctcctaaactaggagtcttgtacttaaattttttttcaaggatggtgctttacaacaaatatatagtggcataaagggggtagaattgtggttgcgtggaatccaaacagttataatgtaagtattttaaagtgtacaagtcaactcatacatgtgggggttgaaacaatataatggatgggaagcatcagtttgtactcagttttgtgtatgcttataatgatgaagaggggggg

SEQ ID NO: 119635 - DNA, 602 bp, Cannabis sativa
aaaaaaaaaaaaaaaatcaatggcactgaggagacttgttaatcaagtatgcagttgttgtcagaggttcattttagaattttctttctaatctaacaccagcaagcatgcacttactctttcaagtagagttttgttcattctctctgtaacctcattctgttgggatgtgtctctgactatattgtgtctagctatcccttttttcatgtagtatttattaaaagtcattagagcatgcattgtctgttatgagcttcttgaccttctttctaagctagttctcaactagctttctccatgtgatgaagctttccaaggcttgatcattagattttagcaaaatgatcgagacctttcttgaaaaaccatcaactatactcataaaatagtttgattcacctagagttggtattccagatggcctccacaaatctgaatgtacatatgctattgccatggccggccagagggtggggcagccagagcggaggccctaggccccataattttggaggtcccgaaaaattaaaattaatattatatacagtagaatctctatccaagaatacacttgggaccaagtaaattatattataatt

SEQ ID NO: 119636 - DNA, 956 bp, Cannabis sativa
atatttataattttactatatattagaattatattttaagtaactacttattataatactaaagaattaaattagccgaaaagctgctatattacctagttgattaataaaagaggcatttttcaattcatcccaaaatagatatagaagaggacaactctcaattcttctcccttttatttttaaatatattatcaaaattcactctctattttacattgaatttttaagagagagagagagagttattgagagagtttgtgttttaacaatatagtggtttaagtctaatcaattaaaacaagaaagtagataattttgattttgaactgaccaggaagaaacaagcctgcataaaccatgacagagagaacccaaacaaccgaatgggcctggaggcccaccattgaatcccggaggaggcatctctctaggctctacttccaagttccaccacgaatcacaatcactattcactactctttcttcttctcaaaccaattcaccatcactaatttattttgttcaaacaatagaatatagctaataaaactgcaatttcactatatatacattatacatatatacatataaatattttgtaacgagtcgactaagttacgagcaagaagcttttgttttgtcacctacctttccatttcgataatctaatattcaaaatcctacctaaccttcttaattcaaactatctacacgttagtatacagtgtcaactacccttattcttatgagttttcattaattgtttaaacctcttgctaaacccacaaatttaaaattccgataaagaaaaaattgttaaactaccaagttacactatccaagttcagagacatttatattgctccatctaaatatattttactatttaattgaattttttaaaataaaaataaataattaagtatcttgaataaaattaatttaattattaa

SEQ ID NO: 119637 - DNA, 923 bp, Cannabis sativa
gtattaattttttttttgtttttacgatttcggggccctgagcgttcgggggctcgaggcgcacgcctagcccgcctaccctcagggccggctttgtggacattgtcttacataaaataaatggtagagaattaccaattaattttgagacgaacgcattattctcaacagtatagcgatagcttaataataagtttctatttctcttggttttctatgccatgcaattcttgaattctttttcacctagtttttttttcatgacatacttgaaaattttgatgtagaaatttataatagtttttcagctagtcattaatgtagagttttcaacaatcaatttaactaaaaacagagttcaatacaatacaagaattcattaattgcaagagtcatgaagacaagctaaactccattgactactagtcttccattcaagttctccgtttgcaggtagttgactttgactaatttcacaagtccattcccgcctcaaaagtaaaaaaataaatccaaacaattgggagaatctgcatttcataatctctttcccaaaaattaatcattttagcgcttctcccattcttaattcataaatatatcgtaagacaaaaagaacaaaacagagatcgtgagaaagtgtgagatcattactcaatttacaccaaaagaaaaacaaaaaatgataatttgtatttaaatcaagcatgcattcaaaatatgtagctgctattactctcgtaaaatataatgtataatatatataaagacaaacacgtacctcttctttaggagtttcatgttcatcattttcttggacatgttttgagctgtgaaagtctgcagtgacagttgagaaatttgggcagtttcgcatatgcaggggcatttacaggtttcgggttcaaaaaaataaaaccgaa

SEQ ID NO: 119638 - DNA, 1667 bp, Cannabis sativa
aaggttttcttaaacccttatgtacttaatttcattgttttaaagatattcatatttagaatgttaatcaacatacttgttagtaaatctaaatccttgtaaaatattacaacaatttattgctcacttaataatttattaaaaaatataaaataataatgcaaagttaaacgtaaaatttaataataaaataataataataatgcaagtcatttaatgcaaatgagtacgttagctaaaatttaataataaaatattaaaaatagcataatgataaatataaaaacataacatttattgtgatttaattttgtatcatgctatattgtgatgcaaatttggatcatttttaagtatctgagatttttgtatcataatttagcacaccattagagtagaattttaacaaagtgaattatattttgtatttacatcacttatttatatctgcatttgagaacctcttagtcatatataactacacataatataagtcgaaattcaagtggttctcgtaagtttctatgttagcattaaagtggagccatcaccaaattattcatgactaagtttttgagacggatgacccaattgatactaacattaaccgcttctcaaagattttatcaatgtatatatatatattaatatacaagataaatgatttatatatctatgctcaaaagaaacctaaaagagcaaactaaactcacacccaaagaaaaagaaaaatgaaacttctcaaattagccataacattttttattgtacttgtgcagttaaatccatgggcaaaatcagctacttcaacactagaaaacttcatccaatgtgtcttaattaattcagatttttcagtgttacgactctcaaacatactattctttgctccaaacacttctctctacacttcagtccttcggctttgaaatcaaaacctcagatacttatgacaaggcaactcaactgttaatcaaaaaactttggccctgaggtgggtctagtctctcgtggactctcaggaagtttatttcctgctttctctactgttgtgtgcagctgtgagtggattacaggctttggagaatggtgattgtgaatgaaatggcaagtgaagaggtcactgtggctgtggatgtaagggatgactcgataactaagaccttggaacgggacagtgcaatggagattgagatgatggagttgtttgaagatttgagtcttgaagatattgtggtgaataaggcatgtgtgggcagggttatgggctgtaagaacatggctgcatcggtggtaaggcagatacttctgggtatatggaatttagaagagacttggagaatgaagaagttcgaggacggtgttctggggtttttcttcgaatccgaagcggattgcgcctttgtactgaacaagagaccttggtcggtcaatggagtgttgttaaacttgaagtcgttccctatcgaaggtgaggttcgagtatttgagtttgatttggctcgtttctgggtggagttccacggactccctacccgctgtctttccgagaacaatatcccaactctttctaaaaaggtgggttagctggttaaatcggatgggaaaagtaaagaggaaactgtaaggagaggattcctcaggtgttgggtggacgtgtggttaag

SEQ ID NO: 119639 - DNA, 1709 bp, Cannabis sativa
gaatgtattttctttgtaatatttattctaagaaagttatgagcttctaaacctcttaaggttgttaagatggaagatgaagcaatatgtaactaagtaatacttatggtgtgttgatttttcattatatgttttaaagtttatgaaattttcttgttcaaatatgtctttcatctttaatattatgtagtttggattgttagaacatattttcacttcgttcttcattgtgtaaacactataatttactttgattaagtgtggttcattagattgttcatacttaactcttaaaatataaaaattatacttttacctaaaaataatatctttgatttgttgtagtttcattaacttgtttcacaattaatgcattgaaattatacttttataagtgaagaaaattcctatcatatgaaaatactttgtacttaaatggaaaatatatttttaaaaatgatagttttattgagttcaactatcaaggaaacttgggagtcaatacactattaaatatttttaatatatattgtggattctaaagtcttaataatcttttctctagcatttattcatcaaattccttttaccttgtttattttaaatcttttttattttctttccttttatgaaacaaatctcatcaattatttgaagctaggttagagcttaattaattttgagtttaaaaagtctctcttagatataaatcaactcatttgggttcgatctcgtacttacatgaacactatattccatattcgattcgtgcacttgcgagtataaatatttaaaacatatatcaccattgggtgtacaacaaatttttggcgacgttgtcgggaagttgtaagaagagaaatatatttatctcaaggttagtaaaattcttttactggttattttttttttactttatcatctaaaaacaaggagaaaaaaataataaataattttgggttggtcctaccgcctaatatttatttatatataatatattattaaaaaaataattggatcgttttcctgcctaaagatatatactaatttatatttatatttatatattatattattgtcatttttgtagttgatggcatatagtgcctcctattctcttgattctttttttttctttcttgcttttattattatcgcttatttcatatttttattttccttttgctttgttaaaatatatatatcactctaagtatgctctattgtcgcagttccaatgaacttccacgttagaaattgactcttgtaattttcttttaagtattgtatgaaatttgcatgcatcattggcaacgagattcaaagaatcgtttggttaaaagaagactacattagtttgacattgaaagtgttagtgaaaatttaagcataatggatctccctgtcgttgaaaatgcattgcaagagaaaacccttcttgaacatttctctcctattgtttgtaatgctccttcatgcataattttacctactactgatgctacccattttgagctaaaaccgtcaattattcaattgttgccattatattatggattagatagagaagatccttttttttttgaaagatagagaagatccttagatgcatgtgaaagaatttcatgaaattcgctcaacttttcgatttaatttttttttttttttgatgaatcaattaaacttaggctattttttttttttttttt

SEQ ID NO: 119640 - DNA, 2198 bp, Cannabis sativa
gagtgaggattaaaactggatcccagtctggttttcttctcaaactagtctattagcttatttgggccttgggaatgggccagcaagtaaacttgaaatgttgtgttttacacatgtcatgttctcgaaaacatggataacatttaccctaaagccttcagggctcgagagtcgcgaaggcttgcagccaccatccagatattttgtagtgtgtgggaatgggtagctcaaaccttttgaaattccaaggtggaaggtcatggatgtttgcgaactttacatattacacgagtggaatacatgtgtcattgcctttttggttcgtgtgtaccacgcgacctgagaaagcacgttgttgtgcttatattttgagtagtaaatatggtcatgacacgtgtactagaacccaaagttcagtaggctaaattgcgagaagcatcctaatgatgtatgccaaattatttgtgttattagcgaggaggataaatatcgagtagaaagatggtttgatacataaccgctcaaagatgagatcaaaagtgacgtttatttgagttaatcaaatttagacagttattgttattattcgcacatgttaaaataatataaaatgtgagaaatattcacgttttatgaaccgtcattgagataagatcaaaaagaataatggtcgtagtaagtccctataaatagtgactgaaatcattgtaaaggagatggtcagttctttcttgattgagagtttatgttaagttgtatcttgtaatcagaaaattcagacataagagtgacccgtggactatgtagatttaactacaaaacctcgtaaaaaaaatcctttgtcaatatatatattgttaattctatattttgtttattcattatttgtttaatatacaaaaaaagcttatttattgttaatgaaaattcaagttaatagtttagtgcttttcattaagagtcctttttttgagaattgaactctaaaaaaaaaaaaaaaaaaaaaaaaagcaactgcccacaagaaaaaacttgaatattttcctaacatgaaaataatttgcagaataacaatgttagataggaggaggcggtgcatcgctaagggaaaaaggcactgagaactcaaccccaagaaggccagaaagtaagaagaagtcctactgaatgggatttcgagaggaatgtagacggggaagaaataccagagaaaagaaactctaatgcttatgaccccactatgtacataccaattataaaactgaaaaatcgtcaacttcgccagagacttgcagagtcaaatcaaatgaacgttgaattggaacgtgaggctgctattgcaagagtagtcccaaacaatgctcctcttacacaagatgaatttctgactagacgaccgcaagaaaggcctcgcgggttgcggactaggagagcacaagatccccatattgaagagaacaatccaaataatccttcttgtccacaagaaaaacaaccggggcgaaccatggaagttcatgttgagagggagaatcccctaagcccaggtgctacaacttctagataagggcgaccatatattttgataacttctcataagaatatgggaaacccaaatgaacaaccaactactcgatcggctcgtcctcttcgaccaccacgaggccctcagagaattgaagaaaattacacttatttaagtaaaggtcgcgtggaaaaattatttaaaagacgaaggctaacatgaggtaactcaaaaggactgaatcaaacactacaatgagtgagtacttcaggtcgagaagaacttcagggtgtagtcaatcaaacactgcaaaaatactaattatactatatttatatacacttctcaaattataaacaaacaaagaaaaattatatataatttgtaaaaaaaaaataattattaaagataatatataaatatttaccaaaatatgaatgataaattaacaaaaaaaaataaatatttaaaatttattgtgtaagatcacccttaaaagaaaaatatttcttagataaaagaaagtagcataacaaaaatgttatttataacttacataaataataccttaatgatttctaaatcatgtgagactttaaatttatatgtatagtagtttatttctaaacaaattatgaaaatctcataaaattttaaaaatataatgaaaaaa

SEQ ID NO: 119641 - DNA, 1445 bp, Cannabis sativa
ttgcttgcaaaatgatcaagaaaagattagtaacaagtaataatcaaatatttgtttatcatcaaaataagtgaatgattgacttttggtcaacagaacccctccttagttggtctgagtctgtgccccctagggctcttttccaagtcaacatgttgtctcttcttccacgactgacttgtcatgttgagtatttttcatgatgtaatgaaataaaggggaaatgtgttttgagttttttttttacaaagactctcaatgaaagtaccaaattgttaagtcgaatttttgttaacaataaataaagccttgtaaataaataatcaatacttataattagtaatatatatggaacacttaagagtttttatgtggttttgtagttaaaatctatataatccacgagttagtattattttttagtatttcttgattatatacttagaatacaaaggaataactatgaaactttacttaatctcatagggtctctcttttccaaaatgattgatctctttcccttatgttctatccctatttataggagttctaggaataacaattattcttttttaatcttgtctaagtaaccgttcatgaaacgtggacaattcccacgtttcatatttacaacatgtggataaaatgaagttactattgataactgccttttgttcttattcgaaagcagtttgcctttactgagatgacacactccagctatggctgacattatttgatggtgtattgggatagctgatcgtattctgcgagatgctagttaagatgtttgttcttgctttaacttttcaaggtaactcttggaataattatttgagattttgagattaattacactttgtttatttctcttaacctttcaacatactcacaagtatgtgggttaatgagttgcaatctcttaaaaaaactcattatttatcctttccaatgataaaacgtcagtctgatatacgtgagatgatttctatctttatcatatcgccatatgttgtttatctcgttgtcttattgccaatgtataacgcgaggtagatatgactctcatttactatctccttgaagcaattcatttattaatgattttcctttatttttgtgtccaattattcacgtgttatgtctatatttatggctcgaattatgggcataatagtattgtaccgcgaattgtcagccttatgaaaaaatgaaaaactaaaaatgaaaaaaaaaaattacatttatgacctatatagagaaaataaacaaaaataaaaactaaaagttgttatttacaaaaatacctgccaaaaaaacggaagggatcctctttcttcgtgacccagccgtcgaaccccaactacccattttcaaccattttcattccaaaaccaggaaaatcatatctaaaaaaaatgtagatctcaaagaaaaactactca

SEQ ID NO: 119642 - DNA, 529 bp, Cannabis sativa
  modified_base (485)..(486): a, c, t, g, unknown or other
taaaactttgacctttttgccagtgcaatttgtgaaatgcactggtgaaagttacttttaccagcggagtagcgaattgtgctagtaaaaatgatatttcttgtagtaaaaataagtctcacttgttaaaactgactattaccacataagtgtgtgtggagtttgtgtataatatatatgtgcacatattattgcatacatagaaaatacacacaattttgacacacttggtgactaaatatttttcaatatcttttttaaaatgggtctttcttgttaatagtaacttgccacacatacataagtatgtatggagtttatgtgtaatttatgtgtacatatatgttaagaaatgatcctatttagtattgtttattcaacatttccaagacttatcagcaccctgcatcatactccgcccattgtttctctttgcatcaacttttaggataatgattagagagttgttggaatttattttaccnngatcttagatttactaacaaatatgttgtttaacatcctaaat

SEQ ID NO: 119643 - DNA, 1237 bp, Cannabis sativa
cactttagttagataaatactgatttattgtatacataaatgatttactatccaaaaggtagcacaaatctcatgtattggtgctcgtgccctgctattgttgggacacttgtttcttgtgatcaagtatttcttgatatcaaataactgcaggtactgatgatgatattcctccatctcatcaaaacagagttccaagagggagtagagttgcggggaatgaaaggtctgctgtaggttctatatcgtaccctagaatgtatgctgacatggagacacaaattcataatcttgagcaggaagcctattgtgcagtcctacgtgcttttgtagctcagtctgacgcacttacttgggtattattttgtttttctttcaacattcatgtatattggctatctttgtgccttgttattttctgagtcagctttaaattcttgattgcatgactgttcttcaggagaaagaaggtttgataacagaacttaggaaagagttgagagtatcagatgatgaacacagagaactacttacgagggttaatgcagatgacattgttagtaagataaggtaggtagtgcctctcttgatacgattgcattagtaggaggtgatgtttaatttgcagaatttattgtctatgttgttttatttaccttgtttggtctgtggcattagggaatggagaaaatcaggaggaaatcaatcagtgagactcaaccaatcacagtctgtttatgatgttttacctagccctactgttttgacatctcgcaagaaacagagaatatctcaaacggtaaacatccatagtgaaattcaggagtcacaaaaaaattgaatcagttcatttataaacacaaatgtagtcttaagaaagattgttgactgatattgatgctgtctctttccttgagcagggtcaccaattccctggtctatcctcaatgaaatccatccacaccccttctacgggacttgtttcgaataggtcatttctgagtcgcagttcttctggtgtccgtgccacaaatgagcctgctgaagctgcaaattttgattcattgattgggaggagagtatggactaggtggcctgaagacaatagcttttatgaggctgtcataactgattataatgatgtggaggtttttttatgtgtttctgtttcgatatgttcttttaaaacaccataaattgtaaaacaagcctaacagttgcttaatgtttccttagc

SEQ ID NO: 119644 - DNA, 1935 bp, Cannabis sativa
  modified_base (992)..(1004): a, c, t, g, unknown or other
ggtaaaataaattccaacaaaatactttgatcagaggaataaatagatgttaaggaacaacagttgggcttaaggaactgggaaacgtggagagtatttggtggtagagggtggtggttatcggagatcatggctgaagcaggcgaaggcgacgaagaaacaggggaaaacacggttaaaaaactgctacagagcaaaccccactcgggcacttcctaatattatatatatatatatattaatattaaattttatttagaacataaacaatgtatacatatttttataattagtatataattaattttctatattatcatttaattaattattaaagtatatttaggaatattgattgcaaaattatttgaattttatttttttaatacttaactgcatacaccaaaattttaacgacaaaatctactgaatctccattatattttgttctttacacttccgtcgaaaaacctcaattaaatgccacaataaatatgccacggtgtacctaatgtacacatgacaaatttttagtagtccacgtaatattagtattaaaataatataaaatataatttaaaaattataaaaataaataacttacaaaaaatttttttttcttatttttctttcattctctcgttttttttttctttatttctttctttttaatttcttgactggaaccatcgacaccctcttcttcttcttcctactttaatctaacatctctcacgattctctctcttgctctactgccctctcataaatctgaatatatatatatatgcgagagagagagagagagagagagaaatttgaatatatatatatatacatgggtataggtttagatctgaactcgcgaaggcaaagagcgaggtcgacacagatggtgcttggacggggaaagatgtagatggttcttcgactagggttcgtgttttcacacacacacacacacacacactcactctctctctctctctctnnnnnnnnnnnnntctctctctctctctcttgttgtcaccgcagatggtgcttggatggagtcgtttggactcagatctgttaaaggtgtggtgtgatggtggtggtggtagtgtggtggttatggtttcaagagagaagattatagatctaattgggattttggagttagattttatttagatttgtgatattatttatgatttgtgtttcaatttgttatgttcttaccctaattttttttctttgatttgtgttataaccaacactaagcagtagcatctcataaaaaaaaccactaagaagtagtagtggtagtgatatggtttagggaaaagtaagaagacgaaataataaagaaaaaggaaaaaaaacaaaagcaaaaaaaaaaaaaagaaaataaaatgtatattttttataatttatttatttttataatttttaaattacatttataatattttaatgcttaatattacgtggaccactaaaaatttgccacgtgcacgtcaagtacactatggcatgtccatcatagtacttaactgagatttttggatagaagtgtaaagagaaacggaatggcaattcagtaggtattctagtcaaaattttaatttatgtggttaagtgttaaaaaaaataaagttcaggtagttttaccatttatatcccttatatttatatatatgaaaactacaaatatattttttgaaaaattaaaggtgaggacttaattgatgtcaccgcctttaggtcatcttgggttggtttgcttattattgcattgtacggtgacgacacatctatcactgcaaatagggctaagagcttactgttaggattttatgccctgaataaaacctatttcaatataatcttatttgttatcaatagaagactagaattcatttaagttagcatgtttatagtttaatatacaat

SEQ ID NO: 119645 - DNA, 2106 bp, Cannabis sativa
taagcgggctttacaccattactcctaggaaaatatcccacaaacattgggattgttgttgaagttggttattctccttgctttaaatttgcttgtgtgtcgttgagctttggaaatgcaaacattgagaggagtgataagggatgtcactctcgactagaaatacacaaaattagagaggaatgaaaagggatgtcacctctccgttaggatttcacaaaaattagagagtgttggagaaaagtttttcgggatggcacttctcggtcatgatgccacatgggatgtggcatagctctcccaacattccattgtagctcacacttaataaaaccaatcaattcccgattaaagtgtgtcaacctgtcttgtgagaaaattttgagtcctataactttagaattgagttatgaccgtgagacacactttggtctatcttgaaaagatattcttaatgcaagttgaaccaagttgtttgataaaatttgagagagttatgactattttaccaaagggaattatgtacttttcagctccaaatctgcgcgaccactgccacgtcaaagtggcggttcttggccgtgcatgctcccggacacctcaaggtgtgttttcacttgcttttttgatggagaatcatattttgagggtgtctggacctcaaaacctcaatttgatgtttgaaaccctaacaggagaccactgccattagttggtgccaaaatatggcagtggttgccctaggcttatgggaagcctttgatggtgaatcttgcttatttttcgttatatggatgcaagaaacaacacttcgtccacattggttcttggacaattggtagaaaagagtattgccatcttttgggccacgaagatggtagatgtcacctataagggttatataccttttggtgacttttctcacttgtatttgatacattgatgttggaaatatactttagccaaagaaatttctcaccattttttatggttgaccactgccacttttaacccgaaagctttccctagttatgtggacataaatgtttcacacgtggtacgaaagttgacgtcacgaagttaagtagactcaagtcacaacagtcaacttaggaggggaccctagccctgcgcccagattgactttgatatctcttggatggaaacccactatcttttagtattctgcaccatgaagatatggagcaatctaatccaagtctcgaaagttgaaattacaaaaacctacaactcggaagccaacttaggcacctaggattttacctgatgcccaagttgacatccataactagggttttagcttttagagctgtcttagtgcaaagttgtaaaaacttacattagacattaaatagacataccacagacatatttgaggcattagaattggaatcaaagcaagctgatttttgagcacctgaggccccggggccctaagcaccaagcccccgagttgaaaatctatcaaattgggcaccttccaagtatttgatcagagattcgacattttcatcgtatttttcttcatcaaaaatggggaaagaggtccttccagagggaaagcaacaattcgtgggcataaataatagggcccagcacccaggttgacacttggggctagccctgcacctagattgacattttgtcaacctaggccatttaaaatggattttttaggaattcttttgagcatcttctccatcttcaaaaaatattgatattcaactatttctgtggaccaaacagaatttctaaaaggggcaaaagtgggacccaacacctaggctgacattttgtcaacctaggctgtttccaatcaagttcagcaaaaagtgtttcgagcattttttatcatcataaataacaaagatttaagtaaatttggggagaaaccacaatcccaagtccttcaaaatagggaccagtgccaaggttgacctagggctgggttagcgcttaggttgacaatcaacctggatgctgttgtgataaatccaatacgcaagtatacgtatcgttttaacaagtaatactcaaataagtgagatcgttcccacgaggactgtagctaagtaccaatcaatt

SEQ ID NO: 119646 - DNA, 1187 bp, Cannabis sativa
attcataagatgtagaaatttaataaatagatatcaagttccaaatcaatctaaatcaagtgtaatccaaaaaccatgtatcaatggagtagctaatattctacttgttacattaacgttatttttttagaatttcaataggaatttattcaattccaatcgcgacaaatagactaaattcacattcatctcatgtcatgatctagcaaagttattttgatattttttttttgtttctttgtagttgcattacaattagctgtcgattttattgaagctttgataattgaagtatcgataataacacattgataaggctacaccgattttagtcatatttgtaggtatttcatatagacaatccaacacaatgctctcataaaatataattctaatatggccagtttgttcatattttcacattggttaagttcacattaattgacagtgttcttacaattgtttcttcacaaaatattcttaaaataactcattgttcattagtgcaataatactttgttaaattttttctttatgatgtccaagcacaattttcatatacatagttactcatacattatgagttgcctaatagttgtgttactaaaataatatcatataaaaaatcacgacttaggattgacaatacacgactcatatagagaaaactgtattgtggtaagtttgtttatattaccaagtggatgttattagttactttaaggttgtaaaatatattcctaacaatacttgtattattttcaatgcccttgttgcgttttaatttctttacagttttttcatagttggcttaccataattgaatttttaaaattttaggaaacaaaagcaattctacttctcatacagtttaatgggcagtttaatcaaagaatgaattatctaaattacgaagctaatggaaaattcatctcaagtgattgcaaatatgaaaaacttatacacaagttgaaatgagtgctgataggcaactaagaaaatactcgactgcaactcaataccaagtgaaagaaggttaccaaacgttgaggataaaagacgatccaagcctattcttctgcatacaactaaaatttaaagattttgacttcacaaggtatccattgtgtgtgaacatggtcagcaatacaacaacaataacccctcattctttgcaatgagcaact

SEQ ID NO: 119647 - DNA, 1747 bp, Cannabis sativa
tttttttttttttttaatttcacttttctttttagcttttttatcttttggtgtttaatttttatgttataatattcttgcttttttttttggtgtggaagtgaatgtaggtttggtttgtgtgcttaatcactaagtttgtgtgtgaatgttttaaatgtaaatgaaaatacatttagattcacatttcactttttgactatttagttgtagtgtttattaatggttgttttatagttaccattttgtttatttgggaaatattcattaatttctctaccttagatttgactttggtttatattaatgggattagcattacaattgagcttttttttgtcacaaaaaaaaatatttttagttttaaacatgatgtaatttattctattattcttaagctataaagtttggcaaatatttaaatataagagaaaaataaagtgaaaggaaaaaggggtataatgttgactagattttatttaagacttaagaactatactcaagggaggtatgagtgttatattttagatcacacacaagaaaaataggttaatattatttactaattaatagttgatggttaaagttgacaagtaattaggccccactatagtactataccactatgaattactagagtttatcacaagtaaacattaccaaagaatccaatgccattgattagtagtttaatttggtaccaacaatttcatctcaaaatgtcccataaaacttttttgaactagttctaaataatcaaaccaaccattctcctcaactatattatctagttttagttgtcacatttaaacaaaaaaacactaaactaattggaagtgtaagtaaggaagcatagaccgcgaaatatttgaaaatattatttttcattttagtctattctaaataaaaatttactaatgcctcttcacttaatggaaaaaaatgtaaaattctaagtgtagtattttatagtgtttagattatgattttagatttctgttacatattgctcatgtgtaagtaattagtcggataaaattttagtaattgtataaatagtttatttatattactaaatttatctgaaaaaaaaaaattatgtgtgttctgttttacattgttctgtgtgtgagtgatttagtagtgaacttcttcttcttttgtttaccccacttgaagctttgaaatcataattactattattctagtgacatgtgatagttttggtttattaattaaattaattattcatttttgtgttaattatctctttcttctttctttttgttgtagataacaacaataataataacaatgacgatgagattgagaagacactggcaatattaattggattaatagctggtgttggtctcctaattgtgttcctttctttcttaagaaaactttgtgaaagtgataataaaggtacttctaccttttctctattctctatactttctatcttataaatcccactttttctttatacccttttctcaataagaattttttatgaaaacccttttgatttttgatgataatgtttttttttttttatttatatatattttttttaatgcaggtggtaagtgattatatagggctggctcttattggtggctctgtttcattaattcctctactttttctttttttctcaattactgtaattttcttgatatatagattgttatattatattgttataatataagatagattaaaatattaaaatgagacatat

SEQ ID NO: 119648 - DNA, 787 bp, Cannabis sativa
atatatacatatagatatagttattattataaatagagcaaatatttataaggatatggtgataagagagcacagccctaagaatatgacccattacctaacttatgcatgtacttaataagctatatatatatatatatatgacttcaatttaattaattacaataaaaaaaattaaagtcttggattcacttctttatttattttcttttctttcttttcttctcgttgctaaaaaataataataaaaaaataataataaaagtcttaatcagttaatctatgtcagctgttcatccttaaacagcagcaaaatctgtatcactatataaattatatcatatatgcatatatgttagttttaaaaagtatcatatatatacaatgtaagtccgtgatgatcattataatttatatgatattttttacttctaatcgaagcacttcatgcaaatctatataataagttatttatgaagtaagcatatacatatatatatttatatgaatgtgatacattgatcgatgcatgcatatgtagatatggtaaatctaatttagattgagcaattatatctttagaataaataccattttgactttgtgttttgtaaaatttacgaattggaccttctgttttgttaaatgacaaaatggaccttgtatttcccaaaatagtaataggaccttcaactgatttttatcaaaataaaatttaataataattcgatctaaaggtgttatgacaaaactgtttacattctctgtatctattcgtgttaggaat

SEQ ID NO: 119649 - DNA, 2925 bp, Cannabis sativa
  modified_base (2239)..(2242): a, c, t, g, unknown or other
  modified_base (2611)..(2612): a, c, t, g, unknown or other
  modified_base (2877)..(2899): a, c, t, g, unknown or other
acatttaattataaaaaatttataatgttgtgactaaaaaattatcattaaaagtttttttttttttttttttaagtgagaacaaatacattatcaatatataggaaaataaacaatttcatttttttttaatacctcaaattttgtctcccaaattgcacaattaattaatttcttactattttaattaatgatatcacgaattgataagaatatattttagtatactatatttttttctaaaaaaaataaaaataaattggaatttgaatgttattttgctagaattagattatcattaataatttatattagaaaagaaaaccaaagatgtgacaacataaaagagtacgtacgtacactcttacccaacttacaccttataataataataataattaatcttatatatcctataataatatgagtagaaaggtatggatttattttttatttttctattaaaaaaagaataatatatatttatatgatatattatcatggaagagatgttgagttataaggtttgttaggagacttggatttatatgaaaaagtgggaacaaactatataagtacacacaaaataaaaacaaaggcaaaaagaaagtataagaatcaaaccatgtagtttgcattatatatatattatgagaaaattattttaaataattaatcaatatatatattattttgcttccttttttgtccaaaccattctatctctactctatctatatatatacctatatttttatgtctcttaatttgcacccatattatatgcctcttaatttggaccttaaaattcaatcaataggagaatatgtattctactacaatatttctagttattgcaattttcatgatcaaccaactaaatataggtatatatatatttataaaaattaaaaaatatgtagcatatataatagtactaataacgtgattaattttaaatattttatgtgattatagatataatttaataattttctatttctctttccaagttcgaaatcactcttctaatatataaaaaaaaaatcttataagttttataaacacacaaaatattgttcttaatataccaactactcaacacacaatgagaattagatgatttcaatgtatagtactttactcttctctctctccttctatattattattttgatcacaatgtaatgatttaattatacattatatattgttttgataactacaaagtttaattggcataatttaatcaaaatcactaaagaggtgcaattaaatatatattattattaataataaaaaagaaaaagaaatgtgatttggtacctgaggagttgatcttggataatgaatagaaccagagaaaagaagagtatgttggccattgatgatcaaagatcttccatcataacttacttctttccccatagccatctccactaaccctaaccctaaatataccaacaacaacattatgtaccacaacttcatcttcatcttaattataatttctctctagatatatgtatatatatataatgttagagatactctcaatttatattctcattataagctatatgtataaatatatatatccaactactcattgtgaggaaagagaaaaacaaaaagtgtaaaacaaattgttttaatatcatatcatatatattttcttttattttttatggtaagttaattatattatatatataatatttttatatatataccatattaattctagctaagctattgctacaagaatgaagtggcaatttttgtatgtttctattattattattttttgatttgatttgattttgtttctttagttatggaatttagaaggggctaaatttgtcattttaaagcattgatttttttatttatttatttttttatttatttcttgttttattgtaggtgcatggaatatcaaataatatgggaaataatttgggaggttgcatttggatatttaagctaataaataacttcaaatatatatatgcaaatacatctgtcaccagtttctgtagatttattacatatatatcatatatttatttatatttattgtatttttttttatataaggaagacatattattatttaattatttttatattaaaaaagggtatatttaaaattgggattttatgcccctctctctcaaccaatataaaagaaattcctctttgttaggaagaaagtatattattattattattattnnnnttattattattattattattgtgggaaatttaaaaaaaatatttttttatgttttatttttaattttacggtttaaagtttttatttataaaaatacgtttgtaaaattttaagattataaaaatactttgctcaacaaacaataagaaaacaataaaaaattaatctgatcatgatcacgataactataaaataattaaaaataattaaaattcaaagcaattaaaataacggtttattaattttattgaagagatatttttacaaataaaaaaatttaaaacaatttttttttccgtattgatgtgtgtttataattttttaaattttggactattatgctaatttttctattattattattattannattattattattattatattgaatatagtaattctatcaaaatgtatttggacttgttaaaaaaaagtgtatttgggcaaaataatcaagttattattatcaccttacccactttagttgtcacttaattacttctttctcctgagattttaacaagattattgttattcaataagctttaaacccacaaatttgtcttacaacaaatttcatcaacaatatatcaactcctcgtattacccctttttttttaatatatatatannnnnnnnnnnnnnnnnnnnnnntatctaacggcatttcttggtttaac

SEQ ID NO: 119650 - DNA, 1821 bp, Cannabis sativa
tggaggcttgaagcggggacgttacaagctgagtgtgatgttttagtggagaagatgattcaaaaaataaagatttgggggacaaggaatatttcttttgcaggaaaggcatccttgattaattcagtcttaataacgctgcatacatactgggcacagattatggtacttccgaagatggtgttgaaaaaagttaattcaatttgtcgcacctttatatggaaaggtagtgtagaattgaattgtcctggatatgtagcatgggaccaacttttcaaaaagaagtcggaaggaggacttggctttagaaatacaatcctttggaatatagcagccataggaaagtatgtattgggtatagcttcgaagaaatataatctttgggtacggtggataaatagtgtttacttgaagaacgaaaactagtgggactataacttctcaacgtcaagtagctagtattggaagcagatagtcaagatcaaagaaaaatacaaaaatgtttctgacttccaactgctcatgggtagaaattatagtatccatctatgttacaaaacactatcggaggagccatttaaaatggcttggtgtagagagatttggagcagatacaatattccaaagcatagcttcattgcttggcttgcagtacagaatcgactccaaacgaagaacaggtgaatgaagtttaaaatttgtaatgaggatggctgcttgttatgcaatggtgcgtcggaaacaatggagcacctattctttgtatgtgactttagcaggagatgtcttggtctgattaaaggttggttgcaatggagaacaggtgaacaatccttgttgaagttgctacgttggatctcaagagcaaagatgtcaagctttcagaaaaaaaaaaaaagtatattcaacggctattacaagcctagtccatcaagtgtggatcaatcgaaatgagtgcctatgaaatcaaaaaatacaaactattgatatatgtgtaaaagcaattcaatttagtgttaagaatagaattgtatatattagataatggaagatatcaaaagtggttagagaatggtttgaattgttgtaaagggggttagaaaagagttttacagtctttattgtttggagctgtctaggatgtaattcattgttctgtggaatacaaattatcacctgattcaccaaaaaaaaaataacttaaaatatttttggtagattatttgaatagttagtttgtatattattttttagctaaaacttaattttattttgtaatgcatgggatttaattaatgcttacttaaggttttataattctcattcagtttatttttacaaaatgtgtatatttatttttttattttaaaataaatataatttttgacatgataagagtatacaaggtttttttttcaagaaaaagagtatacgaggtttcattttcatttttttttaaaaaaattcaattttaaattaattaaataaaagaaataaataaattatattaaattatactttttaatttacataattttatattcatattaaaaatcaaaagaatgcatgtgcatgcatcgcacgtgccaaaaactagtatttatatatatatatatattagaaatttttacacccctacacgcttacatcatcatttttaccttttctctttcttttattacaaatatatcacttacacatcaatttcatgcacagacacgtgtggcctccctatcaaccatcaatcaacttccaatcactttcctctcttttttcctttttttttcatttgatttttgatttattttcagtttttttttt

SEQ ID NO: 119651 - DNA, 1093 bp, Cannabis sativa
gcctcaatcatgagtatatatgaaatcctgtttatgttcattgagttctttgattcactcgttaaagtttctcaaagaagatgattcttacaacttctattttgggagcttaataacatgagtgactaagaacattttatataataatagaatccaagctttcccaacggatcgaatattagttctcttatagtgttaactctgagagtgctaatagttggatccaaatctatagtaagttatggattaactgttcacattgaattaattgtacataaggaatcaagagataattagaagggtaaaacaataattttgacctattctaattatgaacctaataattagaggacgaactacttatattgattatatcaatggactactattaagaattctgtacatatcattttaaattgttaaagagtgcaattccatatttataatagagtaataatgaaattaataaactgaattattctattgatgagatcaataataatcaaatgtaatgaaatcgtgagaaaactatacaaaaataaaatcaaaactagaaagtaccattaaagaaaaggattaaaagaaaaacatagacaattctaatcaatgacgctaacattaacaacaagccggccatagtcatttctgtatttgacaagagccactctttcgatctccacatactctcgaacaactacaaaattaaacaaagaaagaaatataccaacatgagtgattataacgatgtaatatgtaatgcgaaataaggttgtacaaaaaatttcgtaaactgctcaaaccgaataacccgtctaaaccaaaccgaaaaagccgataaaaattacaaaccgaaataacccgaaaaaattacaaactgcccaattaagctgaatgacccgaccaactcaattttagattttaatttttttttactttatagtttttattatatattacataaatgattaaatatatactaatataaaattatatactttttttttgaaataaaataaaattaaattatatacttaattgttagttttaaagtcatatatattgtgttgtgctttggtggaatgcgatattttta

SEQ ID NO: 119652 - DNA, 734 bp, Cannabis sativa
tattatggaattgagttcctaaaagtaaatggaataaaagtttctctattgccttatgtttgctaaataatgttaaaatttaaaacgaaaagaacttgattcccactccagctctagcttattaagtagtggaatatagaataaaaaacattacttgttggccttataatatgataatggattcgaggaattaaaaaaaattgacttgcacatctgctggtcttatggtgtggcatgcacaatttatagatttctttagaaagaactgtcttgtcttgtagtgttgccactctaaatttcatgcaaaaccaaaagatttgggaataacgatcttaaaagcagatctaccaaattagaccaaaataaacataacgatcccaaatcagatacatcacactaataaatcagaattaatttacaccaaatcattataatgatctatatttgtaagctaacaatgtcttatgtctgcttctacctatcaatcgattcaatcctaatgaatattacagtattgcacaagcaaatacttactagaatagacatagtttctgctgctttggattttgatgccaagttggtcatcgtggagagtgacttgagggtagtcatcaatgctcttaatgggaacgagtctcattgggttattggaaactaggtctcattttgtaatagtcactcttctttattttcgagttgtattttctctcatattagtaggacttgtaattttg

SEQ ID NO: 119653 - DNA, 1710 bp, Cannabis sativa
  modified_base (27)..(40): a, c, t, g, unknown or other
  modified_base (793)..(793): a, c, t, g, unknown or other
  modified_base (843)..(846): a, c, t, g, unknown or other
tatattatatattatatatattatatnnnnnnnnnnnnnnatatatatattatatatatagatagatagattaattggcggtggttatatatgaggacaattgatcacagataatgatcagaagagtttaggtctaagacaaaaaagggagtaacgaggaggaatttatatctatatagtcaaagactcgatggttgtatagtagacgaaattttaacggtcatggagttgtaaattgtgtcttactggcatttttaatacttattagttcggattcatgcacgcagccaattatatacaacacaccgccccgtttggctaaacttagctcctcatttttatttttttatattgggaaaggaaattttttaacttggaatctcttcttaaacaaaaaaaaactaagtctagaatgaccagactatatttatgaattatgatcactagcttctcaaatttttaatttcttaaaaaataaataataatttttttttaacaatgagcaacttttattaagaaaaaataacattgaacctatcattaagaagatatggaaaaacatccatcaaagctaatttattagagtaatttgtggcataatctcaataagtatttagtatcttacaattaatcttcaattctaaaattttggtggtaaaacctcataaactcgtgttctgttagcaatgtaacatttctatccgtttttagctgttaactgtcatggtggaatgtctacgcgtacacaatgtacacgtggcacaattctattggtccacgtaaataaatattnaaaaaaataaaaaataaataattattttaaaattaaaaaattaaaaaaannnnaaattaaaaaaataatttaaaaaaaaaaatcatgattccctgacgccctcctccttcttcttcttcttcttctatctttttctttgctaagacaatgggtcaacagagttgtccttggacaagctcgaactcgacatgtggaggtttcgattgccagagacgatgaccaaagttcgctggggcgatctttgttgacggcaagctcatagtgacggtaccgaagggggagggcgttgagaactcgaagcacgaaggagacggggtggagaggtttggggcgatggcactggaaatgggaataatttctgaggaggtatgggacctgaccgaaaataatggcaagggtttgctttgcacctaaacaagatgtggggtctcagttcttgccccttcagtgagcaatcttctccactgtcgtacctctctctctttcatttgtttcttttgacagatttaattgttcgatgtaagatttttttttcttatggatttgaatatggagtttgtttgtttatgtgggatttaaaactgagattgtggttggtgtttattttgtttgattgtgtttggatatgagttatggggttgtgtttgaatcaggatggaggtgatgatagtagtggtggtgaacaattgtggtttcaacagtggtgatggtgtgaatttgtttcgacagtggtggtgctattgggcagttgtgagggttgctcgtggtggtagtcacgagttgtgatggatggtgatggtggcttcaacggggatgggggctagggaattagggcaatgagagagagagagagagaatgagaagaagagaaataatttgttagggaattggggttgttttttaatttttattttttt

SEQ ID NO: 119654 - DNA, 1025 bp, Cannabis sativa
  modified_base (62)..(65): a, c, t, g, unknown or other
aaaaatacttctgttactttattaatattgaataatctggattacattgaaatagagttttnnnnagggcataaaacccaacacctatccccaaactctctcaagtgttttccatgatagttcaagaaaagagacaaagaacccttggttcatcagaattgccttccttagcatcctctttcgaccatcctcatccaccaatcctccacgcttaaagaaaccacgaccctcatgcaccaactgtggcaaactaggccattatgttgaaaaatgttactttatccatggtttccctccagcctatagagacaagaaaaaatttgacaaagggaaatctgttgctaataatgctactgctagcaccagctcagacaatgctactaccaactctcatgtagacctttctactcaatgccagcaactcatttcacttctcagccagtagctaagtcaagcacacccttgtgatgatccaaacactgcccctgcatcatccaacatggcaggtaacaaatttgtttccaaactttttcttagatagttaacaatggagccacacagtatatgtgctccaccaaaccttatttttcttgtttttctaatgattcattctcacaatatgtgcttctgcctaatggcactaacattccagttaaatgcattggtactgtcacgataaacaagcacattactctccataatgtgctctttcttcaactttcaacatcaatattttctcaattactgcttttcttgacaacacccctaatatggtttttttaacatgagtcttgtgttatacaggctcattctctgaatggggtgattgagacagctaaaagacttgaaaagctctatgttcttctccaatagtctcttcctttagctagttctagttgccctttgttttctcaaaataatgtagcccaatggcataaatgccttggccatccctctatgtacatttctaatacattcaataaaaatttagtgcatgtttggcatcataactaaaaaactatttt

SEQ ID NO: 119655 - DNA, 1452 bp, Cannabis sativa
atatatggctcaatacttttatatttaatccatgtgggacaatgttctctaatatatactaataagatttgtaaattgatttagtctaaaaaataacactcaattcccattttttttttgtcctcacgaggattaggcaaactatttttctcattatgaaagcaagcatagaaaggtatcatattatttacacatgaaaaaatatgcacaacatgttatttaaataattatttcgaaagttagaaaaagaacaaatctcaatacaagcgaataaagtatgaccttaatgatccaaactaattaagatattaatctaactagtgtgatacatattctataaatctcgttatatataactttatttagctacaattttaatcacaaaaacaatgaaaaggaagtgcctagcttcatttattttcccttcacttgctttttccatcctcataataatctttcatcttcaagttgttatcagatcttcaaaatcatattactcatccaatctcatcactcaaaccaaccaccaatttagcctcttgataggaattttaacccgaccagataattacaatcattgccattttcttcgtctcatttatggtatctaatcttctcaattggctaaaattgacgtgaaattcatcgtttgtaatctcacaacgtcctgaccaatatgtgtttgttgctttagaaattattagatttaatgatatcatcatcttaaattgtaccgaaaatatggattcaggaaaaacatatacttatttttcttctttaccaaatattttgcctacaaaatacgactacgtcatgaaggcagacgatgatgtttacattcggctcaatccacttgccaagtcagtcgagccattgcctagggtggacttgtattatggttttgtaattccatgcaatagccaaaatccttattcggagtacatgtcagggatgggatacttgatttcttgggaccttgtggagtggatttcaacttcaaatatccttaaattggacctgaggataagttggttgggaaatggttgactaaggggaataaggctaagaataggatttccaataaaccaatgtatgactatccaagttctaatgggaaatgctctcatgagcttataccacagactattgaggttcataggcttaagaggttggatcaatgattacatgtgcttcaattttttaatgttaccaaagatctaaagaaatctaatttgtactatttatgattaaaactttttgagaatttaaaattaaatatatatatatatatatgaatattaatgcttatttattaaaaaaaaacaatgtttttattgataaatgttagttcaaataataaattcaaacaaaatattattgcaagaaatgtattttaaaatattgtgactaaaatgctctttgctactcattttatctctctctctctctctc

SEQ ID NO: 119656 - DNA, 1295 bp, Cannabis sativa
tgaagttagttaactaactgggggggggaagtaagttagttacttacaggaatgaatgggccttcctatagcgagataggcacctcgcttattatgtctcgagtccactggactgctatacttagtttgtgcattttacactaagtgtaatcacagttgatatgcgtcgcttctgtcttcccaaatgtaacggagttgatgtcttgctttatacatccaataaggtatggtttctcatttatacactaaacaacagtttgtatatcttttcctcgcataagaccttacagttagcgagttgcaaatacactctgccacttacccaattaatgagttaatccattaaaagtgatttcatcgatccatattccctttaccttgacacgtgtcctccactgaaatggtaaccaaattttgggcatagcaattgccccttgaaaagttcttttttaataaaaagggctttctaataattatagaggtcattttcgtcatattccctttttgaaaaaatgcatcctttgattttgcggttgtatggtttcgatggtcattatgaattgtctttccatcttctgccccactcccaactgttagatttccttacctttggccttcttgtcactgactttgagtataaaatggtgtcttaagctttccatattccacacacttttggttttttgtttagtttcgtcttgagattggattgtcattctctcatcaaggtgccccatctgagttcagaaatttgttcctctaaattcataacaccaaaattcgccaactacctctcttctctatacgttcctaggaacttcaaacctcaacttgaattggaaacaacggattccaaggctgaggagcttctgatcaatccaaactaaggaaacgtcgttgatcgttatgggtgatcctcacaagtgattctcgagggtaagtattatcccttgtgaatggtggtttgaactggattatacatattgttattttttattgctccattgatattttatctctatctccacaggaatggacatagattttacgagcgatcttagaggtcctcctcaggctgacaaggaatcctggaggaaagttagcatggtttcggattctactaaagaacccaaccaacccaagacccaagcttgcacaagaagacctttgtgccaacctctctctggtattgagaaatttcctgaggaaggggatgaggtctcggctacaggaaatgggatctttagatgtggagaatgaggtctatgcagaggtcgagaccttctacgtgtaga

SEQ ID NO: 119657 - DNA, 841 bp, Cannabis sativa
ttaacaaaacagatggtctaattggtaacttttacaaaacacaaagtctaaaatggtatttatccaaatatatttaatatgtataaaataaataaaaaaaaaaaaacaaaacataatataaaaatgtaatcaaatttgattttatttttcttcattttattactccaaccaaacccaccctgagagtaacaataaatttctttttttgttaattagatatataaagttccagctactgatgttgaagctctgaaatctccattgatgggtttattcgagaaacgtcgtgcaagaaagttctttatttatgtccaagactatgaagaaagtgacccaaaatctcatgaaggactagatttgaacaaagttactgctagagagcttattatgtatgtattaacctccactcatgcatgtttaataattagatgtttgaatgatgtaataatttaattttgtgaattcttttcatgtttttgtaggaagtatggattggaagatgatacaatagatttcattggtcatgccttggcacttcatattgatgattcttacttggatgagccagccatggaatttgtacaaaagatgaaggtgtgttttgttttgctccatctttctcttataaccaatctaagaaatttaactttatagataagtgctactatcaacctttttctcaatcttcatgttcaaaaacatatgttagaatattttttttaaaaggttaattaggattcttaccctagaacttttacatgtacaaaattatgcccatgaaatttgaagactgttaaaattttttcatgaactattgagattgatggatttaaggactttt

SEQ ID NO: 119658 - DNA, 989 bp, Cannabis sativa
attgtgattgcatgaagtaaaaactcctataactattgttggaagatcaaaaaaagctaattgtaaatagataaataggagcaagagatagaatatggtgtacgaatctctacagaaatttgaagtatcctacttatgcagttgatgtattgtttctgagattcaattcaatataattacttatttaccaaaaaaaataaataacataacacatttgtttgagttcatatacatataaaaaaattgttccatagtgattttcatccataagtaaaatatatatataagaaaagaattattattttattttttagaaaataaaactaaaaattaagatagcctgtaattataggtaattgttatttttttactaattaataataagaataaaaatcaaaattagtttattaaaataattgtttaaaattttcataatgacttaaattttgtaaaatattactaatatacaatatactatcttataatgtgttagttcacatgtcaaataattttttttaaaaaaaaaatttatgtccttacatatactcactcatagctcactattatccatattaactattaaaaaaatagaaaattaatgtgacaaacttctttgaagagttacaatagtgaatactttaatagatgacacttaaagtctatggaacacagtaatttttctacaattctattttatgaaaaaaaaaaaattacatgattttatgatttttttttattctttctttctttattcactatcttttattattctttatagttatcaccgacttagcaatttactcattctcttatatcaacatcccaattttttttttctattgtttgttttccactgttttaacatttctttcaaatcaagttggttatttttttgtctaacaatcccaattgattatttttcttttctcatatcctccatctttatacgtatatttgttttgtgttcattcttttaaaatattttaagc

SEQ ID NO: 119659 - DNA, 643 bp, Cannabis sativa
ctctttaaattacatatttttcaaatatgtatatcatttataggtacctatatagaaccataaataatgttatttggacatccataaataatgttattttttcctgctccttttctctacagtgtttaatgtagataaaagtatggttggattgaaggatgtaggcaactgaaatgaatgcaatactcaaatggatagagcgttcaaagatcagtcgattcaagaaggggtttttgtatgctgtgatggctgcgcttgtgtaccagatttagaaattgaggaatgggctgttgtggaattcagaggagccgaaagaagcacaagtgatctgtcagactaaagaagaaattaagagaataatcatccatgttcggcctaaaaatgtctctacaagtgataaaaaatgatttttagatattgtaaagttataggagcacataatggaatagagaaagcttatagaaaattattgtatggttgaaaaaatatatataggtcttcaaattgaagatgctattaggatgtaaaagagatatttggagtaataaattacactgatttaccaaaaaaaaacactttgagtaatattaatttgcagttggcatatatcattttgaactatatcgttcttatatactttgtg

SEQ ID NO: 119660 - DNA, 4850 bp, Cannabis sativa
acaagtttgtaaaacgaaaagatcttaccaaaggttactggaaatgtaaccagaacaaggattgagttcgtgattggagaacttgttaatattaaattgtagtaaaatttattgaaaagaaattaaatggcccagtagagtgattccaaattttagaagtacgaagaaaggtttggaacttgagtgatgtaggacttttgattttgtttgaaggaattttatgacaaaaacaagattggtgtatcagtcagataaggatattgaatagaaggttctaaatgagtttcatactacaccatattctttatactcaaaagtaactaagatatataagattagtacaatttatttatcaaaatggaatatgtttgtgacagattaatgtgctaatctatttgtcaagggcatagtttaaccctgtgatgctccgaaggtaattatctcagattgagatttaaagttacatccaaatgctgagtaagcctgtaacaagcacgtgtaatagattttgacagttcttgaaataagcataatctgctgaatgagttttcatataataacagttattagagtattcttaatgtggtactgatgcagcttaaagatacaagtttgtatattttttatatataatggatggaagagttatgttgatccaaagtgtagagatattaaattccaagttgggaattttatctttcttcaggtggttctaatgaaatggaaattcaaaaattggtaagaaagagaagttaagtccctggttaatcagtccgtaggagttcctagtaagggtaggtcgggtagcttattagctatccgtaatccctactttatctagagttccaatatgtactttaaaagcatctgaagtgtgaggtcagagtgatccatatacggagttacgtgaatattgaattttaaacaaacttgttatatgaggaacaatcagtacagatatttgaacaaaaaaaggacagtgttgcggcacaaagactatatcactagttaaagttatgtggaggaacaacgagtttgaaatgcgacttaggagttaaagttgcagttgaggaagttgtatcacgagtcatttagataaattttgaggatgaaatttctataaggaggggatagttgtaatatccaaaaaaatagaatgatattaaattgaatacattttattaaatatgtgattaagtgggtatcacagtaggattttaatcctagttaagctagttatgagtgaactagagaaatatgagtaatgagcaaataaagcgtaatttattaattacagagatttactggattaagtgggtatcgtagtacctacttttaaaataaaattgtttttgggctcggtgattgtgtaaatttggcagtgtggtcggaaatatcacaataataagttatggaacagaatggaaattatatcagacttgtttagaatgttaagttattgatttgagtggattggctaagattaccaaactacccctaggcgtgcttaaggtatatggttatttaagggggtaaaatagtctttttgagggaaatgatttattttgtctttaagttttattggtcggattagtttatttatttacttagttagaataatttatttagggtgttatttaattatgtaaggtaaagtttgattaaataaaagaaaaacaaaggaaactagaaattagaactcaccttttttctctctctttcctctcgctcaaaggaaccaactgaaccctaggaagatttcagctcatttcaagcaaatcttgtaaggatttcatagcactacctactagctagtttgaggtaagttcttcacttatttcctttgatcatagtaagaattaagtttaggttttggttagggtttgtgtgatttcagggctaaagtgtaaattgagtttagaatgtgttatgaggcttgatttaaaaatttgtttaagcatgaattggttagaaatagtggttgtttgatttgaattgatttaagtgaagattattgagtttgatttcatctgagtatacaattttgagtaaatggatgaattattataaattggtgcttgggatacattgtatttatgatttcgaactgttctgggaagtttgaataggtttggaggagatttggtcagtttttggtgtgaaaaaccagagtactcgatttttccagcagagaaaccggacaacctgtttcacaggtgctatgaaaccggtcaaccagttttgacagcagggaaaaaaactctggttttaagcctcaaaactagttttgttcggggtgttttttagagactagatttgggtattttagtgatgtttatcttattttggaccagcgggagtttagagatgtctggttatggaattagggtttattccagagttcgaataagctgttgacatgtttcattatcgtgacataggacccaggattgttgagcatggttccaccctggtcggcccgcacccttgatattgatttaaggtaagaaaattattaagctctgtatatggttaatgttatgattgttatagtctcgattatgacaagatcctagtatgtgtttgttgtgacttaatcttaatcgaggttaacgatatgtatttgttgtaactcgattatgattgagggaaataataggaaacgattatcatcgttatgactcgattatgatcgagggaaatgatataaaatgattatcattgttgtgactcgattatgatcgagggaaatgatatgaaatgattaatattgttgtgactcgattatgaccaagtaaaagaaacggtcattaccgtaatgagtgattactcctaaaactgtagataggttttttacttattctttcgggcaacgatagtgacatatgtcgctcttggttaataagtggtaagggtactttatgaagtactgagattgtgttgttatgatattgtgaaataaatcaagcatgctattatgttatgagttgtaattgaatacgctttgttatagtgtgactgaatgaatattatattgcttatgaaattagtcactttccttacagagcctcattaactcgcgggaagtaagagtaagtgtttataggaacataagattggagtgctttatgaagcactgagaatatatggttatgtgttgattaaatattcatttagtgtaattatgaagatgttgactaagatgctgaggttttcttattgcgtaacatatatataattgtataaattttaaaaccatatagatgtatctgatggacttgcgtgaatcacaaatatgtatgttatattgagatgtgaaaatatcagtgtttacaatgcttttaatttaataacttttcttgctgagtctttgtggctcacgggtgtttcgtggtgcaggtaggaaagttatctatgttcagccatgaatcagaggtctcccgacaatgtacatatcagttgttgtgtcttggaatctaggaagcaggatcgacttcttttctttatgtgtaaaagtctaaatttacttttgtaatatcagtttttaaatttgttataaggaaatttcacaaacagtggatccccatactttagtggtattttaaaaagaaattttatatgtatgttttaaattatcaaattttaattaaactgcactttttctaaactaatatattagtaagaaataagtttgtaagagcccacgcgtgccctaaggctggtttcctttcctcttctattggtgttgtttagtagctttagactttttaggttgttttgcataaggagcctactttagttcttccacaacaattcttttgactttgtctttgtaaatgcctgaagttccagggtccttcaaatcttctttctcaagtgcatctgctattgggggagctagcatgtcaagagagagtttggttagggcgatcttcataggcttcattctagtcatcttaccgagtagcaaatcgttaaattgatcttgctgagtgaacctgctttcggccaattggagttgtctttccatgatgaccatagggtttgactcattaggttggctcttatccctagccttatcattagcgactttgtcctgaggattgtcttcatgcatatcctccggtgtgttgttgctattaacttcaacgtccttagaactactttctctagattttgcatcctcaaagatgggatcgtcttgatcacttttctgatgactaatcacctcttaaggctcactataatctccatctctagcactaggactagtgaaacgaagtacagatttagttcaggtgagggccatgactattcagacataatctgcaagtggtctcactgctttctttagctttcaatgaaagcactaaaatgtttcccgagattttcagaaacggaataaaaataatcagaactgaagaataaataatcaaaaagaaaaagtataaaatgagacaaatagttttgtacgtggtgggggcgttaactagccttagtccaggagacaatatcattccataagtcttttgcttataaatacacagaatgtatgttctcatgtttgcctaagcaaagcttgcaacagagtttcaccactaatccaaagtgttatacctgaagttcggtaagcacatcagaggaggacacgtgtcaagctgggaagaactcaaatacacaaatgactagtacgcttagcatggaaaaacttgttggaaatataattcgcagggtagattcggctggctgaatagctttctgcgagacagaaacatacaaactgctaatttatgtattgacgagaaaccatgtgagtgcatacgagcatgacgaggcctcaacctcgttgc

SEQ ID NO: 119661 - DNA, 695 bp, Cannabis sativa
  modified_base (649)..(661): a, c, t, g, unknown or other
aaaaatgtaaacgaaacagtactttggagggttttcccaccaaaatatgaggttggatggttttttgcaagtaaattgatagttgagggggttttgccgcaaattactcataatttaacaacaactttatttgaaatatgcaaatcaaccagatgtcaacatgttgcgtcaatcgaaaagagatctaacaacaacacgagaataatcttcaataaataaaataaattttaaaataactacaaatcacatgtacatcaactcaaagtattatcaaagtaaaaaataaaattagacatcagcaactgtaaattatatcaatctaaaataaacaataaaataataacacaaaaaataataaaatatcagcccatatacagttaaagaaatatgtataaattatcattaataaactaacacacagtaagaaaataaggaaattatatatgcatatatatacatatttaggggttgatgggaaaatttaattaattatgcttatattagtttaaaaaatttccccaaaacttataatacccaagatgtgtagcatatgccaacattttagttatccccaaaatacgctccctatttaaattgtaaagcccgcttagtttaatttggaaatcagcagttaattatgattaattannnnnnnnnnnnntagctatttaaataatttattatattgttattta

SEQ ID NO: 119662 - DNA, 1106 bp, Cannabis sativa
ttttttttttttaatttgtgttattttttttttttaatcagtgcgggataataatatcctataaatgagtttggtagagtctcattttggaaagtgcaatcggaaaacatgcttttagtgtagcatggttgggcatttcaagaaagattgccacacgcaaagaaagaagagcagaagcaagaggcccgtatctgcttgcggtagccagtccttccttaatgacatgtcagtttcttgtcaacaactcatattttactgtgttatttgactctatggctacacactcatatgtggcaacacaggtaatttatcaattgggtaggccttgtgactttatcgaaagagggtttggaaccctattgcctagcagagaattagttatcttcaaaaggcgaattatgtctattccaattagagtggaaaagaggaagttgagtgctgacttggtagagctagaagtagcggagttcaatatcatacttgggatggattttttatctaagtattcgggcagcattgattacaagcgaaaaatggtaactttttagccggagggcgaagatccatttgtttatgttggatcggttcaggggtctcgaattctagttattttagttttaaaggctagagatttactacacagtggatgtgtaggatttttagcggttgtaattgactccagcagacctgaaacatttgggcctgaagtggtcagagttgtaaaaaaatttctcgatgtttttccagaggagtttttgggattgccgccacaacgaaaaatagattttgtgattgatttggcacctggagccagggttggccctgaaaaaaaatgggcccaagacggttttaacaaaataagaaaaaaatggcccttttgtatatctatttttttatgtatgtaattttaaataaaattaaactaatatttagtaatataaatacattccaaaccattaaatcatcacataaacttataaacttcaaagtattacttaaatattatacgtcttgcatttttagatgcaaaagtattaattaaatttacataatcaagttttgcaactaaatcatgttcaatagataacatagctaaactgcttaat

SEQ ID NO: 119663 - DNA, 990 bp, Cannabis sativa
aaataaaaataaaataatttaattttaattttttttttactttttttttcttctttcttcttcttctgaaaatcctaaatctctctttttttctttccgaataatctctctctttctctctgcttgtgcggcactagcgtcgccaacaaactaggagcaccgtgctccgaccctcccctcgccccttttcttaaagcccacacccccgaacctatgtagaccgaaacacgccaaatgccattgaaccccgatcaagaaaaccctagcccaaaaatcaaagcaccaaccaaagaaaccctaacccaaaaatcaactcccaacccaaaaaaccctaacaaaaaaattgaagccccaacccagaaacaattgcttcaggttctttccacgaccgaggaggagaagaagcacggtgtggggatggatctccacttggcacgatgagggtgagaaggaaagagcacagtgagggcatgttttggggttctggttttggagttcaggaggaagaagaagaagaatgagatgaagaaaggaaagaaggaaggaagaagaagaagttggttctgattttgggttctaggtcgcatgttagagaagaagtgaaatctaattttgtcatggaggggagtatggaggcgagagagtgatattcggagagagcaagaggaacaacgagacggaattagggtagaagaaaagaaaagagaaaaaaataatagaatttttttttttattattgtcttattttttataagttttaaattattattataatattttaataatattatgtaaaccactaaatttttttgacagtttaccgtgtcacttaattaaaatttttagacgaaaatgtaaagagtaaaacgaaataaaaatttattttgtcgtcaaaatttttaatttatatgattgtgttaaaaaaataaaattcaattagatttatcatgcatttccttttattttttttttatctaaaatagtaggttt

SEQ ID NO: 119664 - DNA, 760 bp, Cannabis sativa
  modified_base (717)..(726): a, c, t, g, unknown or other
aaaaaaaaaaactaactatacctgcattgcacgtaacatcaacctagtatttgaatatatgtaggaaaagccccaaaattaattcacttgctatttttactctctctttttttgtttaaaacaaactatatgtattagaataaatttaagtaaacgaagagacaataatacaataaaaataaaaccatagattcggtctagacaagatagaaaaaaacaaagaatgtggaagataaatttgataggaataaatggagagaaaatttattggaagaaatagtcatcacattaggaaaactagaaaaaaaaaaatatgttagtcgaacaagtaattaaacatttctaaacaattaaaattttatttgtcacacttttttatttttatattattaatttagttaatatttcttctatatttattagttataaccatatttatttgagatattttacacttatcatcatttactctattgcatatatggtacttgcaaattatcaaagtgtctaagagttagaggttggttagtgtattagttagtttagttgagtgaactagtttgttagagttggttaattatagttgttacagtttattattattgtaactgatttcagctactatatatagctagctctttacttgtaatcacttaatgacaattcaatgaatgtgttattctaatttttgcactctgacgtggcatcacatgaatnnnnnnnnnnggaatccacttggaacatctgctcgggaagcata

SEQ ID NO: 119665 - DNA, 878 bp, Cannabis sativa
tattgcctacaaggcagctcaaatgaccaaatattgccacgtagatgaagcgtgtcatctacttaaggcgccgaaatttattaaaacgagaaaagacaattgggcccactcgagactcgttaatgggcctgctacactgaagagcgtttccacttttctcttctctttcattaattgtccggccagctcagcaacttatttacgatattgccactagaagtcgttggataaaatggattatgtggcaaatctgaaatttgtgttgtgaattggagggtattatagtaatttcagttaccctccaactgtacaaacctgaaaaggaacggcgctttgggcggtttggctgactgagagtgcaaccaaacagctgcctctgttgcctcctttttatttttaaatatttattaaaaaatataaaaaataggactttttcttttattttcattttttaaagcatttttatttttttataaaaatttacataaaaactcacaatgtaattaataaaacaacttatatcttaatccaaattcaaatagcaaattacataattattactgaattaactactagactaactcaaactgtaaaaataaaaaaattatatataaagtaattccccgcaaaataatataggatttgtctataatacatgtgaaggacatctatactaacgacaattatgtgttagttagtggttgttctgtttgttacagagttgttaaagctatttcttgtagctagttttagttattccttaagggaaatttgattttctatacttattaaatttaaaaatttgttttttaaaccaatacattttacactaaaaaaaatatgccaattttttaaaaacctcaaaaatacccccctca

SEQ ID NO: 119666 - DNA, 1355 bp, Cannabis sativa
  modified_base (1277)..(1281): a, c, t, g, unknown or other
tcttattcaacctcttaaccaaataactgttgtcagcacgatcaatgtctaaagatgatgctgtaggttgagtctcttactcgggaatagcagattccccatgttcttctactcttttaggttgcctctcaaaaaaagtagggtcttgggtgttatcttcaggctacgtctcatcaacacccaactcaacttacacctcagcatcattgtaagtgatggtctttgcatatgcctcttcatctaggcgaggatataatcccttcatgactaccaatttctgtttaagaagcaaatcaaaataagtgttaaaaacaataaaaaaaatattttcatggaacaactatcaataaatagtcaacaaagcatcgataaagtgtcaataaaatattcatatcctatcgacaatacaaaattactaaagaacaagttacaagcatattattgacaaagtgttgatatcctatcaacaaacccaaaatattcctaaagaaagatgttacgagcatattattgacaaaattttgataaaaatgtcaatatcctatcgacaaactcaaaattaatctaaattaaaaaggcatgaaaattatctacaaactgtcaataatatgacaacatcctatcaacaaactcacatttatcctaataaaataagatactagtaaattatcgataaaatattgacaaaatatcgatatacgattgaaaaataaaaacttaatcactaattaaaaatgccaagaaattatctacaaacaatcgataacttgtcgacatcatatcgataaatagtcaataatatatcagtagcatattagtatttcaaaattatcctcataaacaagttacaaccaaatattgacaaaactgttgataaaatgtcgagaaaatattcaaaaattatcgaaaaatatcaataaacattaaattttttaaaaaataaatatccataaacataaacataaaagaaatgctcatacccattttgaaaataatggaccgagatccttcttcccaattttacccttgttggtccagcttagcatcctgggaaaatgaattccctaatttgaacaatacctcttcccaacctctagaatggactcataggcccaatactgtaatgcaggtgcaaagccataggctgtgtacttgcattcgtgctgaacgtccatcttcaacttcttcttaaaatttaccttctatttcgtcatgtatttttgtagaatgtgttgggttttgtgccctaaataaaactctttacaatctgattagtnnnnnatataagaaatttgaagtgatttatgtttgcatgaattttacatgcttgtgatgtgaagacagccttccttaat

SEQ ID NO: 119667 - DNA, 1862 bp, Cannabis sativa
  modified_base (34)..(36): a, c, t, g, unknown or other
ttaatgaaacatacttgttaataaatctagatcnnngtaaaatatttccaacacttaagatcttaaatagtaatgccctaatgttaagtattatctcaatttctgtacagggtgacatggcactcaatagggtgacacgtgaagttcactttaagacctagacgggttatactggcctaaggttccatagaacaatttagggttaaatcaacaaagtctagttcttcagtaggtagtatccaaacaagctatgtacctcgcaatgttccgagcaggatacatgtatctagcaaagcatcactatctgtgctgaaggacgcgacatttagaaatttcttaagatattttctttaagtatcaccataattatagcataattagaatcactatatttgtgggattagttttatatagttgagagattggtaggaatttatatgtagtttctcgattatttttcaattatttttggtaataaactcttgtatcttccttataaagagtgaaactatttcattgtttagggatccaaatttaattttctagagaactattacgttgttaaaataattataaattttctcaagaatattaagaaactcacatggctagatcttgtgatcttgatcattcactaagtaacacaactaaaaagtatcactattattatgggactgaacctctataaattatttttctttttattgctttattatttatatagtaattgatcattcaatttcatcactttaaagactcaatgtttttggctaaaagcgaggtcaacattttagtgcttttattaagagcaaaggaacccagtctcatccttgacaatttttttttttatttttaaatatatatttacgtggatcaatacaattgtgccaagtgtacactgtgtccacgtagacattccaccatggcagttaacagctaaaaatggatagaaatattaaactgctaacagaacacgagttcaggggttttaccaccaaaattttagaattgacagttagttacaaaaatctggtcacttaaggtgtttatgacgcaaattactcataaaagaacatgttatattttctaagtaaagctcatgttcgtaaaattatattttaaataaaatgaaaattgaactaaacaaagtgcttcgtaacaaaagatattatgacaagttgttaatgaaaatatcataagcaacagaacaacctttaacaaatatgaaattgaaaaactgataaataatacctgaaacagcagggggtttgaattattgagtgtacagaggatctttaagcatggttgcaatgtgagaaactagaggacaaacctcaatctccaccatttttgaattggtaaggaggctaagtttgtctcgcagtattgtcatcttagggcatagcttgatcgaaattgtcttaggcaaattagaggcattgatccaactcaagaatttcctctaagttatcataccaccaaatacaaatttattgcaagctcctcacttgtctaagtccttggagctgataatttatgtcaacaatatgatccaacgtcaaaacggaggctgtgaagggactgccacatatttggattaccattggacatgtttctgatatgtagtgtccttaatttgaaaagaggaacaattgtgctagaagttgttgataatggttgttgttcatgtgtttgttgagtatctttcccttttttggatactctagtctgtttgaaactagcgttctctggcaatcgcattccacctgtgaaagaaataataattttatggttcgtttggaacgccgtattaggtcgtatcgtattgtattgtattatattgaattggattatatatcata

SEQ ID NO: 119668 - DNA, 702 bp, Cannabis sativa
gatgtctggcatcctcctcttcaggattggttcaaactgaattgtgatgttaaggtagggttggaaagcatgtgtactgtagtggtagctaagaatcatcttggcatggtggtttggtttcaaacagctcaattggatttttctgatgcgctgtgtggggaaacgacgacctgctgctcagctctgatgactgctaaggaagtcacttccaagtttattgttgtggagagtaactcgaagatagttatcaatgttttcaatgggaaggactctcattgggcacttgagaactatgtctcattttgtaaaagatcttcttctttgtttgttagttgtattttctctactattagtagaacttgtaattttgttgcccataatatgataaagtaggtgtttacccaccagaaatttgattttattctgctatcatccatccctaaaaacttattttgtaatgactgtgaggtctaacttatttctatttatataagaacgattttcttcaaaaaagaatatttaattgaaaaataatcagttaaactactagacaaaaacaaagtaataatatataattattcaaaatcaaaagttaaaactactagttttattcataagttcttaaacaagaacacaattttattgaactcaaaatttttatatgtattatctaagggaaatttcaatttttgaccctaataa

SEQ ID NO: 119669 - DNA, 740 bp, Cannabis sativa
ttttttttttttttgaagttatttcattttttttttaagtaaatgagtgttttattgttgttattatatagttgatatgttttagatgagttggtaaaaagtataaaattattaattaaaatgataatatatatagaatattatcaatataaaaaactatggctattactatagatcttaaaacatcttattaaactaattctaaataaattagtggacaccttattaaactcattttatatatacaaagatatctaatttccaaatacgattacctttgacggtatttttaaaaatagtatttgtagaacatcgcattacatctataattaaaaaaaatgataaatagaaacagtatataaataaaactaatcatccacttatagtttcatcatacgtttctcaaaaaataaaagaatttcagtttccaattagacaagataagtaaaattttaattaccattattatattgataaaagaatgggagtgagcaaatatttttgatgaaataaaataatgctcatgccaacaatacacattagtcaatgttacttattacatcagatagaacttattaaaaaaactcgtgcaatatctaaataaccatagaaatataattcatacctaaaatctattgatgggtttcttcccttgccatcccacttcttttaattgtgcacataaaacaaaaactctaaacaatattttatgtgttataaatattaataattatgtggat

SEQ ID NO: 119670 - DNA, 938 bp, Cannabis sativa
cttaaaaaccgcctctaaaggggatttttgtagtagtgatatgtactacgaccaaatacgtggtggaataggtattgtgactagatgcattgagagtatatactacgaccaaatgcattgggagtatgttctacgaccaaatacattgggagtatgtactacgaccaaatgcattgtgagtaactggatcgaagattttccctttgtgtttactaaatgaagaaatttacatttcaataaatatatatattacaataaataatcataccttgatataatattcattatttttttttctttgttttctacatttaagttttttttaaaggtaaatagaatttctattaataggtaaatcgaacatagtccattacatagaaattttgctcattgaacacaatcaacaaaaataagcgaactaggttgtttacattaaataagacacaaaccctaatagcatcttcaactaaatgactcataaaccgccagctgtgaaacatcaaaacaacgtgaagaaaattagatttctaccctgaatgaacatgtatgtggcagatcacacttattaatgacaaacatccaaagatcttccaataaaaattgggtaaaagtaccccaattattccaactagattaatggagaaaatcatgacataccatgttcagaattctcgacaataaatatcgaagaatcataaaataaagtgtcaaaagacaccggtaaaaatcccaaaataacctgttcaccaaatccataatagtctggagatgaaataggggtgtaaacatactgttatcagaaacaaataaaacaccaagactcttacataaagaaagacaagacacaattgagagcaaaagccaataacattaatcaccaaagggaccacaccaatgatgaaattccgtattttaatattcccagtttgattatttaa

SEQ ID NO: 119671 - DNA, 883 bp, Cannabis sativa
ttcttttaaaacacgagacccttacatagaaattaggttagcaatctctgaatgttgaaatttcaaaactatccaaaattcccgtgttcagcccaaagttgcgactacataaagcctagtcgcgaccataggcaaaacgtaaaaatcgagctttctgcctatgcctcgtagtcgtgaccatagtcgagaccatgaaaaaaggtcgcgaccatggtaaatggtggttgcgactattgaagcacacttgtcagcttcaatagatttttctccagtttgtcccgtcttttcatcaattgatagaatttgaactctaatgcatcaggaatttgaaacaaaggaaatcaagcgtaaaatcattccaaaagataacattaacaaagaaaacaactgtaaaatcgacccgaaactaaggctaaaaatagcctaaaagtaactaacggagcaacttaaatcgcaaccaaaattcgtataacaacccacataaaaactaccgcaacaactcaaaccgttgaaaaataaaagtttaaaattagtatatgaggtaattcaagaaaaaaaaacaaaattttttcccccaaaaaatcttttgtaacggacaactactagcatgaaaatgcaatatgattgtgactttatatatattgtcattgttcacttgtgattaccatagaaattccatatattagtttagtttttttttttttttgagaagaagatcaaagactacaaggaggggctaagatcttcaacgagaggaacttaaaaggttccaagttgactcttcgttcgttccaagagcgttgcgggcgaggtcatgagctgttgtgtttaaagaccggggaatatgatgaaccgcaacacctggaaaagaagacaaagagga

SEQ ID NO: 119672 - DNA, 2534 bp, Cannabis sativa
tctaacatgtaacaaaagcttacatattagtgtccacttttgaaatcacgtagtggctacccctgcatggcttagcaaagtagaggcccctgttgaagagcgatgggagaccacgctaagaaggtcgtgggtactagcgctcttatgggttcctacacgatgaaacgttagaggaacataattgacaagtttcctagttagagtcttactgagatgttccccatttcattgtttgggtaagagttctgactacaagttctggttgtgttcgccaaacttgtattcacgtttactgttatcttgtaacatggtgcggaccttttcagtttggtccgaacctgcttgctgcaagggatttcctgtcaaagaatattctttagggagtaattctcttacaaagactttctttcctcgatctcgttgttgacgggcccggtaactccttgtgcgcagccatgctgttttgagttggcttggtctctttttctttccctttttgtcaagggatcttgcaagcaagatgttgtgtacctcttggtcactatagaccagaactatgatcgcatactactggcagatcaggctggccagggcaacaccatgtagccaaccatattgagggagcattgcttgggcgattagatgaagccataatcagctagcatgtggaggtggtggccagccagaatgtggattctatggccaacaaacttgttaaggacatggtcagccaaccttttaaaggctcggttgatgctgttgttttatcccgtcagcattcgattggctttgccctcgagtgtaattgacgtatagcctttgtgcacttttatcaatagctatatagcttctttctaggagatgctgctttgtggtattgggataccacttctttgtgttatgctttccaggatttgacaccttgtagccgccctcctagtcccttctctctggtaaggtcgttgtttaaaggtatattgttgtatgtgtatccatgttaattgtctagaatgtctattccttttgaaatagaaggacctagttctttgaagaactgagcaggtactaggtttgccttggttgccaaggcccagttggctagttgagcgagtgtgtcggctgttatgccgtctttgggttcttgccttgtagtatagcctttaagctatctttacagctctggtaggccatcatcttgttgtatcaagctatatgttcacctaggtcataacctacaactagctgagagtcatggtgcgtgtttaggtggttagcccgtgctttatgtgctcgtctagggccagcattcaaagcttcacgtttagcctcgttatcagaagctttgtaattaaccttatttcctcatgcctcaatttccccccaagtgccttaggggccatgcttgcatcaggcaggtggtcaatgcacctcttggattcttgttctcacttcttctctggctcctatttttctcccaaactcttagcaattttgggagatatgcttctattattagccatgaagttagtgagagcttggcctttggtggacatgcttggttgggagctgcttttatgttggctgagtcttaatggttcacttgagtagttcgcctgatgctacaggtttctgcagaacctactgcaactgtcgatcggtataaacctttgtggggtgtatctggaagtataaccttagctttctggaagccaagagcaagctgtgggtcatcttctcaatgagtgggaatcgacttctagtattgattagtctcttgcaagtgtagtctatagggtgttgtacaccatcttcttcccctatgagggcaatagtcatagcatgttctgttactgccaggtgcacgcctagctcttcttcagctcctggaatgtagtttcacattctttgtacttccttgattgttgtgggcgacttcatgttcaaaaggggttggatcttatcggggttcgagcttcttcatgatatagctatggaggattttgaaattttttgtctaggtcctccatatgtcccccaaccctttttgacatgacaagtttgtcgtccatgcacacctccatgttacgcccgataggatcattggacattttgttcatgagcttttgatatgttcctgatctatgggtgcattttctatttcttggcttttgacaaggccaagttgtgatgggaaaattgttggtccccttttggcatgtacctcaggccttgttgggagattcaggcaaagacagtagatgggtggtgctgccttcaagttgtatagggctagacagcccatcgtcgtattggaagctgagggaacatcaattacgacgaattgtgccatcagagttcaggttgctggatcttctccaacagagagcggtaatctgatatacccaatgagtgtgatgtctttgcgaaagaggtcgtacaaaacatgaatgtagggtgccaagtcagcatgttagtgttagaaatattttaccaggatccagatttactaccaagtatgtttgattaacatccta

SEQ ID NO: 119673 - DNA, 2098 bp, Cannabis sativa
tcatgaaggaaaaaaataaaaataaaattaaaagattgcctatcagtaaaagtaaaaaatgacataatactcatattactctatggtatattatatgtatgttatattcatattactctaagatatttttataataccttttatataatgaaagatgttttaggtattaaaaagtaaaaaggacatttgttttattatttaaaaaaaaaaaaagacattaactatcactaaagttaaaaatatgactatttacttacatttcccttttcttatatttctattttaagcgcaatgaactcaaaatcatgtaatttttatttttgttatatttaatcattcttttttatatttaaatactagttttaatttaattatcataagtacataattattaaataaaaatataatttaaatattattattaattattacaaaaaatatcttaattaataatccaacttctattctctctttcttctaaatttcgccaacttaatatcttaaaattgataaaatcaataatgtgatttttaattgattaaataaattaattattgtaacctaatattaaacattatcctagatactgtaaggaccatgagcctataaaatcaagctcccaataagtagactcaaaatttgacaaataaagttcctatatacctcatgactccactataaattcaaaattgtactcttaattttatagaatactttatatacataatataaatacactataaattatcaattatttttattatatcaatcaataatcctctatagacactccacaattaaggacaaaaatgactatttgatcatttaatagtattttatctttaaaacacttagttaatataaatgatattttagtaaactaatttaactactgaaatgaatgctctatcatttaatgcttcaaccaagctcaaagaaaactgtcattttacttctaacataatagaatctatagatgttcatatctatgactaacactctcactcaattatgctactgagttcctaagatgtaagtatgggctagtccgtaaggtaagttggtaacgaacaagtcaaaagatctcgaataacaaaattagcttaaagcttaatcatgtcaggattcatgtttaattgatctatgataaactaagtgatatgacttagaatagatataactataagtttataatatatgttctactgtcaatattggtccactttgatataaaattatatattcaatatcaagtctattttaccaatgtcttggaaaagttatagcatttgccttagtataaatagactgcatcaccgattatcacatcagtataaatctagtgcacttataaatctcgagactaaaatatttgaatcatataataataattatttttaactaaactttacttataaactcaaatgcaaagtggtgaagatgaaaagcttaagaggaacttagaacattaatggagaaaaatagttgtgtattgaatctctaaactcttttgcaaatgattattttctaatctcttttttaatgaaagagagaggtatttatagggagttctaatggctctaaaatacaagttgtcccaaaagttaggggacaagattacttttataccatgaagatcagcacgttagacgggtagtggtacgacagttgtcaggtgtcagttagtaatccgaatgagaaaaatagtgtctccattacttgtacttgtcgtacaaccactacttctttagagttatgcgtactttagcgacttcatcctttgttgtacgttcccttggcatccctctctttacgctcatgatgcgagtataacactttagagaaataactaagtgatgagtctatgggaggtgagtcttgtttaatcttggtagcaactccctctcccatctttttggtagtcactccgttgtaacatatatacactaaatgtgattgctcccttgtatagagaatgtggtgttaggtgatgattaagggagtaagggaacaagtgagagtgagtgagggagtggggagagggaatgttgtggggagagaggggagctcctcactcatctcaagagtgttattcgtg

SEQ ID NO: 119674 - DNA, 1818 bp, Cannabis sativa
gagggcagagagagatacaacaagtgctataataaaaacattattgtttttatgcttcttttgtttctggcaagaatttgaggagcagagatctgtgtttccagtaacactgaataaaaaacaaagcacaatgaaaccatatcaaaaatatttaatttaaatcaataggaatcatataatacacatatatatataccaaaaatatataatgtatatgtgttatcctgtaccttagtactagtttgccatttttggatctttcaatgaggttgactggaattgaaccagtgagattatttcctctcaagtctctgaatcacataactataagttgtaatcaaaagaactagcatggtgagtggccactcacaactcattattttatgtaataatgtaaaaccagaaaaacttacaaaaagcttaaggattgtagtttggaaagaaaatcaggtacagtgccagttaaactattgtttgataaatccctgaaatgatcgagcacgtacatttttagtaataaggagtcttaaatttaaaccattattaatattataatgattataaagatagagaaagtcaggcatggacttacaggaattgtatcatagtaagatctgttatataagaaggtatcatcccagtcaatccacttgaagataagtttctaataacatggcacatttttgtaagtagttttgaattaatttgttatttgtaattgattagctgaagactttttaacttacaaggatatgattctaacttgatcttggccaatattgctgcaattaagaccattccatgtgtaaggagcacatggatccccttgccagtctttactaactccatattttgacttgatattcaacatagcaccaactattatgtaatttgtacataaaaagaatcgttacagttggtaaaatcataaaaatgttagaaacaattatgaaaagcatatatacataccatcttgctcatgtgtttgtgattgtgtgaaattcttaacaatataaacctcaagcgcattgagaataggttggtgagtggatgtcttggtttgttggagatcatactcgattttgtcaccactgacaggtgaaagactatatgaagtggtggtatataagtagttaggaatgagaggtgtaacatcaccattaaaatactccccattttgatagatgtagaattctctggactcatttggaaggagcttttgtagatcagcaaagtgcatgtacacatagtattgtgctgtgggattctcaggcttcaagtagaatgaaaaataaggacttgtcacattttctggggacatggcagtggccataacacttgatggtgggttgaaagaggattgaacaatattagagtctattgccaacgatgtacttataactttgcgatctgggaaattaaagggctgccatatacgatcgtacacatcttctttgtatcttgaaaattgaaaatcatcgagaaattaaactaagaaaaatcatataagttaacaaagaattccaactaggttgataaatgacataagagttaggggtgttcattctattcatgtattttatatatatttatgggtttaatttgaatttatccaatattttagacgtttggatcggatcagatccatccaacattttaggcccagtactattagattggactggatccatccaatccaagagaaaaagaataaaattttaatgttaattttcatatatacataatacatatagatttgacgtaaaacaatataaaatctaattactcatccaaactaaataaaaatattaattagtt

SEQ ID NO: 119675 - DNA, 589 bp, Cannabis sativa
agttttgaccaaaatacccataggtgataaggatgccttttggcttaggcaagagcataatggtctttttttgccatttggattaattgtcttactgctttaattatgtttgtattcagaatttaagttagtattattggataagtggatatatctcaaagaaaaaataaaatatttatatcaaagaaacacaaaagcttctctttccaaaccttttttctctttctctcgacctccacaacaatcagctagaagtgtggatatttcatctgctatctaggttttctagttgattttactagggtttcttaagctaattcaaggtaaccaagtttcctccttattctgtttaaaatttcatagttttaagcttgagtttgcatgatacttagggttaaggttctgtatttgttaatggtatttgattttgtgttctattgttatgttgaagttgtttaagctcttttaagttgggtttgctggttgttgtggtgattgagcaaggattgagtttatgaactcaagctttgctttctaatagtgaattttactacaaaggttattggttagttttattgcatgaattctt

SEQ ID NO: 119676 - DNA, 1001 bp, Cannabis sativa
  modified_base (555)..(557): a, c, t, g, unknown or other
ttagtacaacctttgagctgacttaacaagtcttgaaattagctcaaataggccatcatctttttgcattgagctgcgtattcacataagacatgacctacgactagttgagagtcgtagtgtatgtctaggaatccagcccgcgcttcgtgtgctagctcaaggctagcaattggagcttcaccttcagcctcattgttaaaagctttgaaactgacctttatttcctcatgcagccattgcccccaggtgcgctgagggccatgcttgcaccgggcaggtggtcaatgcatcttctaggttgagttgtcttgttcctactctcgctttttctctagctcttattcttctctcgaatcctgagagatttaggaagatttgcttttatatttagccataaagcgggcaggatcttggccttttatggccatgctaggttgataggcggccttatattggtcgagcttaatttcccaggtgctttaagttttggtgacacctgtcgccatggctggttagcatgcattgctttaggagttttggtaggagagtgannncacacttctcctccttctcctttagacttcatgctgtaaggaaatcgttgaatttcccttttttgccattattttggatagagccatcgttgttgcgcttgcctcaaatattctcaatcttggagaattggcaaagatcgtctgcgctggtcagcacgtcagacagcaattggggcaatatgatgccctgtgtctgttcgaaattgaccttccctcttgtgtgggcttattagacaccttcttctaactttatgaagcaatcagcttgctcaaagaacttattcatgtttcttgttgagattcttatgatatctttctagaattcactcaacgacaatatgcctctgagtatggttgtacatcagccttcttctgtcagccctttgaccttggtcgcctcaactatgaacctttgaatgtagtctttcaaaggctcatcttgtc

SEQ ID NO: 119677 - DNA, 1007 bp, Cannabis sativa
cgctcccaatcccataaacgttataaatatacaattttgtaaatgaatcaaatcaagaaataagagatgaaaaaataaatatatcaagaagagttacaaaatgaaaattattgctattgaaaaaagaagtagaagcagttttttttttttttttgttggcacagttccgaaacggtttcaaaggcttaatgatgtcaggaaagagacatacgaaatggcagaaacacagaatcgaatgatcgccgccataacacaaaacttgaaaacagtagagataacgatgacttaatcgaatctcattataaaacgacgacgtctcatctatatgcatacatatatatatatataaatttcatatgtaacatatatatgtacacataaaaatctacaataataacaataattattattatggtattgaattttcaagtgacggtacgcttgccaggacgatcggcgaccttgagagtcttatcgatgagttttctggcttttctgctacggatctcgaccttaacgcttgagctcttgtccatcttgatgtaactcttcttcggcttcttactctttaaagctctcaccttcgatttgatcgattccacaagattctccagctggttcaccattgataattatatctagagatagagatctgaaaaaacaaaagagaaagtaggagtggtgttattgttattgtgatatagtaatttggaacaattaggagaacagtctgttattactccacaatatatatagcattcaattcaattgaattcgttacttactctctctctccttctccttctcactcttacatccacatgatcaaccgtttttattggccttccctttcccattttgccgccttcttcttacaaaactacacttttgccattcgcgcgcgtgcctatttttatttgacttattattattagaataattatcttttttaccccatgtacttatgacactatactattatgccccttaatctattcagcttgtta

SEQ ID NO: 119678 - DNA, 1102 bp, Cannabis sativa
agttcctggtaaaataacttccaacaattatttcttcaactacaatagaatagtcagtcgtagtgggtgtaaataaatgtctaaaatagttaagcacaacattagggagcccatcatcccaagtgacccaagcacccgaatcatccttaagtcgagtgacagtattgtattttttcctagctgtagctttagcgtggaaaaatttactgttattatctccgtcacgaagccacaatttcttagagcgttgatgccaaaagacctctctttggttcaaaatctcattgagcttaagctctacatcacgaaacagctagatagaaccaagatcaccccctttcttccactgcttgatttctttcttacattgggaaattcttactttgaagttactagtgaattcacgaccctagtcagcaagagactccccacaatacttaatcttttccaaaatagacttgcctacacaaactcctagctatacttgaccactaggaaacacaaaggttcacgaagccatgcattttcaaagtgaaattgacgaaactatacataaacattatgaataagaggctccaacaacaaaggacaatgatcagaatctaaaatttcaagaatagtaagttgggttgaatttaacatcgaaaaccaatgagaactaacaagggctcgatcaaggcgaatctcaatccaagagtcattccctctcccactttcccatgtgtaagggtacctaataacctcatgatcgataagatcacaatcaataagcgccttattaaaaccatccaaaaacaattgcggataaagatgaccacctcttttattgacttggctagtcacattgtttaaatcactaataacaattgtttaaatcaagggagagaagattccgacttaagagatctcaatatcaccacaaccttcaactaacaggttagttcatggccctttcacttttggctggcccattatttgatggtccaaagcatgatatccactagaaggtccttccttggtacgatgacgtttggaatccaattgttggaatatattttaccaagatctagaattactaacaagtatgttttcaacatcctaa

SEQ ID NO: 119679 - DNA, 1394 bp, Cannabis sativa
aattcatattaggatgttaaacaagatacatggtagtaaacctagatcctggtaaaataattttaacaggaaaagtagaaggcgacacattatgaatgacttggagactctctttgcgctatgaagtttgggcttgggtgtgaagctattttttttaaaaataaataaatgtggacttgaaatatttttatattttgtatgtttttgcggtgcttgtttttttagtcttctttttatttttaccaattgaactatttttaaataaatgtgggctttttattttatatttcgagacagtgccaatctctcaattgaactaaagttctatttacccatttcatatctcacaatagactcacaattacatatttatagtgattcacactcttggaaaattactaataaatccctacactatttcataatgtaacactttgccaccctcctcaaggtggtaaaattaaaaaaaaactaaaaatatgcacaaacataaaagataaaaaactaattacagcccaattattattatgttggtgtagtagacttttcaacaagcccaagcccaaagtacctagggcaatcaaccttcttcctcttctcaatccaagttgccagcttcatcaattttttttttcaattacccaactatcgtgatctctcacatccttttttactgtttgtggtcatacaatttcgtaacattatatatgtatatatattttttccttgaacacaaatgaagcagtatatatacatatatcttttagcaaaccagtaaggataagacgatggtcgtcgtttctgctccgatgttctgcagtctggcgcgaccaagcttccaatcgtcctccagtgaccacttagtgctgcccctcgctgttaaagatccacagtcaccgccgatcaaatatccaccgtcgtccagatcgaaaatcctcctccgatctatctgtagtgtgtgaattgattcccatagtgagtcaccattaacaacaaaaacagtctctctaacacgctcaaaacattgtgcgtgaagatccaatgccatctttgtcttctccaacgttggagttcttcgagaaccttctccgatggcttcgtgattctcactggttcagtagagtcgtcgacctcctgaaatgtagttgggcctgagatgaggaatccagcactcccgcagtcgacaagccatggcgctcaaacatggcgtcagtacgcaactctacggatctaatcatggatcttacgaactcacgaagctcttcgtcagtcattgtggagctctcaatgaaaataccaattgttagataatagtcctcttcgagacaggacaaatctccgaaatgcactcttcgagacagtgccaatctcctaattgaactaaagttctattt

SEQ ID NO: 119680 - DNA, 1086 bp, Cannabis sativa
ttgtggttggaattgaaaaaaaatatagtgttgaaatattagttttttggtgttgatttaacaccaaatttgagtttctccattggagatgccctaataattaatacttttattcattaaaaaaaaattagcacttttgccttttaaattttttatttacatttttttttctaaaatattcaagttacatatttatgtcccattttttagggtctacttttttaccattaataattagtatatttacctttgaactttgaacgataccaattttttttttattattattattttatgaaaaagaagaagataattttctattacttcttaaaaaattaaaggaaaaaaattaaaaattgataaattcttaaattaataaaaaataaattaagtttacccatacaagcatagattattcttaaatacaaattaaagctttattatattcacaaatacatattttaaaattcaaaaaaaaaattattaaaaatccaataaatattttttaaaaaattaagattttatatataaaaaaaacttatttatattttaaaactcatattttaagaataaaaacaaaattaaaaatcgaataaacatacaaaattatttttataaaaattataaaattaaactaaaataaatattatatttacttaaacaaacctagatttttgagaaactaaattttgaatgcacctttttcatatatcaataatttttaaaatagataataatttatttttaaaccttttaatatttgaattaatatttatgaattatcaaatatgtatagaacacttctcaataaatattactccttgatgattacttaagaaatagctagaaatattaaaccattagatattgatctaatggtcaataataaaaggcgaatttgagtttttatgattaatttagctacttaattaaaaaaaatctcactttctacattatatcaaaattgttttatatggaaaatatggatctctgactcaactttctttacctctctaaattaatggaaaaaccccaactatttaatattttgttgggttttgtgacctaaataaaatccatttcaat

SEQ ID NO: 119681 - DNA, 1694 bp, Cannabis sativa
atatatatacaatttaatttttgtatatggcctcattttacttaagaccttatttgataggtcgttctcactttacaataaggtgtgtttaggtctaataatcttaaaatttagagcaaattagcattagcaagactgacccttaaaacttcttttaaacgagtcacatacatataaatatatgatcaatttgatttttgtgtatggctcttttgcttaaaactttactcgataggccgctctcacttcacttacgataaagtatatttaggtccaacaatttcgagatttagggcaaattagcaaggcttaacactcaaagatttcattagttgtacaatttatacatattgtgttttgtgaaaatgggtcacatatgtatgtgatcatgcattcatagcaatttggtttttgtgtacgactcatttgcctaagaccttactcgataagtcgctcttactttacttacaatagggtgcgtttgggtctaataactctaaaatttaagataaattagcaaaagtaacactcgaaaattcatatttaaaacttcataattggttggtatagtaatttattttgtgtgtgttattttgttgtttttatttttttggccacattaatattaccataaaatcttctccacatgtatatttatatttatattatgatcaaagagagagagagaaagttctatacaaaatacataatcatgcccgacagcaccatatataagcatgaaagcctttttttgatgttgaaagtcaattgcttcacttttttattaaattaaaataaaaaaaaaaatctctgtttttgtattaatatctatattttctacatgttttttatttccaactaaataaataaataatattatatcggcatgctctaaagaaaatagtataatgctgcaaagtcataatatgtggattgtaaaaatctttttactttgaatttttaggatatttatttagccactaattctatttcgtcattatatacaaatcttttttaataggatttagggcaaatttttgaaaataatatttatttgagaaataaaataaaatttaaataattttacaagagataatttcaaaaaatatatatatataaattataaaattacacttatacgaattttcaatatttttacggttttctaattttttttatcaataaaaaaagtattttattaatcaaccaagctaaataatcaacaaagcaaacaaagacagtgccaaattaacacttatttgtgattgtactcaaaattttaaagtcactatgaaataacttcctatgatttacattgtgtaatctatacaaaagaatcagaaaacccagccaactaaaaatatgttgaactatactttttgataaaggacaatcaaagaaaagatgttggtgattttcatcatgcttgccacacaccgtacaaacctcggagtcaaattttaaattgcattttgttgtaaatcaacaacacatcaattcaacatgaacaacacaagttaagatcaacgaacaacattagaacatgaaaatttaatgcagagaattaagagcagatttttattcaggttcggccaaagcaatgcctacttcctgctaccccctttggtattcattccattcatttagcttcaaagttacaatcataacatgtatgttacacagcctcaaagttg

SEQ ID NO: 119682 - DNA, 1058 bp, Cannabis sativa
gtaaaataatttccaacatggtgtagttggtttttctgctatcaaggttcgagatattgttaatcattataggaaaccaatcaaagtttcaagagttggcattagagtggataatttagttgtgctatcaaatgctctcacagattggcatttcagtattattttttttttatttaattttattacagattataaattatattgattaatttgaagttaaaagatgtcgcacataaaaaataattttcctttaatgataaagtttgattattacaaatatttattattgtcaatgtagtttacaaaaggtataaatctctcaatgtttctttcttctaatagagaatttccgtaaatttattttgaaaatttgaattcatgtatggctttttatagttattagattttattcttcctaatttatctcattaataaaaataataatagtaattaattatagtaagttcactcatataaaaaataaataaataatcacgtcgtattttctataatgttttactaataataactgaaaaacaaagataattcattcaacacattaatttatatatttataagtaagtatttattcacgactaattgtatgtagtttgtcttaactcaccataggataaggagttgaaaacaaaataatctaatttttgaagaattattcgtgtgttttatctatgtagttgtctaccacacacacaaaattatattaataatgatagaatcctaagctcgcttggatctattttttttatttttatttactttttaaataaaaattttaaaaagttataagtgtatgtcaaaaattatttaaaataatagttacaaaattttgatccaatgacgaataataaaagagaaattttaatatccactataaaaaaaccacttttagtaacaaccttgtagtgacaacaaaaaaattttgagactaaatgtgatttttaatcacaacaaaaaagttatatagtatttagatacaaattgtcactaatttatttttagttgtgactaaaaatacatttagtcactataaattgtaa

SEQ ID NO: 119683 - DNA, 2674 bp, Cannabis sativa
  modified_base (35)..(37): a, c, t, g, unknown or other
tcaaaattcgatagtttgatatttttaaaattaannnttatagttaaatttgtttagtaaacattcatgggtaatacccattaaaaagtgttatatatatatatatatctttatatttatatgttacttgtattacgtggtctattaatttatttatgtataaaaaataaataatattttagaatagataatttttaccttctactttaatgatattgttatcttaatctttattatcaaaaaaataaatgttaaaatattaaaaaaaaatcataatatgtatattttcttacctttttataattattaagatattgatgataattaatagtgatatatgttatttttaaacatcaaccttaatacctcattaaaaagaccaaagaaaaaacttttacatttcatgcatattataaaagaatgtatacataataataataatagtaatgtatataaattttttaatattttaatagtttattctataatttatttttaatatttcaatatatatatatatatatatcttttttactcttcacaattcataattaagaaaaaataatacaacaataaaaaaatagtatatataataatgtacacattattatttactatagtgctcatgtttatttgatattttatataatataataaaatatgtatttaatatatttaaataataattaattcttaattatatgtgctgaaatttaatttatagttttcgaatatccatcctaattgtttgagcttttgcatattttagagtccaacgattatctaaaacaaattgtatgaacaataaattatcacaagccacatattaatatgacgatgattaacttggcttacatttaaaaaactatcaaagctttcaaccacaaacccaaatataaaataaattacaaatcatacaaacttacaggtgaattgaatagacggaactatatgataaatatacataggtaaaaacatatacttataaattaaatgactaagacaaaacacataatataaattaaatacttaatatatactgtaaatttacatacacacttataatatttctcttatgagaattgtttagatttgttactatagagatacttcttcttcttcccttttttatgtttccttgataagaatagcagccatctccttaatagtccattactttttttgagcattataatttgatctgattgaatcaaattgggaagaaatggtttccatcagaaatcacattatgtaatcctcactaaaatctaatcctatggccttaagcttttggtaacaagccatgagcttgtttatgtgagctctaatatcactcgtattagcatataattagtgtgatggagcaaggttatggcaaaaatgatgaaaatttttgatgatgatgaaaaatctcataaataaatacaaataatagaaatagtttttttaatggtagaatacaaatagttaatacatatgttataatattacaactatcatatgaattgtttttgttttagaatactataagtcattgattattaattttttttaattaattgattttaatttagtattagtataaaaatacttaaaacaatcttaaaccatcacaaaatagaataaagataatactatctttatagaaagccacttcaactctcctaattagcttgatcatcatgaatgtaaaactgtaaaactgtaaaaccatcacaaaatagaataaagataatactatcttcatgttgcgagccaactaacatgcaacttaattgtaactaaaaaatgtaaaactgtgaatgtgtatacgtaagagactatttgtcagtattttttgtcactgatcgataattacttataacttaatagtaatatgtggagaaataactgttagcaaaatatttatgcaacgataatgtaactgttataaaatattaaaaatcagaacaatgttttcatgtaagtaactctatctacatgtctcttcatgatttaatatgaacaaattcactattaaaaatttggaaaacaacgaaaatgcaccaggataaatatcttattataatattgatgcaatttttttttttggattatacttgagttagattgtttgggaactccaattcaactttttgagatctgcatttcatgaatctaaaaattaaagtcaggacattagttttatgcaaattaaactagatttttagttgaattttagtttcgtggtaatttttatacacttttttcatgaatttgaaacaacccatgttttgattgattatggtcgtcttctcaggtgaagtcgccgaaattaatggtgattctctttctagttgaattttcgtttcggttgcgttgggttgctgcgtggttgcccgatggttgtccgagaagcatggatcctgagttgaaggtgtgtgtaagtgatatttgtgtattttttttttttaatttaggttgtatatttacttatttggctagttaaaagtatttttgtaatattgtaaactttttaggttaaaactgaaaaaatctttaaaaaatatacctatcaaacaaaataaattatatttcaaatattataacaaaaatataatataaaaaattatgtgaaattttattagaaaaaaagttttaagtttgtaagtggcataaacccaatgtttatttt

SEQ ID NO: 119684 - DNA, 3789 bp, Cannabis sativa
  modified_base (429)..(433): a, c, t, g, unknown or other
agcgaactgtgctggtaaaagttacatttcttgtagtgttggaaatgattcattatggcttgtataggtgttctggaagtttttgcgcaaattggggtcgaattggtgttggtggtgtttttagtatttcttgcactgaaccggtcgaccatttcaatgggacatgtaggaatcggaatcccggttagtccccaagacaccccatagaatcggtcttccagttggagaacttgtctaccggttgggacattttagggaaccctagttttttccaattttgtgatatttagagtatttccatgttatccatcgatagaaaaacttttagtttcgatttgaagtccctgaaatatgatcttgcgcgtcactcatcagtttacgaatattgtgatttacgggcctataaatcgtcgagcagctgttccactnnnnntgaccggcacacctgaatttggaaacaaggtaagattagtataatgatatgcatatgcgtttacatgtttagcgtacatgtttcttaagcctgttagattacattagaatagcaatatcagtatatatttagaattatattagatatcgatgaatgtatgtttgacttaagtactattagacactatcagatcggtacgactagagtatgactagcatattgagtataggctgatattgtgatcaatagtgttgccatttgaactttcttgacttagtaccgccttgggtgtggggagtactgccgagggtgcggggatttgattacaattgggaatatgagtgcctaattgcaatctggttatatttatggttattattatgcttttcttactgagtctctcgactcacagttattgtttacatgtgtaggtaagggcagagctatggctgagcagccgtgagagcgagtagataaagattgtacatgtcggggcggttaaacatggagcatacgatcattgggagagcaagctatattttaaatggtcgctaggaaatcaaatattttgtattacatttgtaaataatttaaatatgggatctcagtcatgtaaaagatatttattttcatttaaagagtaataaaataaaagttttaataaatcacgattttcaataaaccagctgattagcaacagattgcacagtttatataaaatcacgataacacgcctaagctagtagggtgttacaatttggtatcaaaaccgccaagttgtcttctgaagattgtcacaacatgtacaatcatcattagagataagctcgactcacggttcagtaagcttttattgctttagtagtttattttattagtatgttataagaaaaacttgatgttatacccaaaatttggcttcacttcagaaggtgacatgtgtcataaagtggaatatgaaccacctgatatactgaaattatatcatttaatgcgaagaaaaataataactcgttaaataaaggattaatagaaaatattcataactcgttgactatgcagtcttaagcgagataagatagaggactattaaaacttatactgacgagacacatgcctgtctcagagtacacagactcaagaagataattcatttattcgaaggaatgagtacagttatgcaaagcagactcagattacaaatagtgagacaaccgtctcgctattctaaagaaacttgacaaggtgaatcagctattaacacttagcgttttttccacattatactagacaaggataataactcagggataagcgagatacaattgtctaaatcatcattgaccatctataaggataagaataacaagcagttaagcacttattctatattatcccacatgtgtttaaaatgaaacgtgggaattgtccacatttcatgaacggttacatttcaaatatattcatgtaaataattgtcaacctatatttctataaatagggtcgaattccaaagaaaaagggacagagaattctagagagaaagatatatacaatcatcgtatattgtatctgatactcaaaaactatcttgaataagatagtctcgtggagtatgcagatttaactgtaaaaccacgtaaaaatatctgctgttatttatactttatttgtttcttattatttctgtgttaaatttattacgaaaaggcttattattggttaataaaaatctacgttaacagtttagtgctctcattaagagtctgcgtgataaaactcagaaaaatctctccttacaaataaaaatctatccatggccgatcattatcaaaatgatggaagtcgtcctaaagaaactacacatcgtcctgggaaagaaccaatgggttctcaaagaccccatatttctggaacaacacgtttaaggaatttatagtggtgataatcaaaagccaaaaggaaggaacgaagaaactaatacttttgtagggtatgtgcctaaaagtgaggatgcttataatccaactaggtatgtaccatattctctacactacaagaaatgtcacttttgccagcacaaaaagtttggtattgcgctggtaaaatggaatttacttctgatgtgttggcaaaagaagttagaaaatcaacgttggtattagaacttttgtcagcacaaaatgaaaagtgctggcaaaaatgacttttcccagcgcgtaaatgcgctggtaaaagtcactgcgaatgtgcgctggtaaaactttgacctttttgccagcgcagtttgtgaaatgcgctggtaaaggtagtagcgaactgtgttggtaaaagtgacatttcttgtagtgctaatatttctcggcataaacaaagcagctcgcgacacatggcatcataattggtccccactcatacaaacaaccgttatctcatgaattaggcctcacccagttggcacaaagtcaatatatattatattttaccccatcagtgggcctagttgacacctctaaaccttactgggtttgacttcatccatacttagctctaccctataaataggacatggtcccttcgtgcaaagggatcggttaagaaatgacttttctgctactaagagctcaaaattaagattcttcaactacggaaaaaatatttgtgtaacgataatttgaagcttttctagctcaataatgtaaacttgtggactaagactcattaacacctgaaccacgtaaaatcttagttttcttagttattactttcttaagattaattattttataaccaattttcaaaaatcctggcaaataacaactaattcatccaaatacaaactcataacacaactctgttactcacataaacaactaaaactaatttttataaattgtgattttaactattacaaactcaaaaaggaaaaagagaaaaaaaaaattaaaagtatgaagtaacaacaaatttcatgaaaaagataatatagtagtacgaaaagataaataaagttgtcaaaagtaagttataaaaagtcgttatacaaaaatatattgatgagttaatattattttccatgttgcaattagatcaatgttttgttatttttatataattttgtagttatctttttaattatttttatattatgtgatacgttgttttagagttactttttagttttcttagttgtttttaagttttttttttttttactaaaacacaatattaagtacctatttttgagaagtttctttaccgaattcttcgaataatagtagggaaatttacatggtatactaacttttgccaattttttacaaaaatactgcctgacggtattttttactttttta

SEQ ID NO: 119685 - DNA, 1173 bp, Cannabis sativa
acttaataagtgcatgaaattcaaaattttcccacacccacatcaacaatttacctctctaccaaaaatcaatacatccttaaaattaaaccacaaaaagtcagaatcacgaccacaccagaagaagaaacgagaaaagaaaaagaaagaaaataatcaattccatttcacaatactgggaaaataacacacatattcaacatccctcacatcgtaaaacattatcaatccaaaacccaaatcgataatctgagcccatcaaccccacaaagcaaggaaaattacagagacccacttaccaaccgacactttacgagcattggagttggagactgtatcaaatccataacttagcaagcaagaaaaaacaaaaaataaagataaacacaagatcaggttggattggattttattcttgatttgctttaggtaagtagtcttactgtcgttttgttttggtttttgtcttgtgttgtggtctgagaaacgaattagaagcaactttaatttggttgatcaacaacaacaaaacaaacagtaaagtactgttctttatctactagtattatttatctactgttcaggtattggtacagtgaattgagctcaaacccatatggatatatatgtatatattatgtcatatagtctcaattgtaatagaattttcctgttttcattgcagagaaagtggggttatgttacaatgccttgttgtaagtaatgcaacataaaaagataagctttccttttcaggtttcaactgctaacattgacctttgttcttgttcagttgttcttatgttatgttggtgttcggtttactcttcatactcatgtttttcaaaatgagatttttcattaaatttattatttgcttttaagaaaagggtaaaattgtaaatttatcatcgttttcatttcatatatcataacttgaattgaaatagcagtcacatgagaaaagtacctaacacaagatttgcattttttatttgaacaaataggatgatcacattggtaattactaattagcaatcaactctctactttgaatatttttgttggatagacaaatatctttttgatacatggatagacacatatttgaatataactttttgacagaaaatttaaatctatttttttaaaaacaaaaaatgaataatgtac

SEQ ID NO: 119686 - DNA, 730 bp, Cannabis sativa
ctttttttctgggaatatgctcccaataaacagttatattacaattcaatttctaaagtcatattagatgtcgtgatggcatctgatctttgactctggtaggaagtaaaggagatatacgttgatacattttctgctgttaatagtcaatatgacttttcttcaattttctttatttgtttcaattgctttttccttactgtacataattttttacctgtataacctttgatagagcattggcttctttttctatttgggaatccaaagcttatttgtacaataatcatggatttgggttttctttaataatctctatttatataataccaattcgaaactcttaatggggttatagtgattcaaatctcatcttctcaaaattagttctcttacaaaaagttagatttgcacgggaattaggtagaaacataaggttttgtttacttgtgaattgtttatgttttctaggtacaatggaaagtaatgggtcgaaattccaaaaggcaaagatcccttgatctgttcgtcgattggttgtagtttgccagaacccagaatattgataattgaataatttgaattacttgggcatttataaccgtgattaagagctgtgctcaaaattatacataaattcatcacagaactgtgctatgaattgtgtagggagatgtattggccacttatttattacagaataattgatttgcttgattgtgatatcata

SEQ ID NO: 119687 - DNA, 1352 bp, Cannabis sativa
  modified_base (713)..(720): a, c, t, g, unknown or other
  modified_base (806)..(810): a, c, t, g, unknown or other
  modified_base (1310)..(1321): a, c, t, g, unknown or other
acttttgaatattattttaaatctggtattttatactataccatttgaatcatctatttgattgaaataaagcataataacactttcagtgtcctattttatctaaagatcatatatatttttatgtatttattctcattagtagctatatatttgttgaaataaatgtgtatatatataaaaattagacataaattggttttaaaatagagacttaaaaaaaatggatcaaaaacattccaatctgtataaggatattacaaattcaaatcagataggattataatcggattattagattcggcccaaactatttacacttctattattgtacggaattttaagttttttacgatttttatgattttatttacagaaaatacaatatcttaatatatttttatgttgtatttttgataatttattgttaatttttcattatttgtatttttttatgttatttgaattttattttcgaattacttttacatagtttttttttttttattatttccctattctttttataagattaattaaattttagtcatatttcaataaattgactactctacaaaagaaatcaacaaaaactaagataagaatatgggtaattctacaatacaccttcttaaaagcgatgtacagatgcaccctctacttatttcgacattcaaaaaaaaaatttagtttaattttttttcatattcatnnnnnnnntagctatttaagatatcctacaaatttttaatgaatttggaataatttacaatatagaaaataatgttcaaatagtctattttacnnnnntataaaataaaatagtcacgagtgcaacacactgttcgaatgcaattttcagcgtgttaaacttttccgaatttcttaaaattttgcaagatgtcttaaataagtataatttacatgactatgagaaaaaaattgactaaaaatttattttgaatactaaaatagataaaaatgtatcagtgtatcccttttaaaggggtgtattatagaatttccctttaagaatattattgcgaatagtcatttaacaaaataagaagtcggataaacttttacaaaaaaaacatctaaaacggtaccattgtctattgagtactcttcaaaaatccatattgatcgtcgtttaatttctatcataatggaaaaacgacacgtcgtacatagaataatatggcgccaaaaggaaaaaagcagttatatataataaagatttagataaaagaagagattcttatgttaaataaaacccacacaaacaaacccatctctctctctctctnnnnnnnnnnnnctctctcttctttctctctcctcaactcagc

SEQ ID NO: 119688 - DNA, 1134 bp, Cannabis sativa
tatatataggaaagaatagtgaaaaaaagggtgtgaagaatttagtttagtttgtaactttgggagagaatcaggctctcgaaatcctgggtatttatgaaaggcattccaccatttttatccaaaaaactattgttcttcctctattttctacaattgattaattttgataggaaaattcctatcagatacattgctaaaagaatgagatgaaaaatctaatatattccatgtgtgtacctgaagtaggagagtgcaaaattggatatattccataaaagacatgaatggcaaatagacggataatgcaggagaggtcactgcggcttttttgcaattttacaagagcctttttagatcaaaattggagaataggaagaaggtagttctcactagaatagtagcgtaagggccaatactctcaacggttaggcttttttgctactaaaagaatacagtaaagaagatgttaaggtagaagtgtttgaaattccaagtaacaaagctctagaaccgaatggatatgagagctatttctttcaagataatcgggatattattggtgaggaagttaataaggccatcctagacattctacactagggaaagttgttaaggaaagtaaactccacaatcttaactcttattcctaagattaaatgttcagacatgggccacaatcacatattatcacgtattgtaatgttctagcaaagtggccacaaaaatgaatatgttctcaactgagactaattcttgtagagttgatagcacaaaaccaaggaaggctagctaaaggcagatatattgcacatattatcatggttggccaagaaggcaacatccttgaaatctagcaagaaagacatatatccattggagtcgttggccaaagtctatcgttgccccaagtggtccttcgatggtcagaatttttacacatctgacaagaaaattccatgaggcaatggtgtgacaatgaatggatatattttctttttctttttattttctatgtttcactaatcttttttgggtactcaaagtcactatctttttctcttagagaatttactaagtctataatattttagcttcctatacctataaataaaaaagggaaacttacaaaaa

SEQ ID NO: 119689 - DNA, 2007 bp, Cannabis sativa
  modified_base (163)..(163): a, c, t, g, unknown or other
tgtcctacatagctcttcttactgggtgttagctcacgggtactctgtgtgcaggtaaagacagtaactaaacagtggggatggcgagctcgaggcgtggattacatgttaggggattgtcagatgttttggtttaaaaatatttctttaaagattatggctngattacttttgtaaaaattaatgtttaataatttataaatgaatcaagtgtttttgttttaaaataatgagatctcatgctttggttatttttaataaattagtttattgtctttattataaatgattttaaacggactagcgagtgtgacgtctcgagaaatcagggcgttacagaggcagagtacagagcaatgtcaaacactacatgtgaagtaatttggtaactgtcattactgaaagaattgaacatcgagcaccatggaccagctatacttcattgtgacaacaaggttgcacaacaaattgcagccaatccagtatatcacgagagaactaaaaatattaaagtagactgttatcttgttacacagaaagttcaagaaggaatcatcaaaacaaagctcacaaatcaagcgaagatcaaattgtagacatctgcactaaagccctacttccagctcagttcaatgtcttaatttttttttttttttgtaacatatacactccaccttataaagggagagtattaagattgttaaggtatagtgttttgttagttagagttagtgagcgtcactttcagttacaaaagtcgttattcaacaaccttttttttaggttttcccatgtatataaacattcctttattcttcaatgaaggttactgaaatttcattcactttatgtctaaactattccatttctgttatatatatataacaaatatattatatgtattaatttagttaactaacgggtaaattaagatagttgcgcatgcaaattattatactgatctaataattgaataaatatatgtaatctatttaagataccattaattgtaagaagaccattgttacgacacacaaaatagctagggaaattatagcacaattatatatataaatatatattacaacttacatggtacaagagcatgcatgtatatactcatgcattattctttgttataatttaaaatttacttccaaacacatgatataaaatcaccagcgatcttaataaattcttaccaaataattattatattttgtaataattattcaaatgtaagagtgatcctggtggtcactggttaaactacaagtttgatcttcatgaacacaatgcccttatattattcaaggggcatatccaccaccatggccagcaccttctccatagccactcccttgtccaccaccaccaccagcagcaccatacccaccgccaccgccaccaccagatccaccgccaccacctccacctccaccatgcccacctgcaccgccaccatatcctgagcctccacctgcaccttcacccccaccgtagccacctccatgtgctcctccagcactagaacctgctccacctccacctccgcctcctccaccgcttccaccaccacctcctcctccgtgtcctgcagctcctccggcaccatacccagcaccagagcctccacctgcaccacctccataaccggcaccctgctctcccccatgtcctgcactaccaccaccgccaccaccaccaccaccattacctccacctccaccaccaccgccaccactagctccaccaccaccataacctccacctcctccttctccagccccacttccatgtccgccaccaccagctgatccaccgccaccataaccctgctctccaccaccatgtccagcaccactaccacctcctcctccactacctccaccaccgccaccaccattaactccaccagaaccatatcctttaccacctccttcgccagctccactcccgcttcccccagcagcatcaccaccaccaccaccacctccaccacctcca

SEQ ID NO: 119690 - DNA, 1734 bp, Cannabis sativa
ggttttaattcaaacgtcactgtcgttatctcatgagataattggcaagtaggaaacgtaacaacagttttagttcaaatgtcactgtcattatctcatgagataacaggaaagtacgaaacctaacacggttttagttcaaatgtcaatgtcattatctcatgagataaccagcaagtaggaaacctaacaatgattttagttcaaatgtcattgtcattatctcatgagattaccgataattaggaaacctaacaacgatttcagttcaaatgtcactgtcattatctcatgagataatagtaagtaggaaacctaaaagcaattttagtttaagtgtcattgtcgatatctcatgagataaccgagaagtaggaaatctaacaaaggtttcagtttagagtcattcttcttttataatagtcatgaccacttcttcactttcataacggtagtgaccgtctctttacttcgtaacggtaatgacagttttttacttttctatataaaccgattcacagacgatcatgaatgtatcttgacatgctatgtggtacaaatgtacttgttttttacattgcatttcaatttaggggtgtcaacccaactaaatggagaaagatcaatgatctcgtgacttatgtcacaacaacaaaaagaacgattattcacttgacctaacttattctaggtccttaattcatcaccgtaagttctcctatcaatcaatagggtaccaataccctgaacattgaaaaaacatgaaaaatgggggttccaaacaccactaaaatggtaagccatttagaaaacaacaagccgttttcagggtttcttggcagggaaaattgtagaccttttttccaaaaacggtctgtcattttctataggaaacatgaaaccccaagttttaacttctcaaaatcccaccaaaacctaaccaattgattccaaacttcacagaacaatcatacaacaatatataacaatccctacgtgatagaattcaaaatcatgccctaaaacaaaagtttccatgagagctcaagctttgagcattaaactcaaacttgactctcacctcccacagcaagaaaacctatcatatgagcatcgaaaacacttcaaatccacccaaaaactaaaaccaagaacttactttaaccttggcaactacaaaacaaaaattctactttcaaaacctataattttttatgaagaaaaggatccaagtcatacctttagcttcctctccaaccttggctaatcctagatgctaccaataatagattgaggaactgattggacagaaagtcattcaaaaatattttggttcttggttcgctttgtgtttgctcaagagaaggaacaaagaagagaagggaatggtttgtgtttttctggttttctctaaagttatcaatatgtatatatcagctaaaaaataggtaagaaggaaaaataaattataaaataataataatataattagtttaattaagaaaatgattattttaacatttcttagccactatgaaatctctcaccatagggcatttggtcaatcccgagtaccctaaaatacctcggtaattcaaaaactgacttatctcaatagtcccattaaaattattaactaaactcattgtgatacttttggcctccgatcgggtctccaagatcaccaaacctgaaaaatatttttattctacaattaatttacattatacccac

SEQ ID NO: 119691 - DNA, 3409 bp, Cannabis sativa
  modified_base (1909)..(1916): a, c, t, g, unknown or other
tggtagtaaatctagatcctgggaaaataattccaagagaaagatggatccctatgcatgtgcattgactgccaggaactgcacaaattaactatcaagaataagtatcctttaattaggattgatgacttgttcgatcaacttctggggaagatggtcttctctaagattgatctccgatcaggctatcatcagttgagaatctcagaggaggacattccaaagactgctttctacattaggtatgggcactatgaattttgggttatgtcctttggactaatgaatgcttcaacgacttttatggatttgatgaatatggtattcaaggattttctcgatatctgtgttattatatttatcgatgacatccttgtatactctcagtcagaagtaaaacaggagcaacatctccggatggttctgcaatgactacaagaacataaactgtatgccaagttcaaaaagagcaagttttggctatctcaggtgtcttttctttgacacattgtcagtaaagacgggatcaaggacaatctagggaagattgaattcgtcagggattggccgagactgaaaattgtaacagaagttataattttcctgggtttggttggttattactgtcggttcgttgagggattttctaagatctcagcacccttaaccgaactcactaaaaagaatcagtggcttttgtggtcagacaagtgtgaagcaagcttccaagagttgaaacaaagattgatcacagctccgatattagtcctaccatctgataaagaaaagttcttggtttactgcgatgcatccaaacagggtctggggtgtgttttgatgcaagtcaatcgggtcatcgcttatacctcctgtcagttaaaggaatatgaatagtgatacccaactcacaatctagaacttgccgtagtagtcttttctttgaagatttggcagcattatctctacagagaaaagtgtgagatttatactaatcacaagaccctcaagtaattccttacttagaaagatttgaatatgaagcagagacgtctgctgtagttggttaaggactatgagtgtgaaatcttttaccatcctgggaaggctaatgtggtggcagatgccctgagcaaaaaggggctcgtgtaggtaactagtatgattaagatttcaccttaactagtagatgacatggttagatcaagtattgagtttgttgtaggaaaacttaataatttaacattgcaaacagatctgatagatagaattaaaggggctcagttaactgatccaaaactggtaaaaattagagattaggttttagctgatcaagctaaagattttaggatgtcaagtagtgggatgctaatgtatagatacagagtttgtgtttcaagtagtgcagaagttagaaaataaattctcgtggaagctcataccactccttattcattgtatcctggcactaccaaaatgtatcaggatttaacacccttccactggtggtgaaggatgaagaaaaatgtggtataatttgtatcctgatgtttaacttgtcagcagattaaagctaaacatcagagacctgcgggttattgtagccactgacacaacctgagtggaagttggaagatatcaccatggacttcgtggttgggttacctagaacacatgaatgtacgattctatttgggttgtggtagatcaatttacgaattttggacattttctactggtgaaaataacctttatagtggatcagtacgcagagttatacgtgaaagaaatagtaagattaaatggggctccgaagtccattatatcagatagagatccgaagttccccttaaaattttggtagagtctataacgggccatgggtaccaaactaaagttcagtacaactttnnnnnnnnagactgatggacagtctgaaaggacaatctagatactagaagatatgttacgtggttgtgtgttggattttgaaggctcttggagcaagtatctaccactgatagagttctcatacagcaatagttattagatactctagggatggctccccacgagatgttgtattgcaggaagtgcagatctccaattcactaggatgaaactggagaaatagaatacctaggtttggaatcggtgcaacagaccaacaaggctatagaaaagattaaggccagaatgcttgcctctcagggtaggcaaaagagttacgcagatctgaagcgtagaaatgtagaattttaggtaggagacatgtattcctatgtgtgtctccgatgaaggtgataaaaaattttgggaaaaagggcaagttatgccctaggtttacagggcctttcaaaattctcgagaaggttggactggtagcatattacctagttgtgcctccaacactttcagtagttcacaatgtgtttcatatctctattttatggaaatacgtttcagatcccactcatgtgctaaattatgagaactttgaactttagccagatttatcgtatgaagaacaaccacttcagattttagaaaaaaaaaagataaagtctttttgaacaagactttagctttgttcatggtgctctggagaaacagtaagttggaggaagccaccgggagttggactccgacatgagagttcaatatccagagttgtttaggttaaattttgaggacaaaatccttttaaccggagaataattgtaaagactgctttattttaatatgagaattagcatataattagggcttatttatgaagctagattattaattatgatttatgaatttatggagacttatttgaattcagggtgtattatttatgatatatatgaaaatttatgtttttcttgttttgtacccagcaacattggaacgcggcgattgaccaatagaatcacattttagtattttagtaatagtggggtgacttagtaagacattgagaatgttaggattattcaaggatttaaaaatgaccaaaatacccctaggtgttatgtttgctttttagtgtatgtgagggcacatgggtctttttgccatttagggatatttgtcttttagtgatttatttaaattagtgaatcttattttatgttagtaatagttagatagtgctttaggttgattcagcaatttagagaatttctagcatcattgttgaggttccattcctatgtaagctacctagctcatccatttatgattccttaagtttcaagttagcttttgcttgatattcaaaaaaaaaaagttagctttccttgcattttttagaattagggttctgtgatgctatatatgttgggaatattttaccatgatctagatttactaacaactatgttgaattaacatcctaaatatgaatatctctaaaacaatgaaa

SEQ ID NO: 119692 - DNA, 1746 bp, Cannabis sativa
tttatcttatcttgttcaaaaatctaatgtcaacctttggcattcaaaacttggtcatcccacaccagagatactagcaaaaattctgtctacattacatactcccactagccttagaaatctaaggttctgtgatgtttgcaaaaaaggcaaaagccataagcagcatcatcccatatgcgagtctagggcctcccaaccattacaattggttcacatagatttgtggggaccatcaaatgttgaatccaaagaagggcataggtattatatccactttatagataattttaactgttatacatggatcttcccattatctacaaaatctcaagcctataacattcctacagtttaaaacatttgtggaaaacacaatttgatctccccatcaagactgaccaatctgaccggggaggtaatataggtcccctagcatcatttcttacccaccatggagtccatttccaacatccatgccctcatgaccatgctcaaaatggaagagttgaacgcaaacatcgtcacattactgaaactgggcttacattacttgcacatgctggtttatctctatcttattggtggctagcatttcaacatgttgtctatctcataaatagaatgcatactcgtgttctaggtgacatgtctccatatgaaagattatttcacaaagtccctcactataatatgctaaagccctttggttgtgcttgttaccctcacctaaggccatataacaatcacaagttgtcattaagatctgaaaaatgcatgctagttaattactcaatgaatcacaaaggctactggtgtgaaaataaagatggaaaagttttcatagcgagaaatgtggtctttaataaagaagaattttcagccttcacaccatgtgattccacaaaagtacactcttcttcacaaactttttttccttctacctcatttcttacatctcccattataactaacaccactatgccctctcaatctgctgcaaatgctactatgccatccacaacaaatccacctactgctgtgagaaatgttgaacaagtggccacttctgctacatcagcatctccatctgtccctactactgatgttcagcacaccactacaatccctgctatacctgtgccagttctcacatgtgctgatcctatacctgaccacagaacccgtgtcaatgatcccatacagcagccttatactgaccctcacaccaccaacccaattcaccacatttccactaccaacatacatcaaatgcagaccaggtctaaattgggcatacacaaaccaaaagcctatcactctactctacatcctttacccgaatccaccctctttaaagttctaacaacactaaaacaggccttaccaaccccatttggcttgcttcaatgcagaaagaggacactactctcaagaaaaatcacacctggacacttgttccttactcaccagacatgaatcttgtgagaaataagtgggtacatcgtattaaactcaatgcggatggctcaactaattaattcaaatcgaggttagtggtaaagggatattctcaaactccaggaattgactacacagagacatttagccctgttgtcaagcccacaacagtgagaacattactcaccttggttgtctctaacaattgggacatcactcaattagatgtctccaatgcttttctcaatggcacactaaaagaatcagtttttatgactcaacctc

SEQ ID NO: 119693 - DNA, 1760 bp, Cannabis sativa
ttttattagaacttgctacaaaattattttgctacgaaaatttagtaactaatattaattaactgctaccaactacatttggtagctaaacttttgttgctaaaaagttggtttcttgtaatgggttattgtgaaagaagatcactctgacgaagattttattgaaccagtaataaaacatgcaggtcatcatttgaagaagaagttaaagagaaatgaatgtgataagagttctatactagaagttagaaaagggaagaacaatgtcaatgaaatgcctaaggtttcattttttttttttttttttccataatttagaaattttacctttgttttttttagtgtttttacatgtgattttggttctagaaatttatatattttatttgttttgtttttatattagtggtagatttactgatttagaatattgttacatttagttttttcgacataaatagttatttattggtgtattttttcattcattttggattttattttgtaatgatcatttgtattttttgaggtttaggtttggtatggagttgtttgctaacagtttgctaatagttgtattgtaatttttttatattgtgcttactatttgcttttatttttgataattttattatttgatttcaagaatggaagtataagtacgttgaatctgatcactataaatcgaaagtagtcactcttgcacttacagtgtcattgagaagcttattatcactctttcaagaaatatcaagactttgtttcgtgctacttaatttggtaaatttgtagacattccctcgtataaactctaccctcaagtggtccatgttattcttttaagagaggtgcaacagtccaatgggaagaaattttgaacgaacattgctagtcgttgtattcgttttagtgttgaagaattcactttgattatcagtttgaattgaatggagaattgtaataaaaaaaaattttactcaagatccaaaccaaattataagttttttacggctaaaccctcttaactatcactctacatgcacttaattccctaagctcaaatcttgatggcaaaaccctccaaactagtgaactaatagcaaatttaaagtgtcatccattttttacggttagctgccaatatagactatttatgtgtatacttttgtacatatgtcacatttatattgatacacctaatattattattttaaaaatataaaaattatttcaaaatttataatattttttttatgggaaattgtaaaaaaaaaaaattactcaagattcaaaccaaattatgagttttttgtggctaaagtctcttaactatcactcaacttgtacttaatcctccaagctcatattttaatagtaaaacccttcaaaactagtagcaaattcaagttattctttatttttatttatgtttatgtgcctatttctcaattatattgatatatataatgtttgattcaattataaaacaactattacataatcggtctaattattaattcaaaaatataattagagaaattatttgaatctttttattaatgtgttatgcataacacatattaatcaactattgaacattcaaatcattttgcctcacacattcaaattttatatctattttttataaagaataaatagaagtcaatagtaataactacgatgctatcgagatttgcaaatttatgaacatcttttattgtttgtcgatgtataacaaaaaaacaacagaaaaacatcaa

SEQ ID NO: 119694 - DNA, 644 bp, Cannabis sativa
aacagggcaacaatatgtaaataacaatgtaaaacactagttcgtatattttcgtaacaaaaaatttataaattgtaaaaatatttagtctatatagctatatttttatgaatattttgagtataaaaacatccccacatataatacatgtatgcatatgattatactttaattttcttaactataaatatatatacattaataatcaaatagaaaatcttacatgatgttgtgattgttccaaagaatggaataggtgtggaaattggttgtggggtcaaaccataggtagaattgttgttctctatctccttttccttgtgtgtacacattagtgtgtactatgtaaggatcaccactcaaattccccaaaaactcaaaatcaatttcatcatgatttactccttgagaagatagctacatatacatacatgtttattaattattgataatgacatatattagaatagataattaataatttttttaaaataaagtattactcatactaattttgaaatgcgaaaggacatccagatgtttaatactattatgaagtgtcatatcaacatgattggtttgaaatagaacttagtaaaaaaatttaagtttttattataagaataaatgatatttttaaaaat

SEQ ID NO: 119695 - DNA, 1449 bp, Cannabis sativa
ttttatcttttcaaattatgcatgaaaatagtatttttgtaaaataaggcaaaatatcggggcgttacattaaccataaaataaaataaacaagttgatcatgaaagtattaacgaaatacgtaataaccttaatttttttaatttctttctctttgaataacagtgaaacatagtcgtcacaaaccattcgattcgaccacacgtgccatgtaagtgcgattcagggtgcgtgactgtggtcggggttcgggttggaggtccgggtctggggttatagtctaggttcgggtctgaggtcggggtctaggtctgagtcaaggtcggggacggggtcggggtccgggtttggatttgggatcgggcctgggcaaaggcgggctaggcttatgcgtagggcccacctagcccagtggcccaaaaaaatcctcccttttaaaattacatatttttttactgattttaaaaaataccacattttactctaaataaggactaaaaatatcttttttcctatgtcccactaattttcaaggcccgccttgggtcaaggtcagggtccgggttcgggtctgggttccaatgttaaggttggggttggggtcggagtctgggtctacgttccaatgtttaggttggggtcggagtccaaaatattaattaaaaaaatatttttaaaaaaattttaaaagtaacttttctaaaaaaaaatttgattctcaattaaaaaattaaaaagtgacaacagttttataaaacataattttggagaatatattcacttttctaattaaaaaaaacaaaaacaaaaagagttatatgaaagtgtaaattgaagttatagcaagtatcccacaagtttttgagaattttagttttttaatattgtaactaaaatagaattcaaaagagtcaattaaaaaaaaattaattggtagtgaaagaagtagtccatgcaccttgtgtatagtatttagttttcacatattatcaatgtaagactctctaatattctttctcaaagttgtgactatttatttgctcaccaatcttgcacgactcgattacaagtaatttttctttgtctcacagtgcctttttttggctaattatttcctaattacaagcacaagcggctcttttgactcacttttttggattagtttttagatttggatcggttactcattagaattttagtttgagtctgataacatattagaatatgaaagtgtatagttgatgaagtaggaatatgtgagtatatggtaaagtgcatgagatccatctcaaaattaattaataatgaaatgagtaattcatacattttatatatgatatttagtttttatatattatcaatacgagactctctaataatctaatgtactatatttataatctatacaattatatattgttagaatttgaggataagatgaatgaggtt

SEQ ID NO: 119696 - DNA, 1759 bp, Cannabis sativa
ggcaaggctaaggttgagcagccgtgagaaagagcagatggagattgtacatgtcggggcgattaggcctggagcgtacggtctttgggacattagggcatatcttgtatagtcgctaagcgacaaacttttgtaatattcacagtgaaacttttgtaaatattttgtaaaacggtatcccagtttatgataagtataatattttaatgtttattgttaattaagtaaagttttaattaatcacaattttcaataaattcgttgactagcaatgagctacacagttaagctaaaaattacattaacatgcctaaactagcagggtgttacaaattggattttatttaaggcacaaaacccaacacttctagcaagtgttatatatttatgtttgctagaatgtatgaattaatatcattgcggtatggccatagtactgggtcaagcataatactggttctggctaatacttaattccatagagtattaattgccatttttatagcggtacgatcatagtactgggttggtagtacgagcatagtactagttaagaaagatattattgtcaatggtacttttgaatattttgatgctatcacagcgatacaaatatagtatcgggcccgcagtgcgatcaaagctctggtagttactgatatcatgaccagtcataccaaatgtgagaatgttcatattttatttgaagccttgtaggtaggtgtatgggcacctatttataagtcggtgttatgctatatgtgttatgcttttcttactgagtttgtcgactcacagttactgtttacatgtgtaggtaaagaaaaggtgatcactgaacgctagtgagtccatagcttgaggattattgtacatatcaggatggttagacctggagtgttcgctctcagaatgatttgggccttcattttgtagtcgcggtgcgacacttttgtaaaatgtattttgaacaatgttgtaaatttctaggacaggatcctaactgtttatgtatgtttatatatttagaaaaagtttaattaaaagtttaaatttgacacgatttttgaaaaacccttttattagcaaaggcgtgcacaataagtagaaaattattgtagtgtgcctaagcaagtagggaattaagctatgtgatgaacaagctagagttcaacatgactaaattattgaacgagttaactgtgtttgagaacctaacaaggataagtcaaaggaaggtgaattaaacattattgaagcaaaatccagctctccttcttcttctgttaagtaaagaaaatggaacagtaagaacgaaagtagtagcacgcccaaatcgaaaggcatgaaggaacctaaagcaaagaagaaaaaagatatccctaagtccaaggacaataaggcaaacgacaattgtttccattatggtgtaatgggacattagaagagaaactataacaaggatctctctgagcttaagtaaggtaaattcaattcatttgttcttgaagctaatttagtggaaagtgataaatcttaatggattgtttaattgggagccactaatcatatttgttcttccatgcagatacttgattcatcaagggagccgattgatagagaggtgaccatgcgggttgggagtagagcataagtgtcttccaagagtgtgttggattttgtgccctaaataaaacccatttcagtataattagatttactaattaataaagaccagaaatcacattttatgttgcat

SEQ ID NO: 119697 - DNA, 3470 bp, Cannabis sativa
  modified_base (1929)..(1930): a, c, t, g, unknown or other
ttcagcaattatactagtttatttgtaccataaacattcccattacatgtttgtttttactatttcctcaagatattctagatggatgactataggggctgccacgtcagctattatatattttaaaaaatgtttctcaacaagcgggcaagaaagtgaatcatgaatatgtaaatttaagttaattgtaatcaccgattttgtgtgtattgatttccagttataacttatactaatcaacaaatatattgtatagtgtgtattaattttctaaaattgttgcttgattgtacgtaatcccatctcatatttcgatttccatattagaaacagaatttgattaaactctttaatttgtaattatagaaacatatgcagtaaaacaggataaaggatacgtcatattcattcctcgcactagaaaaaacacacgatcaaaacaaaacaaaacacatgatatttagaaacaataaagctacgtaacacgttgctcttggttactcaactcacaactcagttttggttggcctgatatcctctccattaatggcagccttgtcatgttcagcaatatcaattaccttgggctgtttcttcttctcttcggtcactttgggcaccgtaatcctcaaaactccattctcaagctgggccttgatctgatccaactccgcattcgctggcagccgaaactgtctccagaaccttccactgatcctctccgatcggtgccacttctctccttccttttcctcctctggtttgagctcaccgctgactctcaccactctgttctcctccacctcgatcttcacatcctccttcttcatccccggaatgtcaatggagatcacgtgctccgtcgctgtctccttccagtccgcacgtgccagcgccaccgtgttatctgcgcctttgggaatggacagcggcgtgtgctcgaggattcggaatgggtcttcgaaagggacgacgttgttcatcatcatatcccagagcgatgttgtgtaaggaactaaggcattggattggacagtgatgattgagagtatgagaagtgcaagggctagtttagttggttttggcgccattattgttgggttggaaaatgtgtgtggtgtgtgagagagagagagaggttggtcgatttgattttggtgggagggactgataagtgataatatggatttgaattaatcttgttgttttgtggatgacatgaaaatgtttggaggtgaaatgaagtatatataagaataattatgcggcttctctggattgttcgtaagtgttcatttggaaaagattaattattgggaaaattctggtagaacctggctgttgacctggagaaatctagaaggcattattttttttttttaaggtacaatatgtattattacccaagaattacacagttttatcaaattcatttttctgttccaccattgtatagaagcataattttaaaacattcaaaaaaaaaaaaaatgtaaaatgttacaacttgtttttgtgcttgcaaacagaaattaattaaattacatgttgtctgtcttattgcaacagaagaaatttttaattttttatgtgttgtaagatttaaagactatgttttaaggtatgcttagaacaaaagtttgttttttttaaagatttttaattttaatatataaattattgaaaagaaaattataaattagtgtgtttctaactataattataattccttaccgaaaaaactataattatatggatttttttttttatttttacattttaaaataatttatttttaatttattttatagaattttacacaaaaactcttataacaactaacagagtaatttaaatggcaaccaaaattggtataacaacccacataaaaactatcggaacaacctaaatcgtaaattaaaaaaaaannaaagttaaaaaaataatatataaactaatttccttaactataattatttaaaataaaaattattgtacaaaagctttttttaaaatgaaaaacagtactctaattatagtataatgtatttattgtggatattgtcccacataaaataaatggtaaagaatgaagtcatatataagaacatgactactccactcattgccaattgattttaagatggaatcccataattctcaacatggtattttgagatggaatccatgattctcaacaatattattaatgttatttcacatatgaagatatataagtgcatctccaagtacatgtattttttagtctacattcataaaattaaattttaatagtggtgttaagagcatctataataaaagttgttccaggagtcgtctttgccatatgtattttaatcaatatttcaaactttttatgaatattattgtccaaaattagtaataactgtatgacaatatttatttatttttgaaaaaattattttatcaccaactaatttttttaaagtatatatataatttataaaatttaattcaaaaatagtatatgattgtgggatcatactggtaacttttggagttgcattagagtaattttcaaatttggatgagagaaaaaattaaaaaaaaaaaaaacttcaagatgatgtatgtatttgaaactataagatgctctaatgtgatttaagtttgcaacatgttaaaaattatattaaatttgacacaaaatacagtataagtcgaaatttacaccataataaattttattttttatttaatcttttgctacttagtacctttaatttaggagatattactcatatactattttttaacttttgtttttttttttttaaaaaaaaatttacggtttggatttttccggtagtttttatgtgaattattatacggattttagttgcgccgttagttggtaaaggagtttcaatgtgaaaatccgtaaaaatacaaaaaaaatatatatatttttcggtgtaaaaataaaaaaaaaaaacccaatatttaatcggatttttatacatttttaatcaaaatttaatgaattggttgattttttttttacacatttttattaaaaataaagttaatttactctaaatatattggagcaaaaatataaaatttagactaaatataacattagtttatttttgagatttttacaaaaatattgaatttcggacaaaatttataattttactgcgcacagaaatttttacaaaaatattgtctcttcataaacaactataaaacaacaaaacaaaacaattaaaaataacagtaaaataactaaaaaataactgtgcaacaatagtgaaaatttaatatagtacacaatatttttgaaaaaaaaatcgccctacaataataaaaaaaataataaaaaatttaagtatgtggtatataaaaatctctttgggctcgtttggaatgtcgtattaggtcgcattatattgtattatattaaattggattatatatcatat

SEQ ID NO: 119698 - DNA, 1917 bp, Cannabis sativa
ggaaaatggagaagaaatatgtggacatgtgggaaatagaaaaaaagtaggtgggcacgtgagaaatgtggcgagaagtaggtgacgattttttaatagacccttataggtgacgattttaaactgtcgcctatattaaaaccgtcgggtataagggttcattaaaaaatcgcattttattacgcctattttgtttactacaattttaaaccgtcgagaatactaaatttttcttgacgacgattttaaataattactttttttagcgacggtcctcaaaaaaaattgtttaaggaccgtcgcgaattttaatatttgtaatagtgttattatggatgcagaaacaatatggggtgcattgtgtttttgaaaggtgcaccataaaagttctctatatattattattatttgggtgactatgcaatggttacattaaaaatataactatgatggttacattttattatgacctactatagtaggttactaataggtaaaaattctattttgatactcaaattaattatatacttaaaataaattaatttttcaattaaaatatttaataagacatttttcacaactaatatttaaaaatgttttttatttataaaaaaattaaataaaatcaagttagtatcatgttaatggtaatttattaattatttttatttaacttctaaagtaatcacaatcatttaacaatgatcctaccattaaaagtaaatgtaaccactgtacttacatatttgatgtaactattgaaacattctctattattatttatataattataaaatttagaaattaatttattttgtgtgtactgaattgtgaatacatttattattaattagtatattttatggttttatcttaaaaaataaaaataaaaataaaaatagtaagggtgttcacggattgatttggtctcgattactattttttttgaaaccaaacgaatataacgctttttaaaatttgaaaatcaaatcagaccaaactaaaccaatccacgtaaaaatgaattggtttgatttaaaatcatggtttacactttgtacttgttgattttttcttttcaaaaccaaaaaaatagcataaataataataaaaggcattctcaaagataatcgtatattaaggttggatatgattttagtaaatttaactaaattcaaagcatgtgggctcacaagattataccaattgcattagtggtctaaaattttcgattattttatgtatgagagagtgagagacagagaattgggtgtgctaaaacaaagaaatttgtcaaaccaactatgtccaaatttaactaaaatatacatattaaaacagagcaatctgaccatcctataatatagtgtttttttttatatatatttttgtatggaaaagtttcatttttaggacgatatggtgaaagggattaaatcaaagatgatgatttattagatgtggacacaccaaatacaactgaaggagttaagggagatctcaaccattaatatatagtcatttagtcgaaatcatatagataggaaatttcacccaattaaatgagctaatttcaaacatttttaagtgttcaaggttggtggctgatttcggaatataataattagctttgatttattacatcactattaattattattattattattattattattatgaaatgaaaacaaaaacatcccaataaagacaccaaattttattaaaaattaacattttatatttttaacttacttttgttatatatgctaagttattgttacttacattgcacgcatatttaagaaatttttacatgaaaaaaccattttgcacaatttattacctaaatacctctacacgcttatgtctacatttttacttacaaagttggttttattacacaaataccac

SEQ ID NO: 119699 - DNA, 2191 bp, Cannabis sativa
  modified_base (2164)..(2166): a, c, t, g, unknown or other
aggtttaaggtcggcattttacacacactctctctctgagctaaagaggaaggtttcttgttgtaaaaccagacatttgaagataatgtccactccccttcaacttcaacttcaacttcttctttctcaatttttcatataataaaactacccttatacttttgcaatattagaaacttaaccaaacataaatttgtggacattatcttcaaatgtctggattatttatttatatataaggaaaaaaacataaatttgtgctaaaatacccctcaattttgggtttatttatttttattttcttgaaaacaaacgtaattatatagatgaaggtaaattgagtctcatagtcattatacacaatggtatctagtatagaggaagtctcaatcccatcaattacattttgattaaaaacccacttaactaaattgtgaacaacaaaattaaaatatctagaaactttcaaaaaattacattccaaaaaagagttcataagacttctaaaataaactacatagttattaattttccaccttaggtttaaccccttgacaactttaataagtatgttagaattatatttcacgataacaaattgcaagtctttctctgctgcaagttccaacgctaacatacaagatacgacttccccactaagatcatcttcaacaggtgtatattttaggttaaatttggtccaaaatataccataaagctatatttgacccattttgtatttgtactctaatccataaggtgtaaataagctataaaagtcaatattaccattaatactcatctaaaatatacaaaataattaattttattttaataccttatttaaagtcaatgaatagtattaataagtgacaaagagataattaaaaaatgcagtatttattgtgagctaaaatttagctcatggtatcttttgtgctaaatttagcacaatttttagcttgggccaaatttggaacacattttacatcaccattggagttaaattttaacaaaatgttctaaaaaatagtaacacttcatatttatagctctccattggagatgctctaagagcattagcaaaaagcagtttcttggtactagcccaaagaacattccttacatatctaaagccatcactacaaaaatcataaccccctctctaattgctacatcacagttaagtttgatccagtccatgagcggaggagcccactcagtgacactaggagaaaattgtaattgagacataagagagtgagcacaatttgtataataatgagcaatagaatcaatataataatgtacactatacatataattattatgtaccttgtcattctttgctctccatataatgtcaactatgatagaaacatagaaaaacacatcatcatcattcacatctcttatattcaaactctaaatgaatttaacataattccacaatatagtccccgattcctgtacaagaatgagaccacctaaatattgagcttacttacttacgattaaatattattatcaatttattttattttattataaaattactaaaaaaattattaattttttataccatttgattgtttacctaaaaaaaaagagatttagcataaatataaatttaatattttagccacaaatttctcttcttatattaaatttgacatgttagggatttgtcgctctatttagagtgtggtttggtttgtgtatccgttttttgtttggctatggcatctagtagtttgacagttagtgagattgaaggtagatgggttgagatatcgttggaagaggaggatgaggtgggtatatcgatggaatgggtagaaaaagaggaagtcgctattgatactcgatggtgtctggttggaaaacttttcacaggctgagttttagactttgatgtatttcagaatatgaaggtcttcttatggcagccaagaaaagacatgtatgtaaaagaacttgagcctaatttgtttttgtttcagttctaccatgaagtagatatgataaaggtcttggttggtagttcttggacttttgataagaaacaacttatcattccttggttgaaactaggtgagaattctcgtttagtaaagctttatcatcttgatctttgggtccatatgttggaaattattttacnnngatctatttactatcatgtatgttg

SEQ ID NO: 119700 - DNA, 1210 bp, Cannabis sativa
  modified_base (1140)..(1168): a, c, t, g, unknown or other
ttcattgttacacatatacatatatatatatatatgtttactaaaatcttatataaaaaatacattatttattttatgttatatattaaattaaaacaggaaaaaaatggttgggttcgcaggctggtacgggtccaacccaaacccaagggttagcaaaaatcaaacctaaacctgcccaaaagagttgaccgggttggacctgacctgcctataggcaacgagttttcccaaacaaataggttggccgggtcaggtctaggcgggttggtcgagttcaggttaaacctagccaaaatgttcagtcctagagtacacgatctagtttgatagattggcctaattagccttgagaagtgtgccaaccaatttctagtaagagggaaaagtatttagcgggattgaaccccaaaatcaaacatgatttaatgattacagctgatgacatgcatacttatcctactatggtagagaaggaactgcgagctgagggcatagtagaatgaattcaagagtcccaggggacacagagtgatggtggggccactactcctcctacctctggttttggtaggggtggtagtgactcaaccacttatcaaaagaggaaagtttcatttgcatcaagtggctcgaattaaaaacaagaggttttgagggaaccaaggctgtggcaattgacagggtggttcagagagctgatacacttacccagagtgcctagttgtaagaagcatcatcagggtaagtgtaagggccaagcatgtttctagtgtgctataactagacattacaaaagagattgcccgtaattaaagaaagaagagcataagacagaggcaaagctcgctccaacaagggtgttttcccttactcaggctaatgctgaagctagtccttcagtagtgacatgtcaactttcaatcaacaactctttttactccgtattgtttgattctagagccactcattcttatatggtggccagggtaactgataggttggataggtcgtgtgacagttatgaaacagggtttggaaacctgttacctggtgggaattagttatctccaaaagatgggttaagtctatgtcaattaggcttgaggacagggagttgatgttggaaattattttacnnnnnnnnnnnnnnnnnnnnnnnnnnnnnttattaacatcctaaataagaactttctaaaacgataaatta

SEQ ID NO: 119701 - DNA, 1152 bp, Cannabis sativa
  modified_base (445)..(448): a, c, t, g, unknown or other
ttaaattgggcagtttgcatgcagaattttataacccgatctttatgttgggttggaaaatatatagtataaaccgactaaaccgaccgatctacagccctagtttaaaagttattggttttcttattaattataaaattcatgcctgtgggtcgcaatgttaacttctactggtaacattgcttttgagctgaacgccaatgaaaatagagtgtgtcccattgctattttctctatagttctatgggcccagagcacttgtggtagcttgtcaacccatcttccttttgctgcttccaacttccaacttctaacttcttcttaatagtatctcgtatctcttaaggttttattaacaacttctacttgtccgtttgcttgaggtcttgatactagtgagaagcttttaataattttattcctttcacagaactcagtgaataannnnccatcgaactgagttccattatcatatactatttcaatgggaatgccaaacctgcaaataatgttcttgatcacaaaatcgagaacttttttgcaagttatagaaactagtggttcagcctctgtccattttgtgaagaagtcgactgccacaactgcataatttagtcagttaatctgtctaacccacacttgtattcaatgctatataaatacagctcctgtaccattcaattcattcaataaaaagttttcttgctttgctctgttttttgatttaatcttcctaataacaatagagactttacaaataagttataactattacattaaaatagaaattttcatatttatagtatttaccttattcgatactcatctactttttcttgtagatatgtttgtgggagaaaatatattttaggaattttttttttaaaattaaaattttattgtctaactttcttggagtattttttttcttatgtatattacaacgttaatgttgcggtctatgaattaggaagaatttaaatattccttaatttttatgatcatctataatagaaggcccctttacccttcatgatttacgatagactataagttttttgagtattgttattggacactagtagtgtccaacacctttcataggcggcaactactacaaggaaaggtcttttatcccggtttttaaggctt

SEQ ID NO: 119702 - DNA, 1189 bp, Cannabis sativa
attagctactaaaaaatattattttctcatgtaattactaactattttgtcaaacaagatattaagaattcatatgtaattacacctcatatttaaacacaccttgtattaccatacttagtaattataccgttactttcaaacacactttaaatattcaaatttgagaccctatcaaagaattcccttcgtattttctctataatgtattaattttttttattttcagtaagacttcattgttaaaatacagattttatcttttaatactaaagcaatctaataaaattaaccgtgacaaaacaaaaacattatatttacacctaaaattgacataaactatcctaaaaataaagttgaaaaagcttaaagtaattttatttttttactttctttagttttaattttaatttaaaaaattatatattttttattattattattattcaagtaattcttagtatattttttaattttttttgtcttaaattctacttaaaatgagattacgtaatgaaattcttagtttaactttgaattaaaataaaaaaaatatatatacatatagatataatacattatttaattaaaaaatttaacatacatataatgcattaaatatcaccaaattaaaaagaaaattaatttaagataattgaattagtgtctactaaggccatgccaccaatagctggtaagtttaccttatgggatgagggttgtagactttcttttgcttgagccaaatttaaaaaattgtagtttactcggaaataccaatctatcctggataattttagacaatattcaacataaaattcagtacgcatcccctaaaagaagatgagttggcgttgcccaaaatgtatatattagaaacacagtaacttaagaagtcgctaagacacctaaaggggtttcctgaggtaatgatcattatttttatggatagtcacctaccgtccttagggcaaaaccaacttgtcttgtcaggtttaaggagaatcaatataatttttatatatgaaattgtgtcaatctcatcgctcatagatttgacagttgatataactgtagcatcccgtaggatcagttggttcttttgagtttgatcttcccttgttgtgactctttcctttgtggtgatctctgctgtgacttttacttttgtagtgtccatgttttcttt

SEQ ID NO: 119703 - DNA, 609 bp, Cannabis sativa
aagaagaagaagaagattactccaatctcactattactaaaagatgcaggtacttatttgaatgtgtgatcaaattattggtataatttaatgtgagtttttatttattttactttaataacaattataaaatactattaaaaaattgtagagtactacccttagctaataatagcaatgtatattaacttttggaaatatacaatcaattttctcttaataattcaaccatttttttcaacgaggtggggattattactttagaccttataaacatcaaacaagtttattactaattagtaattgaataatatcatgtaattaattagtaattgtcttatacattgtttaataaaagttagaaggaattatttcgtgctctgtaatcaaatacttaacatatatagtgattatcataatattttatgttttaaattaataatatactataagaaatttatgtaacgtagatttttatttatttcagcatttagaaaaagaaaattaatctaattttttataagttaaagtctctttttatatctttatatattaaaagtggctatttaacggcatttcttgtttaacatttcttggtttaacagaata

SEQ ID NO: 119704 - DNA, 1052 bp, Cannabis sativa
agtacttgataatgaagaggaataaaataatataaaagtaaaagtatacaaatttgcttctgaaatagtaaagtaacatatattagtaattcaactaatgttgtaaaataaaagactaaaacacacctaaaaaaaaatctatgtaatgccttatccaattaaatgaaatcaaatagcaattgttatacagacaagacgaagggcatttaaaaattaaggtgccaattgtcaaatattgattttcgaatactgacttgctctctggaataattcttgaaaaattggctgattgtgatgggaaaaaacaggatctataactgcacaaacaacacattaatctttagtaaaatattactactaggaacagagtaataaaactaatttcaaggagaaactctataaaatcaccacactaaaatctcatttacatacattgaaaaagcaagactataatttatgaaagatactaaaacattaataaaaatttaaaaaggatccaaggcgtactttctatcttcttcctcttgaaatttgggatcagtatccttgcagctagaaggatatttgggtaaagttgaaagatcacaagcaagagggttttaggtaaagaactatataagaatattcatagttagaggataactaacactcaacaattatacattaaacacaacataaaaacaccaaatgattgttcatcaaaaaaaaaaaacaccaaatgattattagttttactcttttcttcaaagatttttcatttctagaaaatctgtagttctagtatgaagattaaagtagtaaaagagaaacatatataaaaaaaaatgaataatagaaagagtgtttaaaaattacaaatagaatgattagaatacacatacctatgtttattttcacttgacgcctaatgatcaagcaactcatttaacccactgattgttcgcaactcatttagctataagaatatttatggctagacgtctcgacagaagctttgttccagtgatctcaatagcaagctggggccatttttccttccaaggtcgacgatg

SEQ ID NO: 119705 - DNA, 1167 bp, Cannabis sativa
tgtatgaaaagattataaaatttgggcaacaccgcgcaaagcgcggcttagttccctagttatttaaataaatgaatagaataaaaccacaagggggtttttgtaacgatttttatagttgatgtgagatttttgtaacagaaaaaaatttaagagacaaaactctacaaaagtcatagtttggaggcataaatcttatttattctattaagaaatatgacaatgtacaagccgaaagcaaatattgctcctacttatttgtattccaatgttatgttaagaattaaggtgtgtttgaaaatatttgtgtaattactactctaataattacactatttaataattacattctattttaaaattcaagatgtattaagatatgaaataataataacttataaatttctaatattttatttaataaaatgttgactaattaatatataaaaaaattaataattacacatgacaataatatttttttaataattaatatttaaaattaaaagtttttcgagtgtgttttgaaaaaactgtgtaattacaaaacaaaaaagtaaaattttataattacaattaattacaccaaattctaattccctcttgtctttctaaatatgcccagcccaaatctcaatagggtataagaattggagagattgcctcttaattaaagggaaaaattacacacaccattgactttttcctttttcttacttttatactgttaggcggtataatttacatttatactgtatagttttataacttttatacagttgggcttcaagatgtattttcttgtcactttaaaatatgttttttttttttttaaattataaaagttgatgggaaaattagttgtcacgtcaatcagtgacatatatatatattttttttaaaaaaaattaattataaaagtttttattgtattgaaaaagtttgatgtgatgtgttgtcacttttgtgaaatatttttttaaaaaatataatcatgaaaaacttaattttcaaacgttatttttttttggtaatgtataatagttttcattatttactttcttcttcatttattttctttcttttttcattgtatttgggctctctctccactattcatcttgttcttcgtttttttctttttttttttcccaagtctacaacatt

SEQ ID NO: 119706 - DNA, 1369 bp, Cannabis sativa
tcatactctatatttataaatattattcattatcctataaatattattcattattctatatatagggtaattcggcatccagaagaattttttagtctaatttttttttatattcatatacgttatatctatttaagatatcttacaaaattttaaaaaattcgaaataatttacaatataaaaaataatattcaaaatgcctattttacacgcgtataaaataaaatagagacacgtgcaatataatgtttgaacgtaattttcggcatgttaaacttttctgaatgtcttaaaattttgcaggatgtcttaaataactataacgtacataatattgagaaaaattttgactaaaaaattatatcggatgctaaaacagataggaatgcatcaatatatccattttaagggagtatattgtaaaattttctctatatattttaaagtttttttaccgtggagactctaaaattggatacattggtagacaccctaaaatttaaaattgttatttgacggccaacgatattgttgtgtgcctttacacactgaatttttgacttttaatgaagataaagaaaacaaaaaataaatatataatttaaaagattcttcaatggcattaatttgtgttattactttgcagtggccttcttttgttctcttgcccaaaaatctccttttattttctattcctcgaaactcacttttttatgcttctaagatttcaattccagaaacactttttactttgatcttcgtataatgttatcatgttctaaactaaattgtttagagaatgttatgagagaaaatacagagcaaaagataatgaaacaaactttattactcaaagataaaacatagttagttaggaaatcctaactaacttaattaactgacatagctcctaataactaactaaccgtaagactaactaattctaatagccccttaagatgaagtgtacatgttaatgatatccatcttgaatacaagattgttgaattgtgaagggagaacaacctttgtgaatatatcagctagattattgtgagaggagacatgcatcagttggagagaactttgttagactttttctcggataaaatgacagtcaatttccacatgttttgtgcgttcgtggtaaatgggatattttcacttatgtggattattgcagctgtgttgtcacaatacatcttaggtgttgaagaaatggggacaccaaagtctttgagaatagcaaggatccaagttagttcatgaaaaaccgtgtttttacaaatgtcagttatatataaaactgtataaaactgtatgtgtctgcagaagcagaaagtaattctgctacatcaaaattaaaca

SEQ ID NO: 119707 - DNA, 1580 bp, Cannabis sativa
  modified_base (1549)..(1550): a, c, t, g, unknown or other
tgtggtatatgtgtaataaaatattgagaaaaggtaaaaaagttgatttgaccgtgtgtaggtttatatgtaataaagtgtataatttgtatttttggtgtaaatgtttctattaattttgtaacaaatttattaaaattaaaaaaatatgcacagtttatattaatactaataatactcttctctcttctctttttttttttaaattcactcatctatactccctattcccatcctattaacaaaacttttcttaatttggttcaatagtttttgagatttcatagttagagatgtttgctagagtttatgctcttctttgaatgaattttctgaccttttatcttctccaagtttgaaactagagactagagagttaagtggattagattgggctcgaagtttgacattgttagaaatttatttaattaaggtcagaattgtatatataaaatatatgttgagttattatataaataagtcaaatttatgtggtttattttaaaataaagtttatgacttaagggcatgattgtcataattttaatatgtagacatcataaggacaatttctaatttaatgaagggtcaaattagaaatagtaaataaatgattaattattgtttttatagttattaataaataggtattggtccccattttgcatcttatcctaacatttcatatccttgaatctctatcatctattaaaacaaaggttccaaagaaaattttaatgtaaaattagaagatcatactattctaaagtcgactctatagactctttacgcttttgctaatctttaattatacttgttaaatttctcataaattaattagaaataaattcagaataaaattttgcaacaaacattacctattatttttctagtaaagatttggagataattaagcttgttggagtataatctaatttcaatttattagtatacttttattaatttaggaacttggattgagaatagagtaataaggttaatttgtgaagaatgattctatttcaaacttaattatcgttgagtaaagtaagcatgatcttataagtaaaatttattacttctccattttttatctcttttctaattcgaaagactttagattaaaaatgaaggaaattgcaaaactaaagaacgtaccttcaatatactatggaaagtgacaacacaacagatgaaaaaatagaagaaaaaaaaaaaactagtaaaagaaactcttataaattttgtgtaccaaaagaagagagtttaaaaattaatgattttatctgagtctttgtaaagggttgttaactttgacatagagttatgaaggttagttggaatttgaacacacttggagcttttatcataatgaggagctagacaatctgtgtacaatttttgtgtcatagtacatgatgctacggtggctatatatcaagtacttatattaagaatattctatgtcattgtggccactcttgatttcttcaatcactcgttactataatatatattttcctctcttttttttttttgatttaagcgnntatatattacaacatgttttacctgggact

SEQ ID NO: 119708 - DNA, 742 bp, Cannabis sativa
gaccaatagcggccgaggggcccgccgctattggtccttaatgttgtagtgctactgactgtcacaaaaccgttacatggtatggtcaaaatcaattgtgatgttgggcttagcattgggtctttaaagactagggcagttattcaggttcactcatttcttcaaaaacctagacttggcttggttgttttgctcttgttgctgttgaagcttctagtatttttgttggtatgcaacttgcgatttgtcttggatattcttctgtagttttggaatttgattataatatttttatcacttttattctcaactagacagttgatcatttttatttagggtgtattgttagagatatcattgcttattgaaatcacttttctgttatctctttcatgtattgtcttaggattgccaatagtgttgcacattcattggcctagctagctctattcatgtcttattattatgtttggtggtctaactacttatattgtatatcttctgctctgtagaaagacttagtgattagtgtattctcctaacatttttttcctcttgaaatttttttaaatttacttttgaggttttaacttttaatgaggacttttttctaaaatataaaaaataaaaaataaaaaataaacaaaacaaaatgaaaacactttcaaatcaaataattatgataaaattttcttactatttaatatgttctgaccatctgtcagaaaaaaaaaaaaaaaaa

SEQ ID NO: 119709 - DNA, 1579 bp, Cannabis sativa
  modified_base (507)..(507): a, c, t, g, unknown or other
  modified_base (1548)..(1553): a, c, t, g, unknown or other
ccaatattttttacattaataaaaatcagaaaattttgagttttattctttagtgacattctatatttttagtgacacacattataagagactactactaaatttttatagtccaattgtgcatgtaactataaatcactcctgactctttagtgacacgtacttttctgcgagtcactatatagtgtcactaaaaggccaaattgtagtagtgatttaataaaagttttaaaattaaaaagtttatttaaaaaatcatttaaatattttctaaaaattaaacagaatttattaaaaaaataaacaacgtaattaaaattaaattaaacctcattaattaaacatactttaacgttcattcaacacaaaaataaaaaccatcaatagcctcaaataacaaaaaagtaaaaaaaaaaaggctaattatgatttttacccccgaactttgacatatactaaatcatgtcccctgaactttgaacaccgttaaaaattctccctgaactnttgagattgtttgatttaaggacttttgtctaattttagtaagaaaagtctaacatagatgaaagttcaaggggcataatttgacaaatatcaaagttcaaggggcatgatttggtagatatcaaagtccggggagcatgatttagtacaaaattaaatgaaattggacaaaagtccttatatctaacaatcttaatagttcagggggaatttttaacagccaaaaaagttaagggggcacgatttagtatatgtcaaagtttagggggcaaaaatcctaaacagccaaaaagaaatcaaatttgaagaacacaaacccatctcttctcccttattgggctccaaccttaaaacccaataataaaaatccaaatgttgtggtggtggcattgcaaattactcttcgaatattcactactaattcgagttttaataattttaggggtatacaatggtatgaggatagaccaagtggccaaaacaaaatctctcatacaaactaccaatcagtagtgagatgagtgaatttagagagagaaaaggagaaaatgaatacccaaaaataatgaaggccaaacgtagaagataaacgtctcgttgtgcttagggtggtgaaggggtttatcagatgattattttccattttccattaacgttgacaaaaagaagggagactaatagagaaaaagatatacgagagaaggagagaagaaagagagggattttggcatctcccaagctcgtggtgacgtccattttctttgacgttagtcagaggtggcttaattagatgttgaagtggctgtcgtgattagagtgagaggaagaagaaaatgaaggagagagagagagagagaaggtgaggctgaatatttttatggtttttattgacctcgcttttagccaacgacagtgagtcaataaataaacaattaataatataatgaaaagagagcaaaacgataaagtaataaaaaacaccagattttgaagaggttcggtcccgtgagcgtggtaatagctgttaggttttatgccctnnnnnnaactccatttcaatgtaatctatttt

SEQ ID NO: 119710 - DNA, 1424 bp, Cannabis sativa
ccaaggagtacaacacaagtgaaaaaaactattttcacccaagaatcatgttagttgacttgtgccatctttgtgcacaaatgagtggcacaggttgaccacaccaaatgggaaggacatttgtgcccaaaataatttttcatcatcaacatattaaaaccaagcagtgtagaaaccacctagccgacctgtgccatctttttgcacaagaagatggcacagctcggccatattaattggagagaaatttctttggccaaaatatatttccaacatcaaagtatcaaatacaagtgagaaaagtcacaaagaggtgtagaacacctatggctgacctgtgccatctttgtgtcccaaaagatgacacatgtccctcctaccaattggccaagaactaatgtggccaaagtatttttctggtatccatatgactaaagtaactaggaaacaccataaagggcttcccataagccctagccgacctgtgccatcttttggcaccaaaagatagtgtagatctcccattagggtttttaggttttggggtaccaagactcccaaaatatgattcaccttcaaaaaaaaaaataagtcaaagcttcctaaaaatgtcaagtgagggtgctccaaggagccgtagctcaaaaaattccacttaataaagacatctcaaatggcctacatttgagactttgacaagtgggttgcgtgctaaaatcgagtacccaaagtattaaggtccatgccgataacttgctcggactagcaaaatgcaagttaccattggcaacaattaatgttatcttaaataccctgtgttacaaagataataagtatcaaaataaaataagtgcaaaaaaatatattaaacttagttctaaagtcactaagatacggaataaactaagttatatacgcttaaaaagttccaaagatgtgaaaaagacttgttagtcctaactaataagcacttcatgccaagtggacataaataaacccactcatgtggacttaagtgtcaatgcacaactaagaaaagtgtatatagcaaaaagagacacaaatataaatgtgttctcggaaaacaataaagacacaaagtcaagcattaagagagttccccactccttgtatgacgtgtcacaccaagagaaaaagcactaccatcacggcacagctctcccatgctcctctcctcaagaccgtgggaccgggtgagaagtagcctcttctcctttttcatcaagctccccatcagcagtagtaccttgagtattggcaggggtcgcatgggtcctgcagatatactcctccacctcaccctgtagcgcatcaaagaacttgaagtccaagtcattgtgttggcaccaacacatgtatgtgttgtcgagcaaatttcgacaacaccagttttgtgcgagtat

SEQ ID NO: 119711 - DNA, 953 bp, Cannabis sativa
cagtaaaaaagtaaaaattaccgcctggcagtatttttgtaaaaaaatggcaaaaattagtataccatgtaaatttcccatgtccaactcaaattccactaattattgtattattgaaacttaattttgtttcatatttattttcaagccttatgatatttttgacaagtattgttcaagttttgttgcatttgtgatagtttaattattagtaatagtctaacccgcaaaaaccgcaccgcaccgcatcatttttttgaggtgcggtttctgcagatttttagttttgcagtgcgggtgcggtttgtgaaattagaaaaattgcatgtgtgggttggtttgaaaaaatgatccaaaaccgcaccacctgcactgcgaacaccctagttcaaaccatacaaagaaaatgacactctaataaataaggaatttttttaaagattcactccttaatttagttaaagaacatgtttagagaatatagttagaaatgctataattgtaggaagttccttatttttttgcttaacttttttaatggtattttaatcaaaattactattattttttcatcattttaagaaattaatttatatttgacaaatttaaattaaaaaatattatataaataatcaaatactaacttgaaataaaaaaaaaaaaaattagtattactataaagataaatgatatatttaaaaattactgaaaaatacataatttttaaaaaacaatttttttatttgatccctaaaatgagtgggccctaacacactatactagagagtatatttagagcaacaacaataaaaataactcttatctgttttaattttttacctattttagtagagagtaccattagaatgctcttagagagttccctccataccctatcaaatcctaataaatctaataattttttatatgattatttataaaaaaaaaaaaaa

SEQ ID NO: 119712 - DNA, 3595 bp, Cannabis sativa
  modified_base (1505)..(1507): a, c, t, g, unknown or other
aattccggttcctacaggtccctcggaaccggaattccgattcagtgcaggaatccaacaaaaaatcataactcaacatattcaaccccaaactcaatgaaaccttccagacctgctttatagaccacaaagaacatatctaaagcaataaaacatctcaagatgcacagaatcaagtttcaccattaaagccccaaggttgagttctaaaactcaaaagttagttaaacctacttactgccactaaaacatgctcaattcaacctatctaaacataacttaaccttcgaaaacaatagcaaacaacaacagcaagaacaacaaccaaaacctcatttcatgcaaaaattccttttcttacaattcaagaaatcaaagaggaagttggtagagactttaccttggcttggattacacttagagctgctagaaatcactgaattgaagggaaaaatctagaaccctagctcgttctaggtgggttctaaaagagagagagagtttgagagagaatgtggtttttgataaacttttctaatttttgtaaaataaataaataacataggttttattaaatcaatctcagccaaatacatttaaaaaatatgattgtatttatttaattaatttcacataaagacaaaatacaaagtgggcaaaaagaccaaaatgtcgttgcccacactaaactatcttaaaatcacttaagggtattttggcaaattctcaaatctcgactattcacgacattcccaatgtctaactatatcgccccgctatactaaaaatactagaatgtgattctaatagccaaacaccacgttccaatgtcgctgggtactgaatatgtaaaattatgaaatttctatatatgacatataaaatgcattttgaattcaaataaattacataaattaataattcaatactaatacataattttcataattaagccctaattatctgctaattttcaagttaaagctaagttgtctttacacccaccatgtaaacttggtttttatttatctatttcttttaaaaaaaaaaaatggcattttggccgagacaatggtttgccccttacgacactttttgtaaatacaaatttgcgaagttggaaggccaagtttgctttttaatacctcatacttttaagtttaaacttcaacttgtggttgtttgcttgcgtttcattcacaatttaaacaattatatccataaaatttattagacgtttccattgcttgtatttctctctaacgttaagtagttaatagtctaccttacgtgcgagcaacttatcttctgccctaccctcgatttgcgagtagtcattgattccgcctcgtgatcatcaaaagtgatcttatttcaagcaaacttaaatatatttttaatgaccttgtcacattgtatatatctttattgcttacatgagtagttatatctcatacccacgtgttaggtttaagtactctttcaagacactttgatgtctcgtnnnatactttcctttagcgcgagccgttagtgttcagctttatgcgtgagttatcagttatatctcatttataacttttaattttcctttctcatcagataggttttaaataaaaaattatagttgtttgatccctttctcgtcagaaaggtttgatcagggagttctaacgattcgacccctctctagtcaaaaagatttggccagggagttataatagtttgacccctcttttgtcaaaaaggtttgctcaaggaccttttgaaatacttcaaattttttatttttgaagtgaaagtgatgggtttgcattgtattatgtatttccagattaattacgtttgatcatacatatatgcccctcaagtaattttaaagcgtttacgttttataattacttgttgaaagaaatgattattttattcacaacttaagttcaaaatattacatcagcgatgcgatttataatcattaatctcataagagcttttccaatttaattgtttattttatcaatcttccagaagcatatggttttgatagaatgggttttgatgttcagggtcaatccccaacatattcccataattgtttcaatatttagtcaatccctgtcatatcctggggttctaggtgaattaatcatggttttagttgtttgtctttaattgcttttggttgacgaccaactttccacattgcaactttatacaacaaccatagtgagcaagtatttacttcgcaatacttttatgtaattgttttaccggattaactgccccttgtcttcttgtgatgcgttccttctcgagataaccgaggtatcccttcctcctacaaaggaaggttatgatccttggtcgcttaagttactgggcagatcgggctgatcatgagcattgtcctgcccctttacatattgttgaaagtgccctcgcgctatgaggccttctatctcatccttcaactgatgacactctttcgtggcatgtctaatatatccatggtattcacaccattttgttgggtgccttttacttctcgcgtgtctcataggttttggctcgctaaaaacgactctctgtacatgtgcgaggtagatattttcccgagtttcattaagctcggtatatcgaatgtaaagtggtatatatttgttgtgtttcttttgtttcttatccttggacaaccttttggaatcgtctttcctctttgatcctgaagcttccaactcggattctttaacaaaatcataccccgattgccctccgggttccctggcttgatgtcttctgagcttattctccaactggtctattcgcaaatggagtaaattcctttgctttggaccaagtcattgacaaagatcaggttttttcaagttcaagagttctcgtaggtcccaccagacgtgacaactattggatcttgttctacccatatactgcattatgcctttttgaacattgctacgacgagtgtcctctcctccttgcattgatcgattatgagatactgtacgcctcgcggtatccctcgccttatctctttctactcttcctcttaaggtttgattcacctcgttccccctatagggatttacgcgagctcctttcttatgaacttggagagaaggttggcgatcaacgactgacgttccacatgtcctaggttgtgtcctcagatttccctcagtttcctgaagttgcctcccttgagagttctgggaatatctttgggatgtctcctaccccttggttttcaagttacgaggtttgcctcgtggatctctgtctccaaggtcaagttgattttgggaactattctcctatgccgctctggctgcagctatttcacgctctaattcggcattatgctagtttgcttcctccaataagcgcctaagatggcggttttctaactcaacgattggtatgtacctggttgggttgtaggcaccatcctcatcaacctagttaggaagagaccggctgttgtttatgttggattttgtgccataaataaaacccatttcaatataatcagattcactaattaataaagatcagaaatcacattttatattgcatg

SEQ ID NO: 119713 - DNA, 1700 bp, Cannabis sativa
  modified_base (100)..(109): a, c, t, g, unknown or other
tccgctgccatcactgtaagttattcttaacttttatgtgtttagtttatcgttttagaagttcgtatttaggtttttaaatcaacatacttgtgagtannnnnnnnnncctggtaaaattaattccaacaggcgtctcttcagttcttggctaattaatgctctgattaattagtacctcgagacacgaatccctttcgcacacctttgacggttatcctcctgaggcacttgattgctttcaattcccaatatttattttttttttgggggaaatcgaagcgtttgaggttttgaattgattaccccttttcacaagttagcttataaataggcctgaaaattttcttaagttacttttaccattttcttcacgaaataacctcagagaaagaagaattttctttcttcaagtttgtcgtgttctagcaaaagtatctgaacagcttcatctggacaatgctaaggcttcaaacagtgagtaagttttttttatctttctctcctttgattttgtatcttcaattttctgggtttctattgtagaaaatatgattgttcttgacttatcgtatacaatatacatagaatctatgctcgaaactttgtgattttctctgtagtagatcatacgacttcgttgtttacgacattttggctttaatctcgcaatgttcaattttcacctttcccattcaaagtttcatgaaaatttacccttagccccaaaaatttcaaactcctgggttatgacttaacctttatgcgtttttatctttttaatctgtttagtagacctggtcggcatatttgcctatttttgttcgatatcccgacgaaatactcatctcgtgtattttcttctgtagatgaaccctggtgagttttggggaggcaaacatcgtatcgacgaggatctacttcagcttctgtacgaggatcaacctcgtcttcacgccagtccatcctcttcgagtgacggactttcgaacttgagtttcgaggattgggaagtgagtagtgatcgttctcctactacagaacccgaagtgcaccatcacttctactctgagcagatcataggtgaaggttacgaccaatttgtttgagagcttagaaagggttggagacgttatcttccatccaactggacttatattgtccgacctggtgttgctgatacccttcccgtaggccatccaagctctcataactttggcattccaatagttgtccctgttgtaactattgcacgacatacacaccagtacccgtttaggagagggatgatggcctgcacaaaacagacgatatctgtaactattgcacggcatacacaccagtacccgtctaggttaaggactaggcacaatgcgagtttttctagagggggatatctggattttgcccctagtaaccttttacttacgtagtagataggttgttggtgcttgccctcttctcgcactatagttggactaatcgcatcttttaagatggctaaatagagaaataacgtctctccagttattggttttgccaaaattggaggcattgcgaggtgcctttttatatcctgaaaggcctcttcgcactcttttgtccactcgaactttttgttgcctcgcaatatattgaagaacgacacacacttatcagttgacttcgaaatgaacttgttaagtgccgccattcttcct

SEQ ID NO: 119714 - DNA, 874 bp, Cannabis sativa
gtataaaaattaaaacacaaggggggggtaagtgtataaaaattaaaatataagggggttttgccgcaaattgctcaactataaaacatctttccctctactgtaactttgcgtttcacatgtggaggtcttccacctggggtgtgatgccagttatgaactcgggagcccgtgtgtgggattgggttaaattcttatggtgcctggaatctagaggagtggttgtcaaagagttgttcctgtatgcttcgatagtggtggacacaatctggaaaacccgcaacgacaaggttcataataattcttcttgtaacattaagcattgcattgactatatttctatgtgttacgcagattatggttcttgcctttttcctgcgccaatgacggttgactctcctatttggtctccccctagaaaattggtaaaaatcaattgtaatgttaaagttgtttgtgattcaatgtgtgtggtggctctggctagggactataaggagtcagtgttgtggatagctaccaatgtactcaacttctctaactcggttataagtcgcggcctatctgttagctatggaatcagcagtctactggaagcattcttatatgttgatcgagagtgattctgagtcagttatcaatacgctgaagggaacatgttctatttgcagtattcctatctatgtatttcattgtaaacaactctttaatttatttattagctataattttcgtttatttttatattatgtaattttgtaaacctataatataattaaatgggtgttcgctagtaataattccttctatacatataacattttgggtgagtctacaatgcactctcttaaaagggatgtactgatacatcctt

SEQ ID NO: 119715 - DNA, 2324 bp, Cannabis sativa
  modified_base (718)..(719): a, c, t, g, unknown or other
  modified_base (1851)..(1864): a, c, t, g, unknown or other
aaaaacctaccctaaacacaccccaatcttagtctaatctctacagccacagaaaagcaacaccctacctcaaaaccaactcaaaacttagagtatccaatcaaaaaggttgagaagttacctccaaactcttctacgctgacttggggcaagaaccaactggaaaagaagaagaaaatggctgaagaaaaccttctaggtggcttgttttaggttgcacgaacgggaagaagagaggaggttgaattttttttggtggtcacttagcttctaagtaatttatagtaaggttttttctttttttttttttgatagacaatcagccccctaaaataaaaatagaaagggacaaagcaagtttatttaaagaatgactaatttaccctcaaaagtaaattaaactttaaaataacctaggggtatttttgtaatttcactaatccaccaaaccgacattctaaaattctaaaatagtgtggaatatccccaaaataatccatccctttatgtcatgatatttctgaccacatcatccaatttccacagtcctcgggctcgaaaatatatttatttcaaaaatggtatccacgatatccacatatctcaatataaactccgttattaataaatgacgctctatataatcattttatagatttcactaattgatccaagtaatatcataatcttacgtcattaccaaaataattacatattnnataaaatatgtctaattaaatatcatattatttccgggatattacactaagaatcaaggtgttacattctcaacaataaaaaccatattgagacttaaatttttttcattcttcttagtattaagagactcaatttcgttaagaaaagaatactccatcatgagagaagaagagataaataaaattaagaaaaggtaagtagtaaattgaattatgaaatgaagagaaatagtttaagatatgaaaagtttatgatgtatatcattttttaaatatcttaatttaaaaaaaattgtgatgtagatcatcaatatgatacatcatcaattttttggtagagtttagagaggtaatcttttttaaaaaaaaatgataaatcatcaatttttagggtaattgtgtgatatttgagtgtagtttagagttatcattttctgaatatcagctttttgaaaaggttttttttttttaaaatgtgatatttgatatttaatttgagtttttttttttaaattacattaaagtgatcagttttgaatattattttttaaacgtgatatatagttttaaaataagatatttgatatttgggttgattttttttttcaaattaaattaaagagatcagtttttgaatattagttttctaaaaaaatatttttttaaacgtgatatatgcagtagaacctttatttaagaatatatttgggaccaaccaaattatattctaattgacaggttatatgtaaatagacttacagtagcaaaaaaaaaatcaaaacacaaaaaagatacaagtgttgacccccaaaaacgatcaattgacaattgggtcgtatagatctgatgcttgccacgtgttacacaaaccgaatgaaaaagcaataaacacaatgacctacttcccttttggttgtatttataccaagggaaatactatccagatcactataggtgggatctactatagcactcttaggataacacagtaggcagatctcaagtgttggaaagcctagggtgttagccagcctagggtacgcgtgtttgagcgatgaagagaatggagagagagagctttgatgggcgtgtacaagagagagagagagagagagaaatagagagagagagnnnnnnnnnnnnnnagagagagagagagagacttagagttatttggtggctaagtcacttaaaggcaacttaggttttcagccagaggttaaggcttttatataggaagccttaaaccctaggtttacaattcaaatcccttaaaaataaaattgttagttagatattcacaaaagacaaaaatgcccttaattttagatattcttcagccagtatgttgggcttttaaggcccaattcgcatcccatatcttgtgtccacgtgtagagttgtacatcgagtcttggcaggtcaatcttggccatccataggcctacagggaagtctggccagccatgatcctgccaggtcaatcttggcctaccatagtcttgctaggacctcgcaggacaaggcttgcaagacttggtaggtcactatagctccaccaagaggaggccaacctttgagtatggaggccagccttttgcaagt

SEQ ID NO: 119716 - DNA, 1639 bp, Cannabis sativa
  modified_base (44)..(70): a, c, t, g, unknown or other
tgcacccaatgtaaggtttaccaaactttatatgtgtttatttnnnnnnnnnnnnnnnnnnnnnnnnnnngtgttaatcaacatacttgtgaattgatctaagatcctggtaaaataatttccaacacttaatacttacgcacgctacagtaattttccatttactgtgcacaccttttctaatcaaaaggtttctaaaaaatcgtgtcaaatttaaacgttttaattaaactttaaaattttataaatatttgtatataaaaaaaaaattgggatcctgtctttaaaatttacaatcatattcaaaatacattttataaacatgtcacacagtgactacaaaataaaggcccaagtcgtcccgagaccgaactcttcaagtctaaccatcctgatatgtacaatcacccctaagctctaaactcactagtactcaaccttagtctttccttgacctacacatacaaacaatatctgtgagtcgacatactcagtaagaaaagcaaaaacatataatataatatcaacttgtatttaggcgcgtactcagatgcatcaaaacattcttaacagaagtacaatctctataccacatgcattaagtactcgtcccatactagtgttagaagggatgaaccgtaccccaattaccactgagtgttgtactacatgcactacgtactcgtattatactagtgttagtaacactagatcgttctctttaaacatcatatattgtactaatacactctataccgctactgtactaacacttgtagtatacgaatcccatacacaacatgcaatttatatacatacacatatacatatacatatcttatgctagtcttaccttgtttcttaattcaagtgtgacagtcaacttgaatggaaatccacgcgctgaatggaggccctatgtcacaatcacgtaaatcgggtaaacaacatgcgaaaaccttctcggggacataaactcaaaactagaagtttctccatcgatgaatagcatgacaataccctaaatatcgaggaaatataagaaaaaaaatattgcaggaaaactgcctaaaaaatggcaagctatttttttgggttcttgccagtaaaaatggtagaccatttccacaaaaacatcctaccgttttttgctgcaaaagataaagagtctccaaatcaactcaaaacgatcccaaacttcaaactaagttccagatcacctaaatatacctcaataagcaagttccaagtaatagaaacaaaaataatacgacaaaacaaaatctaccatcgttgaaccaagtttgagttttttaaacttgctcaactccacacacaaccaacaaaaacaacccaattaagctttagataattaataataacccaaaaatcaaactccaaagaccactacttcggacagaaccaaaatcaaaaccttgcatgctaagacccaaactaacaacttcaaaaccttaaaaacaagggttttagggcttaccttaattttagcttctaattcccttgaattcttgctaaaaactactagaaattgaagaagaaagtgctggctctcttggttcttctagggccaatggctaagagaaagaaaggcaagggattaacttttatttttctaatg

SEQ ID NO: 119717 - DNA, 1612 bp, Cannabis sativa
ggtgggccttatggcgggccttatggtgggccccaccgctactcgccttattacccatactacccttcaccctactatggatcttacaatagaccatcctcactctccaattccactatggaatcctatcataggcctaatccctactcatggtacagtaggtcatcattcgggcccgaatttggcagcggtgaaagaggcagcggcataggcgcgtggtcaaggcagccctcgacgttcaaccccggacaatgctcatcaattgatcagagattcctttctagtggaagcctcagtggtggtggtgctccgaacacctttcatgttacgagaactgtcctcgataccgataccgaggctgatggcggggtcaatttcgtcacccgaaaggtgtttgtgaagactaataataataataataattctggagggattgatttatctcttaaactttgattattattatcattattattaattatggttttctattgtgttttttgtttaattaagttgtgtggaacataaaattagtttacttaattattaattaatcaaatcaatatcctgaaacatagaagttgaaggaagagtcttctgtaagagtctgttgtttgttgttgttgttgttgttgttgttgttatgaactttgtttgtaatgacttgtgttaatcctatctttaatgtaatacaagtgtttgtgttttaattttatatattctccaaatatataatttctccataatcattctagttaatttttataatattagacaatttttttaattaattagtttcatacaaatacacatatttgactaattaaatatatatacaactgtgagtgcatatgtctttattacaattaataaaaacgcataacacaataaatgaattacaatgtatacagcttaattattatcatatattttgaattttaatggtaacatttagccaaattttataatgtttttttcccctttttttaaacaaaaatctttgtatatatacacaattattttcttgttttaaatataaccgtttcttataagagagctatcatttttttaaagaaaaatgaatattttcattgaaagacacaaagctaagatgatccaaagatcaatacacaaaataattaactagggcaaatcggaaggaaaatccggccaccaaactttagcggaatctaaagatatgacaatttagctaacgaatgcaagagcattattagttcgtttacaatgataaatgagagaaaaagactaacatgtaaaatatcataaagaaaaacacaatattcattgcaaaccttcatcttcgaggaaaagagaattcactaaacgaaggcaatcccaaaaaatacctccgccacatgaggctcacacacaacggtggaagaagaagcagctaatcatataatatctttatttggccgagacacacattataaaaaaaatttacttttagtcataacaaaatttgaaactaaaagtaaaaaaatcgtgactaattataaattaccgtttttatgttgtgactaaaaggtttgtggctaaatgtattcgtcacaaaaattataatttattgtaactaaatgtatttttagtc

SEQ ID NO: 119718 - DNA, 1045 bp, Cannabis sativa
tttgattggttagataatgccatatttagtggcatttactttttataccatatttatcataaccttaataatttttctcatatttttgaaaatagccctaattattaagaacgtaattattttttaaagttaagtgatgtaattaaaatggtaataattgcacattagagtaactacattttattttaaaatatattttttattttcatgtttgacaaataagttagtaattatatagtttaataacattaattatctaaaattataatatattgtaattacaccaaattcttacgagagactatgaaaattggagagtgtaattgagactctttaattacctctaattacatgattattatgatattatctagttgaacaaatacgtcaaacttttttaattactctgaattacaataatttcaatttcaaaatggctttccatacataccctaaattcaaatgtgtaaatcttgaaattatcaaaaatatccaagccaacaaaatgtatatatattttcatgaaaaaaaattatttttaaggtttcgttgagttaggaatcgagccccgtcaaaccaaaattttacttttgttttttatacaaatgcaaatgattattttgaattttatttttatacggtaaattattttaaaaaaaattcttaaaataataatacttttattatagctcataaaaaaaatggattataagtttttgcatgaaaataataatactcgagtgatgttcttaatgaaagcaccaaaatattaacattaaaaagcgatcaactatgtaccgtctgataagcggtagcaaccaacgaatgtatgaacataaaataaaaaagagaacaccacaattatagtaatttacttttcttgacgcgaaggtaatgaagctacgtctacttagagcttttattatcacaaaagtcaattgccttatgagaaaacttaggaaaaaatgactaagtctagcttcacttcacaatttctaaagagagaaagtgtgaagagagagaagctctgaccttgtagagagaa

SEQ ID NO: 119719 - DNA, 1765 bp, Cannabis sativa
tgactgaaattaattagatcggatggtaaaatctaacatccaatatataattggatcgaatctagataggtctaaaaatattggatatggtccaataaacaccctaaatagcttgacggatttttcatagaatatttgtgaattttgatatgtactaaatacaaatcttgatttgtactaaattatgttctttgaactttaatatgtattaaattgtgtttccaaaactttcgtccgcaataagtttctgtttataaaattggatagaagtccttaaatttaacaatctcaataatttagataaatttttaataacatgtacaatttagaaggtataatttaatacatgggaaaagattagcctaaaatttattcaatggtggcccttaaatcatattttagtttattttaatcaaaggcatttttgttaatgtaatgaggtgaagtacacttattgtggttgtttattaaaagtgtatataaaagtgaataaacttcattaagtttattttgggtttatctacaattattgtaatgtatatttttagtttacttttgatatattggtggagtgataattttttctaggttattttatagtttattttaaattgacgcaatgtatttttatttttatttttttgaaaaacgtgatcagaattacattaggacattctcgagaagacttcaacaatcggtgatgggacctcctcaaaccatcataactcattgtctagcctaagggcatgtttagccaatccatgggccgcagtattatctttgcgagacacatgagacaaaactgccctcgaaaatttagacaacaaagttatgacatcctctaacaacacacacactcattagcaaaaaccttcctgttattgatggccatagctacggagagagaatcagatttaaccgcttctaggagagtctcacacgaatgagcccaatttcgtccagtcagcagggcaaaagtttcagcttgaaaaacagtaatactacctgtaaagactcaaacaacagacaaacaaaataacattattacagacaggaaaacctactattcacaaattagagaaaagtagtaacaatacaaaaacactcaaataaaaacccctctaacaccgatctaaaattacagtaaaacaataaaagaaaaacaaaactaaacaccccctactaaccaaagtcctacactttggttagtaacttacaaagttataattcgtgtacaaactgagcaaggagcacacataatccatgctcctctacttagaatcctttggtcagtactaatccttagtgcagtataattaaattgtcaaaattctcaaactttaagaattgctattgttcactatatgaaataaaaccttaaaattaatttacaatactaacctcgtaatagtttgcttagtacagccaatactgtatgatttgttgacataataatggcagctgcatctaccagcaaagtggatccattgattgtgaaaggatccctttgagaagcagagtagttagaaaccccctcctcactcatagccaaacttttctttactagctccttcgttaaatcaacagagtcacaaaaacttgagatccaaccaattatttacttaggcttttttttgacattaaattaatttgcattttgcagtagaattaatgttttattattttaagtaaaaaaaaaaattattaagaatcttaaaactataaaaataacattaaaaatgtatatttattaaaaaaaaaaaaa

SEQ ID NO: 119720 - DNA, 4755 bp, Cannabis sativa
  modified_base (4587)..(4603): a, c, t, g, unknown or other
gtaatgggttttatttagggcacaaaacccaacaatgactgcatgactaaaaatatggattagtaggccaattaggattaattatttttattttatagttatatacaaaaacttttattgtgggtcccatttttaaaaagatgggcattagtgttataatttcttgatttcgaaaattttattaaactccaagtgttttatttatgtcatatgtaaaatttataatttttatgatttgtgctcggtaacgatggaaaaagtgatggatggccattaagtaacatgagtaagtttagaacctaattctttgtggggcaaacataagtgataattgaaatatcagaattaggcgaggttattgtagtggaacattttacccctaagctatttaattagttaagcttaaccaaaatggtaagttagtcatttatgcttggttattaagtggattaaccctttgtttgatacaactgaccaatttttaagtagagataaacttcgaatttatctcttaggttaaggaaaataattaagatatacttagaaagaaaagacaaaagacaaaacaaacctattgaacctctctctccctttttcggctgaagcaaaaccaggaggaaccaactgctaacttcttcttttgagaatatagaaaggattataggtggtttttgtggagggaagccctaaaaattattactctttaagtttttaagcttttacttggataatattattcaatttctagcttgaggtactgtttgagttgggtttggtttcagttcaatatctggtttatatttaagttgaattaggttcggttgtgcttgtttgttggtttgaggagtggttgagcaagtttgagtttgaaaactcaaacttgactcaacaatggaactttgagtttttgtgttttttttcttactgttgttgcttgggaattgttcttggatgatattacaggcgttcttgaaggtttggttgaatttaggggaaaattggttgagttttaaagtttttagagttatctgctatgaactgattaactggttctacagattaaacgcttctgttggtactgtagaaccagttaaccgtttcactaggcaggaccctaggaactggttatccatttggtaaatttggtttatcggtttggttagtttttaaagccttagtttcaatttttcctagatatttagggtatttctatgctatttatcgataaggaaacttttagtattgagtttaggtccccaaaaaggattttagcaagttatttacccttttatatcaatgtgacatagggcatccattcagcgcataattttctattcagatcgaccgacacacttaaatttgggaacgaagtaagactagcataaaatatatatatgtatatatgtatgtatgtaaattgaatgctgtgttggtgattcatatactaccaacactagtacggtagcgctagtgggggcattggtacaatatattatgttcaaagggtacgatctagtgttaccaacactactatggttaagtacatagtgcatgtggtacaacactctggggtacttggggacggttcagccctaccaacactagcatgttagcggtactttgtgcaagtgatacagaggtcgtacttttataagaacgttcttgatcatctagcaagccttgtagataggtgtatgggcgcctaaatacaaatcggtaatatattgtatgtatttgcttttctaactgagtttgttgactcacagatattgtttttatgtgtaggtaaagagaaggacaaagctgaatataagtgagtccaaagcttcgggatgattgtacatatcaagatggtacgacctggaaagttcggtctcaggacgacttgggcttcattttgtagtcgttgtgcgacatatctgtaaaaaatattttgaatatggatgtaaagttttaaaaatgggatctcgactttatgtatgaatatatgtatatattgatgaaagtttaaagttaaatcaaaattttagttcatgatgatttttaagaaaaccctttggttagcgaaggagtgcactgtaattagaaaatcattgtagcgggcctaatcattaaggcattacaattttggtattagagctaccatgttatctactgaagaccgtcaagacatgtaaaattattgtcagagataagctcgactcgcggtttagtaagcctttacttgtttagtaagttctgtgattagaaaagccttttaggaagcataatagttttatgattctttattttgaatgcattgatttaaaatccatatgtacggtacataaagcatatgctatcgttgtttgacctacctgacttatgggttcacaggctaagtcctataatatgaatgactagtgaaatacaaggtgtcagggtaacatggttaagatcggaggtggtcgaggaggttaaaatcccccaaatccccgtggatgcggtagaggtcatggaagatttcaaaggggtggtcaagaaaatccaccaccagctcctcaggattgggagcaaaggtttgtagaaatgctaccctaaatctaccaataagatgaagaaattcataggctaaaaacatagggtccccctgcagtgcctccagtgtaaataccggctattttggttctagcagtgccagtagaataatctgttgctgacaaccgtatggagccttttgtatgaaggatactgtaagcaggcgccttcaaatttttggaggtttggacgtcatgaagtttgagtagtggcttactgtaacagaaagaatatttaatttcatgggtatcatcgggaatgaccgagtgacttatgccaccttctagttttaggaggacgctcttgtgtggtgggagttggtatttctcacccgagaagtaactactctaacttgggaagagtatcgagaattattcaatgccaaatattacaatgaggcagtccatagtgctaagcgaaaagagttcactaacttagtttagggagaaagtatgtcagtaacagaatatacaataaaattcgatcgattagctaagttggctttaattatagtacccacagactttagtaagaaagaaaaatacttagcaaatttaaatgccaagatgaaacatgatctagtgatgactacaagtgatacaacaacatatgcttagatggttgagaaggctctccgagcagagggtgcaatgagatttcttctggagttccgagagactccatgtgttggtgggaccaccactcatcctacttctggatatggtaaggatggtggtgattctaatatggatcaaaagaggaagactttgctgacattaggtggttcgggtcaaacaaaaagcaattgagggaaccaagatagaggtgggcagggttattcttatcctgagtgccctcactttgagaaacatcatcctagagaatgcaattggaaggcatcctttcagtgtggcatggatggatattttaagaaagactgccctcagatgaaaaaggaagagtagaagcaagaggcgaagcccgtacctactcaactgtttgccattactcaagttgatgttgtaattagtccttttgtggcaacaggtcagatttttgtcaacgactcctattttgcagtactatttaactctagagctacacattcattcatatgtggcatcgagaacaattaataaattgggtaggccatgtgattctattgagataggatttggaaccctactacctagcagagaattagttatctccaaaaggttgattaggtctatggcagttagaaatgaaaatagggagataagtgtttacttagtggagttgaaattaacagattttgacattatacttgggatggatttcttgtccatgtattcagctagtattgactacaaatgaaagatggtaacttttcaaccaaacggtgacgacccatttatttatgttggagctgttctaggttcctggattctgatcattttagttttaaaggctaaggatttattgcaaagtggatgtgtaaaatttttagtggttgtgattgactccagcagacctaagacatttaggcctaaggatgtcagagttgtaagacaagttctagatgtatttcccaaggagttaccaagattgctgccacaactagagatagatttcataattgatttggcacctcgggcagaacctgtttctaaggcatcgcataggatggctccagtcgaacttaaggagttaaaaatataacttcaagggatgctggagttgggttttgtgccctaaataaaactcattttaatataattagatttactaataaataaaagattagaaatcaatttatgatgcatggttcacgtgatttatttcatgattatatgtttaatgagtaaattctatttagtccagaacatatagttattcatgattatagtgttatcagcacagtggaatataatcaagattatatgttcaaaaagtttaagtcccatgatttttcagtccactagatttagactgacatgataatcagtgataaggtatacttacaccttnnnnnnnnnnnnnnnnntttccagggcattggcaaagtatgcatgtatcggatgtatggagtatacatagattggaccgatatattgtataagatatcataaacttagcgttatttctttctaagtcaatatcattggttgatcttaggtcaatagatcataatcttga

SEQ ID NO: 119721 - DNA, 653 bp, Cannabis sativa
gaaaggacttgaaaatcagtaaaaacactagccccaggtgcttagagtttagtataggcaactatgtctaaaatagaccagacccgacttggggacattctattattgatcattataagaagctatatttgccttttgaaatttaaaatacaaatttattttttttaactttttctcaaaagaagaatacagtagtactatgccatttgcgcccaattctaaaggtagctcaaatgatgaaaacattcattaattcctttcactaaaattctttagtacaaaaaactataatatatatacatatgtattatgtatgtatattaaatttatactaatctctgataactagcttattgccataaaaaatagtacttggaatcataatataatttatgattacgaatatgtcatttttacgtatgttattcccaaaaattattgttaaacaataattaattttgtgctcttgtttttctttttctcttgtattctagtatatatacaaatgttaatggttggggcaagggattggagtggtgccatctttgcatagccccctaactttttagtttataatttttttgagagaaattgataaaatttattgttaaaatatataaatagggatatgattttgtcccgtgatgtacttt

SEQ ID NO: 119722 - DNA, 963 bp, Cannabis sativa
tagaatggtttctattttagaagagctgacaactctattcaataaatgatgcttattttgatcaataaatgacaactctcgcctaccccaccgctaatgctctttgtcagtttcgtgtttcaagacagacaaagagcattagcgacgggttcaatttcggttcaaggaaccccaacccaatccccctccaggaacatgcccaacacgtgttgggctcccatttcatgtacaacaagtgggccccacgtgagacagatgcccttgtcccctctcttccggtgcatgtgcatgcgggctccatagctcgtctaggccatgcatgtgtctcacctcctaggtgcgaaagtggggcttctcccctctgtgtcccatcagcttttaacaaaagtctttctatttttctacaatgccaagtgtctttaaattcaaaaatgctcacttttgcattcacctagcgagtgccacgtgtcactccagtgtcaacttaagtgtaattgtattttaaccccatgtaatttgtaataatttattttcaaattagtcacttaccttcctataaataaaatcttaggttttcagaatctaatatgttttctaatagagaaattcaaagaaaatactatgctactagccttagtttataatttttcttaagtaattttgttatggatttttaagtttccttattattatctatgtttctaaataggtgacatgtgagaaggaaaagataatctcataatctcactaattaaaacccctcaacaaggcttagtcacgaagaagtttcacgaaactgggaacaagtcaagattgagagataggcagaagtctcccctcaaacttatcttagctacccagacacagaagacatattatcactctgggatctggatgttgggttttatgccctatataaaactctattacaatataatctctattattcaatatcaataaaga

SEQ ID NO: 119723 - DNA, 2556 bp, Cannabis sativa
caaagaaatagaaataatagaaataattcagaagttctacctattctacctagagatcctagagatcctcaagaagaacagagacatacaatacttatggttgatgcagtagtattgaataattcaagttaagtaggcttaggggctattatcttttcagaagataaaagggtgagggcagcagtttgcaagcctctcaaaggttagacagttctttaactttaaggaaattttttcgatttgtataagcctttaaattttatagcataatgctttgaacagatttcaacacgataaacatggggcagttttatgtttgaacagtattaggtctggttttacatgtttcagatgacgtagggactattatattttaattgctaaaagggtgaggtctgacataacaagtttttaaaatatgctctagctaagtgattgagtagtacttggtggtgtttatataatgtggataggcgtttttagatagattagttagccataggtagtttagtttttgagcgcatttgtatcaggctagaatggatcaagctttatatgtttttgccccttttgagaaaaatgtttgtattgtgttttatggagttctttcactagccaaagggttatccctttggctagttttttcctttatcttttctttgcaatgttggttttatcgtttatttgggttgtgtttctcgtggtagtttctgctatagtttatactaatagcttatcattgtggtattttctagtttgttatgctttcaggtagtatctctatattacaagcggagaccttggccttcttggttggacttaattgggctctttcatgcggaatttaaattaaagaggttttttccgattctttgtctctagtcacagctataaacaaaggaagggtctttttcaacgagctgggtgtgctacttgaggatgtcatagctttattgtctaaacttctgagagcagttttgtcccatgtggctcgggatgcgaattctgcagcaaatggtttggcaaaacatgctcttcggttagacaatgagctatcctggttcgaggaggtgccgtcgccgattgtggattactgctttgttaatcatgtgtgattttgatcaccgcatcaaaaaaaatgtatcaaaaaataaactaaatataagtaattatatctacaaagcaacacacatacaacaataataacaaagttataagataaattaaacatatacaccatatcaaatgcacataaaaatatatagaaaaaaaaaaaaaaccaactgaaaaataacgtacaactaaaaagtgttttgaaaatcactttaaacaactacaacaagaaatgcacgtatatacaatagaaaaaaatgatataagcaataaactaaaaatatgcaccatacaaatgcacacaaattaaaaaataactaaaaaataaatatccaacaaaaaaaaatacatcaaaccactacaaaacaacaaaacatcaacccaatgcacatatacacaacaaaaaaattatcagcaataaattaaaaatatacatcataacaaatacaaatgaatttaaaaaataattgtacaataaaaaacatataaaaactactacaaagcatcaaccctattgcaatatgcaaatcttttatagattaattttgaataaacaaaaaaaatattacttttattaatcatgtaagagaaaaaaagatttacgaagagtgctcctaattttttttattttttttttttgtgtgtaaaagagaaagaatgttaaaactaaaatatcaccacaagaaaatagagttttgccagggagattttgcgtcggcaaaaggtaacttgaattactggtaaactttgtcgacgaggtactccgccagcaatagttgacagcaataaatggtcgggaaaagggtttatgccagcgaataaagttagtttgctagtaaaagtcacttgtgtcagcgagtgaagtcgccaccgtaaaagtggtcatcggcattggcgcaacaactaaacaaatttgaagatgttttcctggtgagttaagtcattggcaaaaaatttcccgtcaattttctacttcgcgtgaaagttttgtcagcgcatgtaactgttagaaacttattttattaagatctagatttactaacatgtatgttgattataattctataatctaacatcttaaatttgaaatttctaaaaatgataaataaacacataagggattaagaaattcttacagtgatagtagaggaataatatgactccttctattcacatctctagcccttaattcatgtctgtagcagagtattatcaagatctaaacctaaatcttctcctgctgacaaagtgaactacatagtcttcctcaccatactgagtatttctttgatatgtatgggtaagttctcaacaccaaggagcacaaaattttatgaaaaaatcacaagagaattttgaaaatatattgaaaataagaaaaccttctgttgaccgaggttttcggcaactaataaaatattataagtttatagagctgtaaga

SEQ ID NO: 119724 - DNA, 709 bp, Cannabis sativa
aaaaaaaaaaaaaaactaatttcgggaagtaaaaatataaatgataaaattttgcgtgtgtaaaaatgtatgattggccattatataaaactttatcgtaaaaatatattggataatattctctaaaaaaaaaagctatatatatgaaaatatttgagaaagagaaaatgttagacaagttactaagatttaggctttacaaaagaatcaagttgaattttgaggactatataatacttttttttgactctttttgtaatttttttcactgatcactatatgatgaatatatatatatatatatatatatatatttatatcagttgtacaccagcctttgtcggatttaacattattattattattattattattaattttggagaaatagtatataactttttcaataataaaggcaaaattaattaaaatgttcatcttttgtactccaagaattcaagccatattatgtattaaatgatgtttcaataatttgtacatttatatgtatatatatgaatgatatatatatacatatatatatatttagggatacgattttgtctcgtgatgtactttcacggaatatattatgtgatacattagatgggtcttggggtacattaaatgagtgttagggtacgtttctactttttaaccctaattacccttagatcaatctcaaccgtcagatcaaataagtccctca

SEQ ID NO: 119725 - DNA, 1635 bp, Cannabis sativa
  modified_base (130)..(131): a, c, t, g, unknown or other
tttgcttttgggcttagatgcatataacaagcccatatatttctagatatttaaatgcactaggttgctaaaataaaatattacccatatgatagttttatctaggctcaattagtattgggcttattcnntgaataacaattatttaatttaaggtcaaattcctcttctttgggttttgtgtgagagtgataggggccattagtagtgggtacgacatactggatcaaccctccctcacatgaacaaccccaactgtgaaggcccatttcccttatttaaataatttaagttgttctaaaataaaatttccaacttaaatataatttcctatatgtgccagaaaaaattgcatttcttgattcataatatgttcttagtattgatgctgagaaagtatacttaggatccatcgcatttcattgagtgtgatgctattcttcttcaagaagatgtgatcaatgaagaataacttgttcaaatcattgcaaagagaatcaaaggttttaagaaacaaagaatatggtagtcaatgtattatggctgaatcatagaggagatgagactactcaagaaatagggagtcaaggatgcatgagaagtatcctcacttattcttttttgacttgaggttatacttttaaaattttagaggagcggagaatgtgagaaccattcaaagacagtaagaaaagtataatatatattatatatatggtgtgggactcacaaagattaataaatatttaattttattttctttatttctttctttctctttcccgacactccttctctacttcttttccttctttctcttttccttgtctcagacatcgcacaaccaaatcattatggccaagcttagatccactcattccatgcttacatattataaatgcaccatatatgcatgagcactaaacggtggagatctcacacctcatgtttggtggcaatcagagctaaaatgcaatcataagagaggtgtgaagttttgaggaaaaactttgagacattacaaccaactctgatgaccatttgacaaatggttgttactgttggactcagcgctgcgagaagaacatggccaactaagtcattttaatcaacttgttacttttcccaacaagattttaggtatctttgcccctttacaatcatttttcatcaaaaccagtgcttgtttgggaagaagaattgaacattcatgatctaatcatcaaaatatttgtttttatatatgctatgtaaatattcgtcattgttcccggaaaccagttatcggctaacagaaacaggcacagtgtgtagatgaggacaaaggtacttttgtagttgctaagctatttggagcttaagaatcaagggcttaaaagcatctcttttggagaaagtttgaagatcctaagacggtaaggactcaattagattattggaattgttttaataggtgtttttttttttgaagaaaagcgtacatgcattagaataaaaatagtcagacctcgtggtcattacagaatatagtttcaggcatagaggatagaggcaaagagccgaacctctgatgggaaaacgcccacttggccacattatgggccataaaattacatcgtctactaacagattcaa

SEQ ID NO: 119726 - DNA, 1667 bp, Cannabis sativa
taataataataataataatgcttctcttctagctagctgtatagtctctcactcctctcctcaggtcattattttgtcctatatatatatatctaatactatatataatatatagctttaggtacatgtatataggtcttttgttacgtaggagtactatatatataatctctctttcttttcaaagttgaaactaggggatcatgctaatccaaagcttggtgaactgattttaataactgtcggattaatgattgattaatcgaatggttattattattaattattaaaatttaagtatatatatagatataataagccctaaatgtataaattaaatactattaatttaataaataaatatatacatttcaatttttagtaaaagaaacaaaatcttagttcatatgcccattaattcctcaataccttatctttttattaaacatgaaactatctaatctccaattttatgatatttttgtttgattaataatatgtatgattaatgttcatatatatatatatatatatttatatgcatgatccaacaattttctttaaaaaaattatctaatttcattatgaatgaatataacaaacaaacaactcacataaataaaaagactgatattaacaacaaaaggaaaatgtataggttgtggagggcctacatatatggagggcctacatatatatatatatatatttatatattaatttttctagttataattttgtaattaattttatttttcattaaaattttataagaaaaagtagttcaaaacatacaagacattatatgtttggttgtataatttcatgtcttcttatttaattactagataaatctagagaagtaataatgacaatttatatatgtatttatcgatgttatttaaacccaggccgatcttcagcataaggagattagatctgtgcttagggtttacactttttgaggatttaattttattttaggtaaaattaaatgtattgtaaacaataaatattcataattaattagttatggtgtatgatatattacataatggtatgagttcgacttctatatattatagacattgtcctatatagaataaatatggtaaaatattgaactatatataaaagcatgacttatacttattattaattaattttgagatggaatctcataattctcaacactataatcttaagcacgtatagttcaaaacccacatctatctattatactactcaacaataaaactcaaaagaaaagacttttaattagaaaaagaaaaaaaaaagtgttcataatggaaaagagtacacaattcaataataagatgaagccaagaattagaacaaagtttaacttggccaccactggtcccaacaactatatgaacctcttcaacctttagggcaacacgtttacattacaaggtcacttcatgcattttatatatactcataagtattatttatttatttattatgtaatatatataattttttatttaattttttgagtggggatcaactccttgagccccatagtgggaagtaaaagtggtccatatatataattataattatttaattaaatttaaatgtttttcttgttctctaccatcatctacaagagaagatcattaataaataaataaataaaa

SEQ ID NO: 119727 - DNA, 2363 bp, Cannabis sativa
  modified_base (31)..(36): a, c, t, g, unknown or other
gtcgttggatcaaaatttaatagtttaatannnnnnaaattaatatttatagttaaattgtttactaacaatataggtaatactcattaaaaagtattctatatatatatatatatattatttgatctcacttttccacaaaaccaaatactagtaagtttaaatgtacttgaaatgtgcttatttaaaatcttatatatggtcaccactaaaaccttatggcataataaatcatattactttattttgaaacatagatcaccatgagaacttccaacccccttataatgtttgaaagaaaagaaaaaagaactagaaatccgataatgcaaataaaccaaaactaagactacaaatgaagaaaatattacttttagggcatcatgtggtggttatattatataagtattagaacttattatactcatttatatatatgcatgcttgcatgcataatttactgtccagcagcaaaagcctcaacggggaaggttttggtgatcccagcaaagctcttaaagtgaattttgcccgtggcgggatcatcgacgacgatctcactaaccggtggccataacatgagctctttcgccttaacacccttgagcttcttgatattctttggtccaacaaagccattgatatcagtgtcatagctcacaagtttgctaatgattttgaagttgtgctctactttcttcatctgttgaatccacatgtagccagtgcttctcacaaaccccacttcaattacatcagcaagaggtaaaagccccattggtaacccaaactcttccaatagagaaactgccaatttcaacccttcttcatgacctttcttcactactcctccttgtttcgggtctgccatgatgatcacactaagattttcttgaaattttggttctgctttaataaattacaagtgataatatgttctttgttactaattagaatgtgctatttattgatacccccattatttaaaagagacaactaaagtggagaaaccaacggaatttaacattgaaataatcaccatttttttttcattgtaattgtgttttagtccggtcttacttagtacttacctttatttcattgtctgaatgtatttgtccgttaattttttttaatttgttcagggtatgataaataaatcataaaactatttaattttttctataataaaactttatttcaaaattgtttcacattatagtcttgatgataagtaatttttgtcaaaaatatccaatacaaaattcttgttttaatttatttatgaaaagtttaaatttttttaaaaataatatatcaaaatatgtcatcggatactttcgcaaactacttttttttagtttccactaaattagatagaggctgtagaaattaatatggaatttttttttaattttaggctttgaatttttttatttacataaatacctcttttgatcatttttttaattattttatagtttatttatagttatcatgaattatttttggttgttttttaattgttttcttactttttactaagaaaagtgtacttttgaaattttaaaaccttacaattgtatttttgtaaataaaaaatttaagatataaaattataaataatatatataaaaaaaaatagttttaaaaatttctttttataaaaaactgacttcattaaaatcacaagagtaatttcagagagaaaaacttcaagaagaaaaaaagtatcaaaatatatcattagtcaattttattgttagtctattttgtggcacaaatataatcagagtaggtaggtcaccatacataatgatcatgatagctaattttgccaatgagtaagcacattatataaatgaattattacatcaaaaaatataaattaacactttatttataaaaatacctccataaggtaaagacaacatttataccttttatgtgattttaattactaaaataccacttacacaatcagacgatggttgtagggtgcttgctacgtggttgcgcggtggttgcatcagacgaaggctccaatcagacgatggttgtagggtggttgctaggtagttggctgaaggttgcatcagacgtaggtttcaatcagacaaaagtttctgggtggttgctaggtggttggccgaaggttgcatcagacgaaggtttcaataaaaaaaaataactgttagcaaaatgttcatgcaactgcaatgcatgcaactgcaatgcaactgttgtgaaacattaaaaatcagaatagtacgtaactttatcaacatgtctctttatgatttaatatgaacaaatttaacattagaaattcgaaaaataacaaaaatataccaggataaata

SEQ ID NO: 119728 - DNA, 535 bp, Cannabis sativa
gtctaggttttggttagggtcctcgttcggcattaggtttgggtcaagttctagttccaggtcttggtcgtagtcctagccctggtatggttccagttttagttttgggtcctaggtctatgtttaggtccgagtctgactccgagtcaaggtcgagtctgtttctaagctcgagtttgggtccaggcccgagaccgtgtttgggtcttgttcctgagtctgggtccaggtgtgcatcccagtcctggtccgagtttaggattgagttcaggtttaggtctaggtctaggtctaggttagaatcttggtcccagtctagctccaagcctgggtcaaggtccgggtccagtttcgagtccgtgtccatgtccgggttccagtcccgatctgggtcttggtctaggtctgggtttgggtcctggtctaggtccttgtccctttttgggtactaggccgagtttgtgtcttggtttgggttcttatttcaggtccgagtttagggattatggattacagattagggtttagggttttg

SEQ ID NO: 119729 - DNA, 2645 bp, Cannabis sativa
  modified_base (571)..(571): a, c, t, g, unknown or other
  modified_base (1096)..(1097): a, c, t, g, unknown or other
agttttatttagagcacaaagcccaacaaaaagttgattggatcatcgtctatcattccattatttccttatatcctttctctcatggatttctttaattacattgatctttgaggttgttgagtttaattatttgaaatatttaccgtatattgaatgggaagttatttgatattgtctgatcaaggttttggattcaattattgatcaatgaaagtcatggaaacctaaacaccgtcaaaagtgatagttagaattgagtttaatgtcaattcttcctcaagaacaatatctataataatcttatttctcccctagactcaacatcctcaaaataataataaacttttcttgtttcaaacttgaaccttataatgtaggatcacaaaatttgtagctctttaattactatagtttacagtaaagtatagttccttactatttggagtccatattcattttatgaggcttataagacctcatcttagtcgaacatccacaaatagaatatatctatatgttagactattagtttaatcacaacctacaaccttagtttataaagagtttnaacttatactttacttgatacacagttcaggatttatgttgcagtcttaagtgtttctctccaaaataagtttcatgaagaagaatgactaatcacacttctagctatttccttagataaatgtcaattacatctctcaaatacccttcatgttaggtttgcctaacaatttgtattagaagacgaaattacatttctttagtagttgtgaaaaataatcttagacgttactcacttgatttgtcatacctctcatggtagtattaaccaccacagttagtttcaacaactttaattttcttgcctagttgattttccaactatgatttttaaaatttaaaagaaacaacgtctattaatgcccttatgaacaaaataagtttcattagtttgaagataagatactattattgatcattccatgaaaccatgagaaaagatccaccaaaatataacataagttcttagacaatgaaattttattctgtcacttgatttctttatgtttgtttgttacccctttannaaatctaaaatttattaaatcaaggggtcaaaaattctatcaaaaataagtcttttttattttcctttcggagatataacctacttatactaaagtataataggattctcatgatttaatttatgttttgtaccacaagagaaattataaggtttctttatatgaggttataaattttaataaatttataaactaaagaactagtagaaccaatattgaaaaagactttgaaattctaaatgaacaagaatgatctaatttattcaaaatagaattcgaaaaaaaaaaaaatcatctaggtgataatactgtataagtcttttccaaaaccaaaaaataactagtctttaactatagtttgaatatttgtataacctcaactgtagttgttttcttgttgtctcgaaagatgaaattttcattatcacttggcttttagtttcatagattaccttccatagttatacttacatatgcaataccacaaaattttgtttactaagtatatgggtacaataaattaaaacatttacaaaataaaccagaaactcattttccttagatatgcataatgtcatacttagaaaactttagcattctcttaagtagtgttccgcaacatcctgagttttatctttatcgttatcctttatttaaataaggtagctaaagaagcatgcttgcctcttttctttagttaaaattttatccatttagcatgagaattaactttatgttggtagatataaatgaaaacattaacttaaaaagagaacaaaataaatatattgttcacaaaaggatccatataatacaataagttcaaataatggcaaattccatctaaaaatactaagcacactgttaatatcaagtctttggatagtaatattaactgtaaagtggtactcttgttgtagcaatcaaatattgacaataaatcctgtcaaacaatttgtcaatctttggattgtacctatttttcacctgaaaactttataattgtcacacacttatcaccacaggtatgtgtgcactgaaaataagtaaaactttcctttgggctgatcaatacttacatgaaaaatacatacacaaacctctaacattccttatgagcaatttacgtaaaaaaagttactttagcgacatcttgtttcaacaactcatttagaatgaaagacaaactttatgccaaatttgaacaaaaaattccaaaattatatattcttaactttgatcctaatgtgtttataaatcaccatatatcataaaatctatacatatgcacgtttattcatatattttataagccatacataatcacaattgctctcatccaaaagtcttcaatttttatatgtatatggctgaaaatagagaaaaaactattatgatttgtctgttcctgaaatgattttagcccctagacgtcgtatagaattgagaattctaatttgttttaattctagaaatcaaaaaggtatgccgagaaatacagcattttgcaatgaaaataagataaggaaaaaagttttgaatacaagc

SEQ ID NO: 119730 - DNA, 1322 bp, Cannabis sativa
agagagagagagattgagtttgaattttgtaagaataatcttatgtggataaagaagaatcttaggtaagagtgtgtgagttgaaacacctttagagaactaaaaagagactctttctcaactgtactgtacctgttcttgctcaatcgataaagaggatttggtagcgttctaaaaatagaggacttaaaccagtatatatcttggggttgatttctttattttctgcatttgttatttctggttttccgtactatgttcatccatatttttcctccgattactgtttgcatttgttagatcttgtcgttattaattgtttgattgtttagaacttaagtggtttgattctgcactgttagacataatttctcacaaatcagagcttggtaatcgattaagaacgcataattaagattcttactgctgcaattcttgaaaaaaactttgaatgtcatcagtggagagattcaaattagagaaattcgatagaactggggactttacactatagagagaaagcctcaaaggaatcctaatgcacgagaaatctccaaggttcttggatacgagaagttattggcagaaaagaaaccaaaggaaaaagcagaactggaggagatgcgtactacacgatcatcatatttttgtcaaataatgttcgaaagaaacttatctcagagaagacgatgaaaggagtttagaataaattggaagaattatacttgaaaccatcaattgttaacaagattaatttgctagaaaggttatacggctttagaataatttcttccctttctttaaatgataatattgatagatttaatgagattattgtaggattggctaatataaattacaaggttgatgaagtcactcccaattgcatatcaagaagttaaggcaattgataaaataataaaaaaaatctagagtgattagcaagcacacttaaagaattaaacacaaagtttggctcaaagtgtgtgaaaagcgtttgatggatttagaattaggagctcattaaactcacttgaatatattaagagtatgaaataaatgctcaacaaacttgaatttttgaatgaaaaccgagtttaaataaaaactagccgtttataatcgttagcttgttcttcaaaagttcctagaaaaaatggtctgccattttccaaataggctgctatatttgtgaaaagcgacgtgccgtttagaaagtagtagaccgaaaatagggcagtggcaaaatcctatttttttggctctaaaacgcgcataactctttactcgattattcaatttcaaaaattctaattttgttc

SEQ ID NO: 119731 - DNA, 2109 bp, Cannabis sativa
aaagtcgacccacccactctcatggtggagaaagaagctgacctacaacttgctcttgacctccacaaagttgaggccatacatccaagcgcacccaagaaagatgtaaaacgatcaaccattgtggaaagttttacagaaacctgaagcatctggctgactactcaagtgggccattgaactttgccaattcgatatcacatatcaaccaaaaatagccataaagggtcaagcccttgcagactttgtggccgagtgtacaaaaaaatttcatgaaatcgctcaagattcaaaaaataacaagagtcaaagaagaaggaggagcaagagaagcagcaaaagcctgaagaatcaacatggaaactccatgttgatggaagatgcaatgaccaactgtccaatgcaggcattgcccttataacacataggggcaacagatgcacatagtaatcaaattcgacttcaaagcctcaaaaaatgaggttgagtatgaacacctaatagctggccttaagccgcctagcaagcagcaccattaccgaaaaggaaaaactggtgccaatatagttcctaaaggaatgaagcattaccatccctgaagaagttgacatgttggatgatagttcaacatgaatgtcaccagttgtagctcacctccaaactggagccttccttgaaaatggcaatgaggtaaataagatgagaagaaatgctacctgttatctaatcctagacggagtaacgtacaaacaaagcttctcaaagttgctcttaaggtgtgtaaccaagggtgaggccgactgaatgatgatagaagtgcatgaaggcttctgcgacaatcttgtatttactattttcgcacaatagaaatataataagctagctactagtacttgtatttaaaatatcttaacataaaacattagtacctaaaattcaggagttattcaacttgcaacaaatttgagccaataatctttatcgatttcaggatggtttttagggagcatgccaattgctgcaaatgatttgaaaacaatttgtttttttgggacaaattgaaacaagcatgaagaaaatataataattcacctttttttttcaagtttcagatattatctgatacccattgcaacaagatctaaatgactagataaattgtctttagtttagctaggaataccaaataaggtaccaatattactctcagacatattttttcaatatgcatgatacaatattctttgaaaacaaccatttgtttttttttcttcatttttttgtctctccatacttaaaatccacttgttctacttcttggagaatttgttccccttatagtggtaaagaagccatatctctcactttagtaccatgaaatgatttattcttccatctatcaagattatctttatgcaagtactatctatgacctatataacatatcatgtgtccatttggctagagaagagcccacgggttagtgcaacaaattggagaaccttggtaagcttttgttcttaagctttataaatcactgtaacctagaaaatagcaaatagtcaacaataatactgcctttaaattataaaattatttcttaaaaccatcataggcctaaacactattatcatacaaatctattaaattgtcatttaattgttcaaaatatacatcgatattatgtccaggctattgtgggactgaaatcaattaagaaagcatattaaatttcattttcagtactaactatggaggaagattgtacataacaaggaagacataccatgaactatgactactacttagaactctatgtgaatttactccatccgcagatagaacgagacgaagatgtcttggctcaaatttgaattctggatttatgtagtttacttttttctaggcttgtgaatctacaagatgtttgagttttttatctttcactctcttagtcttgtgccaaattaatttttagaatgttctccactacaatataatcgtctgagttgcaaaattaaaggcatgtaccacattactttttggaggataagtttcttattctccttactcttatttattttatggggggggggggggggaaaaaaa

SEQ ID NO: 119732 - DNA, 1371 bp, Cannabis sativa
ctatgcatggtagagtaggtgttatgacttgaagcatgtgagtatgtactatgaccagatgcatgtgagtgtttactacgaccagatgcataggattgtgtactatgaccagatgcatgagagtgtgtactacgaccaaatacatgggagtgtgtactacgaccagatgcaagggagtgtgtactacaaccagattcatgggagtctatactacggccagatgcatgggagtctgtactacgaccaaatgcattgggagtatgtactacggccagatgcatgggagtgtgtactacgacgagatgcatgagtgtgtactaagaccagaagcatgagagtatgtactatgaccagatgcatgagagtacgtgctacgaccaaatgcattgggagtatgcactacgaccagaagcgtggggagtatgtactacaaccataactccataagcatgggagtatgtactatgaccagatgcattgagagtgtgtactacggcctaatgcatgggagtatgtactacgactaaatgattgggagtgcgtactacgattcaatgcataggggtatgtactacaaggagaagcattgtgagtacgtacttcgaccagatatgcttatttaaacttttttaagcataatgagcttaaagtattacttaaacttaattgatatgtaattgtaatacatatgctcgtttaactttcacattttgtaattttttttatatgttactagttcaacctttcctgttctggaccaggttgattagatactaatttatacatatttttaaagttttatgcgaaaaatttcatcatgatatggttttttcacatatataataaaatttaaagttatcttctttttttggttgcgactagcctagaagtttccttcttcaatccatctctataataaaatttaaagttcttttttttttttggttgtgaccaaattagaatttttacttcttcaattgcaaccagtttaattagtgatattttggcatgcccccttgcgaagaaaaagtcaatcgttgaggttcaacttgctaagtaccgtgagttgttcactatagagtgtctccatttcttctatgggtatatagattgggtcatcttcaagcagattaagtcatctttatctatgagtacagttatctatgaatagactcatttacgagtagatttatctctgatcacagttttctacgagcatagttatctacaagcacagttatctacaagaagatttatctatgatcatagttatctataagcagagttatctacaagaagatttatttgtgatcatagttatctacaatcatagttatctacgatgacagttatctacgagcagatttatct

SEQ ID NO: 119733 - DNA, 4046 bp, Cannabis sativa
  modified_base (90)..(90): a, c, t, g, unknown or other
attatttcctttaaattcttattaaatttaaaatatattaataaaattaaaattaaaaaaacgataaaaaaaatctcacctgcatgggantatttatcccaccctgctggataaatatattaataaatgaaacttaaatggtagccggacgaatgagtggacaagcgaacagatagactaaagaaacaactacggtggtgaggcttaagagaaaagtttagacaggacgactgtctgcttgagtgagtagtgtgagtatcgaatgttcgatgccctgcgtctaccgtatggtttcttttatcatttgtcttcagtactgttgccctccgtccacgtcacccattggactcattcaagttggttgcgtctctaatttttagggagtagtaaccgtctttctgactggtttaatatttacttggttccacccgtttggctgactggctgggatcgaactcggttgcggggtgattcggctaatggcccataggctcactcgttagtctatttcaaggcctcgtgaatccgtctaactaccttattggacccagtattattggattcattattgatgggctcgtctgacttgcatattggacttttcaaaaatgtcgcaaatatcaagcaaatttttacctctaaagtttgtccctcactctctagctagaatttattttagctggagagttattaataccaaattagctgctagccaagaggtctatctaagtaagcggtgtacgtgtgtcttgctgtttgagacaagaaaatggcctgaatggttcgagcatggtggttgagtaatccttgtcgcgtgcgtatatgtggctaccttagttgagtaatgtttgtgtgatcaattagttcttcaaagggactcttaactagagtaagtcatctttttggtctaattagttagacagacgctggatataaattgcttataaaagccatatgttaggccaaataaaaatatttggttgtctttctcgaaatacgagatgagagaagtagataggcgtacatatatataagtaataagaaataagacattttgttgtgtaaagaaataaatatatatacatatgttgtacggagataaatatatatggtgtaaggagatagacatatatatagtgtagggagatagacatagatatatggtataggaagatagatatgtatatgcatatatattgtagggcgatagacatatatatatggtgtagggagatagacatttaaaaaaatgagaggaggtagacatacacacattaaatggtgtgaggaaatagatattaggtaaggagatagacagacatagtatgtttgagatagacatgtatgtaaataatggaaggagatagtcagacataatatatttacgaatgtaataagtaggtagacatacacacacaaatagcataaatagaacatactatatatatgttataaatgaggcttgtgtccgtctgtctagttcagcttatccttttttttttggtagctgacatcatctagcttgtaggttgctctaaagttaaaatgatgtgtgcttcttattccttttgtccaatagacgtttgaagaaaccatatatataaattagtctctttatatttatttattaagataagtaggtaaacacacttattgtgtgataggtggcgtgtgagatgccataaagtgttgtttgagaggtcgtctcaaagtactatggtactacatggtatatatgtacatgtaagagattttacttgcttggatatattttgtcatagatagatattatagagtgttatgtactctttcatacctattcatatcagagccaaaagaaagtgagattcacccatacctattagtcacatcaatgccaaaaaaaataatatattgaatgtgtggccaaaaaaaaaggtccaaatagtttgctctctaactcctatacatatatcaattaacatatatattattataactaagggagcaccaccatccacgaattgtatgtctagtgaacatacattaagtatagatgaatatactatttgacaattaaagatagtaccttgtactcaatatttaatattaccctctcctatattactattactataaccttctagatgagtgacatttgtcactcatccactattttttggctataaatatggagagttatattattcttgctcacatttgttggggctcttggtgaagtgaggcttgaagtcttggagagaggctttcaagagggtaagttttctaaatcctctcccttgaatgttcttaggttgttcttcatgttcttttgcatgctcatacttattttagtgatgtagatgagtaaatatattttacttgttgtatgtttgtgttttgatctttgtgggtagtaaaaatttacgtttttactatttggctttgcatattagtaagtatgatttgaattatgaatgtccagctagctagagtattgtcttcctttagttaattagaggatcataactggtggtctatttagaacacgtatatctagttggtgagtattattatggctctacatttttatgtctagttatttttgccaccttgagcttcgatatatatatttttgttttgtctagtcggcgttttgctttttatatgtttatatttttggtgaactcgctctcagtccagtacttttgttctaggtgggttttttgctaattctatcaacaaccatggtgattgtgccacttcatctaataaggcgaccagttcgtctaatgatacttcaaacattcgtacttgtgtggtaggttatgttctggatgatgagtgtgaagatatggatgtccatcgctatgcatctggggttggagtagacaccgatcgccctatgagtgacagtgagtcatgcgatattctttcggatattaatccaaggtcagaaataaccttcaacgacttgccaaaaattcgtcgtcgttacaatgttcccatacacattagtttgtatgctccggctagcgggaaacgggctgactggaagacaccgggttggacgtgtttatacaagcttccattcaagtatggttttagatttcctctccctaagttaatgtctgaactatgctcctatcatggtatctctcctagtcagttaatgcccaatgcttggcgtgttctatggctatacaagtgttgactgaaaagcataacattacattcacggttgctgaagtcttgcacgtctattacttgaaagaacatatacatgataagggtaggtatcagctcactgtcagaaacgatagtgaccatctgattcttggcattaaagcagctaagcgatggaaggaggattttccctttgttccttttgatgctttagcattattagttgatcatgggattccccattcgtggtctcctgctagtgagtgtcatagtttcgatattgaattgtgcccttatgtgttatgatttattgatacacatctaactagttgatttgccttctttgtaaggaggatttgccttccgtttagttgggtgtgtggtcaagcaccagggagagttgatcaagttcttcagatttcggaggaggagcgctgttggaacattctattgtctgattcttctcttcgagacagcactttgtgggatcacgttccacgtcaaccggaaggtatatctcctcctaagaatcgtgctaagtctcaagttgctatactccaaagaagttttgagattttggggtgtgaacctttatttctacctgaattaacgccagacgaacgagattttgcagatcgattcatggcccaatcttctttcactcttcctctggctgttgacggtgctatggatcgtttacgctcgcgcagacaaaagactgcgacgactctcagtgctgagaaggaggttgttactactgttgctccttcttgtccttctatgagagctcaaaagaagaataacaagagaccatctccggttgagtcgaccgattggttgagtaatacagttgatctttctttcccatcttcagtggctgc

SEQ ID NO: 119734 - DNA, 1587 bp, Cannabis sativa
aaataaaatttacagaatacacttttgttttctgtttttaaaattaaaaaataaaaatagttatagaacacatttttatttttaaaaatcaagattttaaaaacaaagatttttacttttatttttgtgattaaaaaatttaaatgttaccaaatgccgccataatttaatatttttcagtaatattcttatttctaaatttaattttactttactacaaaattttgctgaatcagtcatgaaatggatagatcatcgacttcaagtttttatattttttatgaaacaaaatctacctttttatatttgattataactacagttatgattgtaatgattattagttttattgtgagaattagtagataaataggacttattctcaaaaataggttttaaagtattatttttgtaattatagagatatatttaaattctaggtgtattattaatgatatataagaaattttatatttttcatgttttgtactctgtaagagtggaatacgacaatttggccaatttgagtcacttagatacaatgtcgtatattagaattaacgtgacaagatagttagatatttggatgtcgagagagtttttagcggggttatggttttgaccattttaccctaagctttaaggattacttaagctagcagtaagggtattttagacttcttaccctaaattactttattagataagaaaatagaatttttagagttttcttagtaaaataaattagattttaagtggataagttttaattaagctcttagtttttcattaaactaaaaaataagaaaaatcaagagaaaaacctctcgtttattatctcctagttcagccctaaccgaacctgaaccaaaaccaattttcttcatccaagctctaatcaaattaagaagtttgtcagcttaacttaagcgtgtgatagcctattattgaggtaagctcccttttttcttgaaatcttcttgtagttaaagttaagttcttatgcaattttaggttttgagttgctatttgatttggaggtattgaaaaatgtaatctggggttatttcttagattattatgttgttacatgctagttttcatggctattgttgagaaagatcaaggtttgagcttttaagctcaaactatgtctttgatgataaaattggtttcagagggttataactgttgtttttggttggtatttgttgtttatggcttaaataagtattttggagcttattataagttttggggtagttttatgctcgaaaagagattgaaaaattaagtttttgcaaatgtcaataataattatagaactataatgaatatttacctgtaatagtctacaacagaagaatgtaattctattactgcagaaaatagttttgcaaaatcaaaccagaaccagtagaaataattacagaaaataaaatcactttatacaagagattagtacgcggtatcagtgttcttttaaacactcctagtccacgggatcacgctcagagaatgaaatcaattaataaagtatcaacaattacaaagacaattgacttaaacaagtttagactccctcta

SEQ ID NO: 119735 - DNA, 985 bp, Cannabis sativa
ttctaattttcttatacttggttctggttttggtacaggttctggattagcctctaaaaacaaataccaatatggattctttagtgctgcaattaaactaccatctggtctttcttctggtgttgtagtggctttttatgtaagctatgatcacttctatttttccaatgttttttataacagaaaaagataaagacttttttatgtgacacatgcaagacttacaaaacaacatattgcagttgtctaatgcagatgatttcccacacaatcatgatgaaatagacatagaattacttggtcatgacaggagaaaagattggatttttcaaacaaatgtatatgcaaatggaagtgttaacacaggtagagaagagaaattctacctctggtttgacccaactacacagcaccaccattacagcatcctctggaatagtcatcacatagtgtaagaaaaataccattaaaaatcaaaaatcaaaactttcccaataaaaatatcaccttttaagacatacccatttgaaaaatttcaggtttttcgttgacaatgtaccagttagagaatttcctcgaaacaatgctgttttcccattaaaacccatgtcagtatatgcaaccatatgggatggttcacagtgggcaactcatggtggaaaatacccagttaactacaaaaacgcaccgtttacagcttcttttacagaaatggagatgaatgggtgtgtttattcgaatcaaaatgatagtgtttcattgtgttctaagaagaacaacccttcgagtttggacccagttgagggacatgagtttgccactctttcgaaacaacaagttacagccatggattgggctagaagaaagctcatgctttattcttattgtaaagacacatcaagattcaaagtcttacctcctgagtgcaaatgaatcagagtacaagaaatttcacaaggctctaccatgtagttttttttttttt

SEQ ID NO: 119736 - DNA, 1990 bp, Cannabis sativa
  modified_base (813)..(813): a, c, t, g, unknown or other
cttagcctataaatactacatgataccctcatgcaaagggagagaaattcagtacaaactccatagcaagacattggaattcttgagcttctcaagaacatttgtataacatttcaaggctatttagcctaatacaatgacttgtgaattataattaaccacgtaaaaatcactttttttatttcatctctttgatttattttcttagttcttattttattatattgaattttcaaaattttcagtaaatactatccaatttattttttatatatataattagtaactggagctcatttttttttaaagattcagctctttataatattaactaatgagtttgtttgatgagcacagttagaatacactaactattaaaatgtaattcctcaatctatctctcactttttttttctctaaattttagtgtataattttcactcaagtgtaaagttaactaaataatactagtcaatctaactttggttccatcaaaaaaataattactactcaagtcaagagtgaagagtaaaatacattaatgagaaaataacaaatatatttaggccaacaaattgattgtatttgtagccaccaatatattatatatatttagaagcttctttctctctttacttgttcatcatccaattcaaaaaccaatttaaaagacttagtttgactctgaattgcttgcgccaaaactttgaccaaaaaatctctctagaactacataaatgcattggctataatggctgctgcctaaattaaaattggttgtatataataacatcattattattattattattnttattattattattattagacatagtattcaatatttttttttataagtaataccttatagttagttaataatatattttttttaaaatatttttttaagttatatgaaattcaatgcataactacacaaatattagtatatgataaaaaaaaaatactaaacattaataatactttttaacaattatcatataagtaataatatatatataaatattaaaggaaaaatacccatacatatttatgaagcttttgatttgtcaacgccaaataatttattggctttatgatgtatatatataatagcagacatatgggacaatatgtaaaaaaatatataatatagttacaaggcttgagttttgagttttgactcttgactatatgactttcatcatataaactaaatccataagtgattaaattctaatatagattattataattaatttattctaatcatctagaaacaatcatattttaaaagtttggtctatcaataattataataatcacacaagcattgcaattggaatatttttaaatatgggtgaccagttcattggtgattttaatttatatataattaatttaaaattgcaagatgggattttctagaagagcataacatatttggttattgaaagaaagcattagcatgtgtaagattgccccacaaaataaataacatgtgcattgcataattggttactcactttgatatttgtataaggaataaaataattgtttataataaaaataatttacaacataaatatttaagtttaacttctaattgtaaataaatatttaaatttaatttttagcggtataataatacctaagttataattctgaaatttctataagtatctggctattaagtgtaaaataaattaccacgtagcaatttttaaatggtccaaattaaaaaaaataacatgtgaataatgactgaacatttacagttatatacctaaaaagtttcagaattataattaagtattattatcgccaaaaattaaaattatgtatttatttacaaccatgcaataattaaatttaagtgtttatgccacaaattaatcttctaataactagataggatattatttggaagatacataattgtaaactttcctaactataataggatatatatagggaaatttgattt

SEQ ID NO: 119737 - DNA, 2224 bp, Cannabis sativa
atgatgttattgtatatattttatcttaagtatttttttattattttgtttccaagttcgaaacatattttcaaacttatatattgtttttagatttttgctgtgcattgtacgttatcttaattatatttgcgagttattaattttttttgtctcggcgtgtatttttttttaatatggttaactgaagaattgattttaattatcttctttatttattattttatgttttgttatgatttttgttccgagggttcacatatttgagattagtttgttattatacgtaattaagctttaagttttgttttttcttaagaatctgatttcgttgtgtgaaatttttaactagctataagtgaaactagtttctgatactttaattttctaaactatttattttttttaataactcgtttttgtgttttaattttttttttatttttgtttagttgtattatctctgttcaattttttacgccattggcttctatgtttaagattttaattggttgtttactgtaactgatttctttatgtttgttcgatgtaattggtttctttttatatgatattcaattggttgttaatgtaactggtttctctgtgttaaaaattttatttggttagttaatacaactcgtttaaatgatttaagtttatttatatgtttagaattctcttacgatgatatgtttttttttttaattaattagtttttttttttcaatatattattttattgttttaggttttttacatttttattttgattttttaagttaattgtatttagtaattggtttttgtatttaatttttattttaattatttaggtaattggtttatgtgagttaatttttaatttaattattttacgatttctctatatcaaatgtttgctaagttgtttaatgtaacgagtttttttttattattattatttatttagtttaaagttattgttaaaaaatattttctggtatgtgttttttcttttttaagtaactagtttttgtaattgatatattttttcattattttaggggtcatatgttttttcactttttagttgattgtattatgaaactggtttctatattaaattattgtttttgttattatacataactggttctaagatttagtttttaatttggttaatctacataactggtttttcggtgtcatatttttaactaggtgataaatattatggatttttctttgtcaaattctaaggtctaactctggcgacaactccaatgtccaacatcggtgacaacttcgatgtctaattatagtgacttttcagtagcaacgatttttttgacaatgataataattatgttgaatattctcatctattttctacttttattgaagctaatattttattttagtggataatgactattttgtatagtgagttgatgattgagtcttggaacttttcaaaaatttgcaactggttttaattttgatcttgtgttggttttaattttgatactgagttgaaggtcaagtcttagaacttctaagaagcatgtaaaatttatgtgagttttgatattcataactactttttttttttttgttaagaaaccaatttctgattatatagaattaattggtttattaatttatggttttaataaaattattttagcattcctttaatttttgtaaaaaaaatactttagttgacattatttttttattccaatattttattttttaaaaaaggaaagaaaaaaaaaaaaagaaacacaattttaaaatttttcatggcatttccttatgtataatgatttttcccttatttttaatattttttaagaaaataccatattttgtacacttaattttttatgccgtatatatcaaaacttgcatttttttccccaatattgtaaatagtttttttttttttttattaaattcttaatgggtttattttatatgggccttctctattttacccatgtgggcttttcactgatctattgatttttgggagaagatgaaaagtacccacttttttatacgttaatcaaatttacctccaaataaaatttaatttaaatataattctttttatgagtattgtacctaaattacctagggctgaacatcagttggtttagtcggtttttttctatataaaaatccaaaatttagttttcgatctggattggtgcaatcagggccggccctgaaacaa

SEQ ID NO: 119738 - DNA, 2884 bp, Cannabis sativa
agatatgagggactataaaggtcttcctgcaaagtagtaaagatcgattctctactcagcgagttggtctggatgacccaacgttctagataactcgataaggattcgcgtgtcctaagttatcgacctattacaggatatccgtatatgcaactcaaacaggacgcagacatcttaaactcgattagtcttgtacgcatctttagccagcaagcttatgcgagaatatgaacagataactcgcaccatgaaagtcgcatatgttgctgtagttagtgaattgggccgaaactgttcttcatttattatgtttacatttttatttaaattaattgttatattcaatgtacaaaaggattgataattaaatcaatctttgtgtaatcaaaggacactaaggagtgatccaacatgaaatgacaagacagaaaaaccttgcaacagtggactaagcagaccttgatctgactgagccactatattctctatgtattatttatatttccagtacgtctgtgtatccataatttgaatactcgccattttgggtagagtacttgcataatcctgttcatattttaaatatattattttatttggtgttgtctaaattccaccaataatatttggcgccgtctgtgggaaagaattttttttcattaattttggaggaaaatcataatggctggaaaaccagacaaatggagataacaacactggatctttcaatgtcagaacaatgaatcttccactctcaggtaatggaacagcacctgtcgacaccatcaatggaggagtgggacgtaccacaattactcccctcaacttatttcctgaaaccatcggtcatgttagagaaacatcgacaccgacagccactgtgggacaattctcgcctattacaccagcggtggtatctgagggaatcattcaactgactgtggcccaatatatgtccctacaagagcaaatacaggctttgtaggctgaggtcaacggaagagttaggacccgacgtcctcctcgagtaccaaacacacattcaaataaccctcaggttacaaacactcagcaaataactaataatcgctctcgcagagaacaacagactggacaggaggggctcgacttgaactagcctacataaagggagcaataggtcacacaaaacgctaaccgcgaggtgccacaagaggaggatcccgagcgatgcaaccctcgaagcagagcccaactgcgaaatgtggtaaataatgctaaatcttattcttcatcctcacaaagtcgttctcctagtgtgtataccaggtcatctctatggagacacaacgaggagggagatatcatgttcacaggggtgatctttgtgatcacctcaacgcaatttttagggcacggtctcaaattccctaaagctacgatgagccccgtgatccccaagtgggagatcaaggcacaaacaatagcaataacccaacaaatgttgtcaacccgcctaacgcactagctacgactaccgaggtagtaattccagctaacatagttatgattatgaccgcaccagcgacaactaaaaacaacaccgtcatgcctaggggtgtagatcagagcatcttgctacgagcgttgaaaataatcgagcagcagagaaagcccatttacaaactccatgggacttctcctttcaccaaagaagtgcgacaggctcgacttcccaagggatttagattatctgaatcgataaaatataaagttactactaatcccatacattatttagaaaaatttaatacaattatggaagtagaccaagtagctcagttagcgaaatgtcgcatcctagcggcaaccttggaagataacgtttacgattggttcagccagttgcttgaggcgtccatatcgacttgggagactttcgtagatttattcttgacgcaattccaagccatgatgatgtacaaaccgccttatacaaccctagctaccatcaagcaggaagtcgatgaatccttataggattattttaagcgtttaaatgctgaagtaaccaaggtcgagaaggcccccgagtcttcattggtatgtatgttaattacaggtgtcttgccaagaaccaatttttggaagatgtgcaagcccaaagaccagaattgttggtagagttcttcgccatggctgagccgcataagagaatcaagaattccttggctgaactagaaagggtgaaatagaagcgcgagtcatccgtaccacggtcacgatcttgaagtcctagaggaaagaaccctagaggcagcaaagtctaaagcttgccaagtctccttccaagaaggaaacatctccaaagagaaaaggaggaccacgctttgtcaattacactgaactagcggtccttcacgatcatatttacgcgattgatgagaaaaatggagtcttcaaaaagcctccgtaattagaggaaatcacgacaaaagagatccaaaaaagttttgcaagtaccataaggacatcggtcataccactctggaatggtggttcctactggacaaaatcgaagaattgatcagacgaggaaaattcggtaagtacaagaaaaatagagaaactcatccccaagcagatgagaatgacgagacaaacaatgtgagtagttcacgaactcctcacattatcttaaatattattggaggccccatattggtggagattctaaaaagtcacaagagcgatatgccaaagaagcaaaagaaaaactgctcaccaatgtaaataacctaagtgagcgatcgaagaagtttctcaagaaggaatgcgatgacataaccttcatggagagtgatgccagatgggttcatcatccacacgctgacgcactcgtgat

SEQ ID NO: 119739 - DNA, 1571 bp, Cannabis sativa
  modified_base (1283)..(1289): a, c, t, g, unknown or other
  modified_base (1500)..(1510): a, c, t, g, unknown or other
ttcaaatcccactaactacactttatattttttttttaaatttatttacgccccccctcactttaaattctgggtccgccactgaatattatgcatcacaataatgctaaatactacaaagcatctctcatataataataacgaaacaatttaattggtctgactaatttaattattttagtataataaaaaaataagaattttgaaaaaaattatatcactatctaataatattaaattatgttattttaagtaccctttaatatttttttttttcataataataataataataataatccattattttttactttcttttcttccttccccgaacccttccaatcactctctctcctcttttcttctatgttccccattatgcccaccccaaaacacttccagaatccttttctactattccatcactttttaatatgtttactttgaaaattgctaaaaggcaccgtctagtaccctcttttgtgttatatcgctattgatgtaattaagtagtgccagtggatcttttaaaacattaaaaaataacttttagaaaatatcgctagcgaaccaattgtataacgccgcttataaaagatgctggacaccactaatgcccaataacaatactttattactttagggcaagagtaggtggatcctatttttttattttttttttatttttttatatttaaataaaaatattttaaggtaacaacatggtgttcatgagaagccacgattgcttaaatttatcaagcattactacgagacattaatgtgcctaatattattatgaaatgatattttataattagttaactttaatctctaacctaataaaataaaataaatagagtcaatattaagttacaccaataataattttaaattttaaaaagtaggagtattcataaaatagccgatctaatttaatccgaacgactcaaatcaattcaatccgcacttgttcggattgaaaaatataaatttgcacttgtgtggattggatattgattgacatgtaaaagtaaccgatcaaatctattccacatatatttatttaaaaaaattaaaaaaaaatatatacaaataacattttaatataacaaaaatagaaattcaaaagtctaatacatataatacaattatatttcaaaacttgatagatcacatgtatattttattcttatatataattttttttttctacatacaatttaaaatgtaattaaacatttctttatagagacatttttttttcctttgaatttgtnnnnnnntttattttaatttgttgttggagagataaaataacaataatttattttagtttattgctagttatgtgaaaaaaaatatataaatattaaaaattaaccaacttaaaataaccgatcaaatgcgtacttttgcggattggattagatttgagctattgtatggattggattggattccaaaaataaaattaggcgtttggttgggaggaannnnnnnnnnngaataggaatgggaatgagaataggaataggaatagaatggaataaaatttaaaatatata

SEQ ID NO: 119740 - DNA, 2481 bp, Cannabis sativa
atgtaattacgtggccacacaaacacgtcaaactgtgtaattacctccaattacatccaattccaattcccaagtggctttccaaacacgcccttaatctcttatttgcttgagcaaaagccatagttgatttgagcgttcaatatgaggtaaatatcaccaagagaatcacaaaataaatcaagtttcataaaaaacaagtaatataaaaacgatacgaactttaaaaattaatttcataaacattaaaataaactaattatttcaataaaagcaacagaaaaaataaagccagttttatcatcatcatactaaaaaaacacaatgcaaaatttttttatctaaaaatgatacaaacttaaaaaattaatttcatcagcattaatagaagtagaagaaagaaaaaacagtttcatcaacaagatgatgaaaagaaaattataatctaaaaacaatgctaactttaaaattcagtttcattaacaatcaacaaactaattatttcattaaaagaggtagaaaaaaaatcagtttcatcaacagtaaaaaagctaatttcatttaaagaggtagaaaaaaatcattttcatcaacaacataatgcaaaatacacaatgcctaataactaaattttaaaacgatactaattttaaaatccagttttgaacatataaattttatatcaatacctagctagtaaccaaacttctaacttcattctctattttgattaattttttattttggttaacttcattctcgaacatacaatatggagcaaaaaaataaagagaatcagaaactagaaccaaaaatagacaaaaataaaagacaaactataaaaaaaataataaaaaaagaagagtgagataaatcatatataaaaataacaaaaatagaggtgggttaatattatacattctaataatcaaatgataccccaaaacaatacaaaacccactaaaaatttagagtataaagaaaagatagagaaacaaagagcctaaaatgaaaatataaaataataaaaaaaaaagattaaaccaataaagctagaaacaaaaacaatgaaatataggtttggatattagatttacaaaaatgtggcatatcaaatatcataaaaaatcttaaatgtgagaaaaataccatacttttgtaattttagtatcaaatctcatatttcatgtaatttttactagatgcattgcaaggcctagggccgaatctccaaataccagacgacaaaagtttgtgtgtcgtcacgtaataaagaataagaaaaacgacactgaaattaaatacaaaattacaaatagcgtaaaagaaaatgatagaaaaatttacataattaaccaaaaatttaaaaaaaaattacaaaagtacttcaacatggaatttttttttttatttttacattttgaatttttttatttaaaaaattacctcttcagcaaatataataaaccgtttttttagtcttttttatgcttgatttatagttgtattgttgtgagttggccaaatatcaaaatccctaaactacccgtgcagtacctaacataaccgatttagccaactgtcagttatgacagttggtgcttgagtcttcataccagctttgctatttaaggctctatttgaatcatttggtggctgtttatttttcaacggaaacaagattgggagagaaaatgaattacatattatttagagaatgagagagatgagttgtgagtgcccttgagtgtttgtaatggtgtgatacattgtttgtcatcatcaccacaagtgagttcaattgcagaagcaaaacatctcaagttgtgtaattggaactgttgtaatctctaattaaagatcagctaataaagattctctaaggcccttgttgtggctattttatttagcagggatgtaggcaaggtgattcaccattaccttgctcgaatctcgttaagttcatatgttctttatgtgtgtttaatgtttttgctacttggtttataattgctctcatattagtgcattgtcttgaattagtttcattgatcattattgtgtttattgtgttcttcccaaggtgatctttcacaacaattggtattagagctcaggtttcttgaaataagaacaaaatcaacaaagtgatctatggcttccgcacactttgaagtagataagttcaatggagccaatgactttggactgtggaggattaaaacgaaagcaattctggttcatcagggtgtataccaagccatttacaaggaagaattgaaggagttaggagatgacatgaagaagattaaagaaatcgaagaagaagcacatagtgacatcctgctgagtgtggcttgctgctccacggcacacccacaatggggccattttgtaacatgagcatgccttggtgcttgatcattagtcaagtcttgcaccaagcacctcattagtgtggggagtcttttgttgtttagc

SEQ ID NO: 119741 - DNA, 1300 bp, Cannabis sativa
  modified_base (1244)..(1248): a, c, t, g, unknown or other
atccttcaaaccgatcacttcgtcatcttcttcttctctccttcatctttcatcttctcactccatctctttctttctctccatctcaactcatgtataaaaaaaaaaattatatttagttacatttttttattgggcgggttatatttttgtcggatttttcgatttgtatttttcgtcgggttatctcgatttggtttggacgggttgggtagtttacaaattttatgtacaaccctaccagttacattactggcaaaagtccacttaactatattatgggccgcaaaattacacagtttaaaaataaactaaaaattataactaatcaaaagcccacttagccaaatagaactattccaatttttcatgttaaagactaatttgtcgaatatcgaaaagtgtattttagagatttaccctgcctcaaaaagaagatccgttaccttagcatattagagcattaattattattgggcaccagtggtgctcagcacttctagacatgtcaccttgtgattgactagcgatattctctaaaaattgttatgtcaaactatatgggatctgatacttaattagacaaataacgatattaacatataaaagggtactaaccaccactaatactttttagcatgtttgagttgcgtgtactgacacaaaattacagtatgtacattctttagtagacaaaattttgggtagtgtatataaatgacctagagtaattaagtaatagtaattgctaaaccaataaatatataaaaccagattattggggaaaacgtggagtaactctatttcattaagattataaagctaaaaatacttcccaacaacttttttatttcatcttttaaaatatctcactaaaatttaatttttttttattttacttcacatttacactcacattaatttacattatattatacattaatttttttatattttccctacaatatttaaataatatagttataatacacaaataataaaatattatatattttacataatttttatttaattttacacttacaaatacataaaaaaaaaacatcataaaaacaataaaaaattatagcctaagcataaaacttagaaacctatatttagctaagcactactcatgagctaaaattttgagctattttacctcatttattgaatgtgttttttgacatttttttaactcttagctaagggtgtgtttggtaacatttttttaatcagttttnnnnnttttttttttttttaaaattagaaaaatgatatttttttaccatttattttt

SEQ ID NO: 119742 - DNA, 1733 bp, Cannabis sativa
taattgagagaaagagagagggagggttgggcgatgggtggtggtttttcaaaatggagaagaaatgggttgggttgtgctagggtttcacaagttaatttcgaaatagggaggaaatgtgtttcaatgtgaatgaaatttggggttattatatttagatacaaaaattaaatctttttgctttggtagataacagtcgcaaatattttgacttcttttttcaatcgaagccaaagaaattagtgtctttttttcaccgaagtaaaatgtaaaagataatttctaaaattttcacttttttctcgacttttcttttagcatcggagtaacagctgacactaattgatttcttttagcttcagttatcctctaaagcataaaacctccgcctatttttgtgtcggtcaactatttttggtagacgcgttgaccgatgcaaattaagctttttgtagtagtgaaccttacctccaacccacatacatcgcagtcaagagatcaaacaagatatatcaccgaaaagcctctgggagcaccataaccatctcatattcttagcatatgatccccaacgaaagtgatcccagctgactaagaagagccaaatgatactgcaaaggtccatggattcgctgagcgacaccccacaaatctaccccaaaacaaaaccacacaaaaccattgaaaactggaggataaaaaatcacttgtcaaagggaaatcttaaaaataataaaagaacccaaccatgaaattccttattagagaatcagacattactcccgaccagagctcaactagagcccaaagaaggctgacgagccctggtcggagcaaaaaaaaattgaaacaaacggctagtagagtgagataatctagcaaaaaaaatttgagattttttagaaattacttaagaatatttcatatactgcatttcccttttttttttatcgtgaaaaatttaacacaacatttgaaatttatattagatatggtcttaattaattaatatacataaaatattactttatactagacaacatatctgttggccacttggtgttatatatgtaacatgacataattttcaagtgttaaaaataataatactacgtacccattatatctaatgaaatgatttcacattattgaaattaaaggtatgattacgagttataattaacaataggcgcttttcattaggttagtctcttttagaaatgtcaaggggcgcacatatatatttggccattcatgatcatctggttttgttgaagtttgttggccattcagatatagagtgcatgaggcttctcgtgtggaaaacatcaaataatgatgtgaacattaccatgcatttaattatattataaagtaattaatttaatgtaataattaataagatagtttagttatatatatatagtttatacacatttacattgaagtgatcgattatttactaacttataattctgctttgttttgtaatgggaagattctaattgaaatgcttgtaataatacagcaattgtttagaatttatacttttattattatggtacttttcttccttctttaattttctctccgtcttatgagtcaagtcgatcgatatactcaatctatatgttctctgttagacatttatatgtataaactgaaacatatatgtatgtgtatataaaatgcggaattaaacaaatatatacactatataacttaaggatcga

SEQ ID NO: 119743 - DNA, 2398 bp, Cannabis sativa
gatcttgtttttcgctagcctatcatgaaagaactccacggttaagcgtgcttaacctggggtaatttcaagatgggtgacctcctgggaagtttttccaggaagcatgcaagagaggacaaaggacgatggaaacacttgtgttggtctgtagggtcagtcattagtccatgaagcacctagagtgacatactcgtgtataagagctattattccatgagtgtaaggacccaatggaggcttgaagcgaggatgttacattgtcacattgtcagctcagctcattcatctaaaaatctaaaataaaatagacaaatagacaccattttagcaaccttttattcaattgaaataagaatctaacgttgtcccgtttaggtgagattcaaggtcattctatttgatgagcttctactattgattcatattttgtaagccctactcttagtagtcactattggggtgattgttaccaaaaataaaagacttacaataatacttatgaactaacccaggaggggggtagctggccattttcctgtccccccaccagacagcctagccagccaagggctcgcaggtcaaaacttgcctgagcaaacaaagcttaagtttatcctttagtgaaagcacaattggagcaactcaagaacatgatacaaggtctgtcttgcataaagctgtctgacttagagttgaacaggactgagggccacctttttctgggtgcatcaatgctttgcctttgcctaccaagtttaagagacctacttagaggatctacacagggaaagaagatcccttggctcacattaaatattttaaaattcaaatggatttgcaaaatgttgaggttaataccccttgtcgaatcttcctggaaatctagtctaaaatcccatagtagtggtttttcaaacttgctactagaaggttcgattcgtggaactctttcacaagagagttttacacacagttctcatcttcctgaaaatgtcttataggctagaagaattagtagaggtcaaataaaggccaaggaaacctctaaaatgctatctcaaaagattcatgactgaggccaccaaggtcaagaatctgaaggaagaaggaaggtacacaaccatcatgagtggcatactacctttgagtgagttgtggatggacattcgtcgacactcaactcaaaacatggtcgatttccttgatcgggaagaaggatttgtcaagcatgaagaagctgtctaacaggcccaaaatgggagacaagtaggttccagacaggctttgagtggtggacaaccctcagttatgccccacacgcctgccagcataggcagccagccctcccatggccaaaatactggaggcaagtgtggtacaacaactttgtccaagaaaaaggcacaaagggaaaaattaataaatcccccacgccataaggctcaaatgagaggaaacgagatttacatgattcaccctcctaaaagcaactcttaaaatagtttgtacggatatagagtccatagttccgtacaggaagcctcctcccataaggaaagaaatgagtaagagagacaccattaaattttgtcaatttcacaatgattttggccatgataccaatgagtgagagcacttaaagttgaaaattgagttcttgatcagaaagcataattcccatctgcgtcgttatgtgcgagacgaccagacacagacacaaggtgcccaaaatggagaaccaataccactggcagtggtaggttgcctaagggtcatcattggcaaacccaatatagtaggcaaaataagaaaagttatggagcgctacgctcagaatctctgtcatgagcaaaaaagcaacattctggttgtagaggaaagggatcccaaacagcttaagcttggaaagctcaccatctccttcacagaggaggatgttgcctaggtcaagttccctcataatggccccttggtcataacagcacaagtagggaacatgacaatttctaggtgcatgattcataatggagcctcctcaaacatacttttcaagtcaacttatgaaaagatgggttccaattgataaatctagcaccatgtacacaactgatgtacaggttctttggccaaggtcttgcacctgtgggatacatctgtctgcctttgacagttggagaaagccccacaacaaggacacggatggctcatagtgatcgatgtgccatcagcatttaatgcaaatgatagactggcaagccttgtacgacctgaaagtagtaacgctaatttaccacctatgcctgaagttcccaacaaggcatggggtagggtgcctaagcacagatcaacaatctgctcggcattgctacaacttgggtttgtccaaagccaagaa

SEQ ID NO: 119744 - DNA, 782 bp, Cannabis sativa
cctatggccacttgagctagccccaagtgattaaaaccaaatctattatatattatgccaaatcatatatcttgggtgtataaagtgtacataatagagacacatatgtggttagaaggttctttaatttttagtatacatatttatataaatctgcaaatttttttgttaattttatgaaaataatctaaaagaccaaaaataaaaattacataataaactaaaaatttgaaaaaatttacaaaaatacataacacgaattttttttttaattttttctttgaatttttttatttataaaaatatctcttcagtgaaaataataaactgtttttttagttgttttatagcttatttatagttgttgtggagttaattttacgttattttttagtttttttttttttttttactttttgctgaacaaagtgtatttttgtaatttgaaaactttaaaagaatatttttgtaattaaaaattttaggccaaaaaattataaataaaatataaaaaaaaattgtattgttaaaaatttcagaaaaaaaaatgtatcatcctaattaattactatgcaaggctaaaattaaagcacaaaaatcattgaaccttttcagtgtaaattatgtggcttcgcagtttttatttgtagtatattagggtaaatattttagatcatgtgttttgtaaaagttatcaattaacctctctgttttattaaatgacatgatggagcctatattttctaaaatagtaaaaataagaccatgagctcaattttcaa

SEQ ID NO: 119745 - DNA, 934 bp, Cannabis sativa
  modified_base (317)..(318): a, c, t, g, unknown or other
tatctactgtaacttaatatggcaataccctaaactagcaggaaattaaccaaccaaaaacctgaaactaacgcaaatcgcaaagctgaaattttcaggaaccctgctgcagaaaccggttacccggttttacaggtacctgtaaaaccagttaaccggttttacccagaaaacccaaacaatttcaaaccctaaccaaattgattctaataccaaacctttcagacctgcatattataccccaataaactatttccaagcaataaaataacaacccaagctcagaatctaaaatcaccattaaagctccaagtttnngttctaaaactcaaaacttggttagatctactaacaacaactactacatgcttaattcaacataataaatcatatattaacttctggaaataacatctaacaactacagcaacaataacaactaaaaactccatttcatgcaaaatgaacttcttaaaactcaagaaaactagggaagaaatggttaggagcttacctatagagcttgagaccacttaaaccttgctgaaacttgcttgaaatgcattaaaatacagcaagccctagctgcttctgtggatttcgaaagagagagggcaaggagagaaagagaatctttttcttgaattttcttattttgaaataaaagagtaaatgacttggttttattaaaattactctcagcccataatttaaataaaaatcagatttaacaactaaaaacattccactaaggacaaaaggctaatggggtaaaatggtcacttaagggtatttttaggaaattctaaaatcctgactattcccgacatttccaatgtctaacgatattgtattgctattctaaaaatattagaatgtgattctaatagccaaacaccgcgttccaatattcccgggcacaaaacatgcaaaa

SEQ ID NO: 119746 - DNA, 1171 bp, Cannabis sativa
ttttaagaatataaattagaaaaagaaattaaaaaaatttagtacaattaaagataaattttatataaaataaaaattattaaagttaattattttaaaaaaaaattaaggtgtaaataaaattttctcatttaaaaatggactcctctccacgtcggcaactctttatttattttatttttgctcagttaggacatgagagagaggtgtaccaacctgtgttgcagaggtcactttgactagcgtttgtttgaccaagcaaaaggaccaaaagccccaatggaaaatagggccatggaacccgatttgtccttttcgttcttagtttttgaactctagcctgcacgtgttagtagtgggtacatacaaatataagggcaaaatcataattttactctcatgctctattcttattaggagtgaaatggggtccctgccctgcccctcccagtttagtgtcagtgaatttaatggttgaaactgtgatgaagaagatgatgggaaaaagattaagtgaggagtatagaaagatgtttcacatttggagatcatatataatatccaatatccataacagttcaattaataaaactccacctacatgtatattattattatatgtatttttcttagagagaattatatttacatacttcatataatatatttattatagttattgtttcttgcactatattcaagtaccatatggtctaaagtcatgtatggacattgattgtggatcgtaaaacgatgaataatggcgcctccatcacaagatataaattgtatgttggcattaatgtcttattccaaactatcaataatgtataaatatttaatgctacgctccactaagcttagtactatgaggtggggttgtataatttgttagttattttttataatttttataaaagtaaaatatgtacacctaatattaaattatattaataatataaatacttttaacatttttcatatttaataattatatatattttttgtttgtctatataaatcattagggtgactttttagttttcactggggtatatatatagagtaacaaacacttacatatacatgtggtaatacccattgatgggaactaaaaaaattaataaggtaataatctaataacctttttatggcaagtttctaaaaatta

SEQ ID NO: 119747 - DNA, 2995 bp, Cannabis sativa
atatggataataacttgcctgaagggaactcactaccatttattattaaatggtagaattcaaggcaatttcaaagggaaaaaaggtctctgtcaaggtgaccctatgttcccattgctctttgtcttgattatggagtatcttaccaggctttgtagtcactttgttgggagaaaggggtttggataccatctgttgtgcaaacacctgtgcttgactaacttctgttttgtagatgacttagttattttttgcaaaggaaatattaactcagtgaaacttattaatgaagctttcatgttgttctgcaaagccacaggtttgtctgctaatacgtcgaagtctcaaatttattttgagggtgtcaatgaagagatcaaattgaagattcttgacttagttcaattcgaagaaagttgctttcctctcaaatacttgggggtcaaccttcgtccaaccaaatggaaaacttcagactatggagtgatcctggataatatcaacaagaatctcaactgttaggcaagtaggagtttatcctttgctggtcgcacgcaattgattcactcatttttacttggaattaggaatttttggatgagtatattcattcttccttccaagataatagctgccatatataagagttgttgggacttccttatgaggtaccaaagggaatagaagtaagctttaccgagcttcttgggaaaaggttggcctccctaaaagtcttagtgaagttagttttcgagaaggtaaaatatggaacaaggctcttatgacaaaattcatttgggctttagctaataaacaagattgtttgtgggtgaagtggatcaactctatctatttgaaagaccacgacatctggagctaccctaaaaaataggatatcagctagtatttcaagaagttgttgaatcttcgtgacagtacaaattagaacaagttgagacttgctgtgataggtgcaaaattttgagctaaaaagtactataacatgttgatagaggagactaaagatgactatgaaggtgttatttgggataactaaattacgcctaagcacagatttttttactggcagattgctactttgcaacttctcactcgagacttcttgaatagagttttatccctgcagaatgctctttgcccaatctgtgatgcagagatagaaacacatgaccatgtcttcttttgttgtattttctctaaacatgtgtttaaatacatcaatacttggctgggggaatacaagtgacctggttcgatatctgaattggttaacagatgcaataatatggctcatgatctccaaaattgagtcctgaacactgtgacagctgctactttatattagatatggaaaaataggaatcgctgcatttttgagttgacttgtgcttcttctagaagtttaactttggaagttaagagagttgttcaacatagaattatgagtaagggtccttttaaagcttgccaaaaaaacttgtatttacttaatttaattagaaattggtagtgttgttgggttgtggcagctggttgttgtagctgttgccgtgggtgtgttgtgacttttgccttagttttttgtagcttgcttattttttgaataaagtttcctcttttttttttttaaagaaaaaactttaattactgttgaactcgtttttagacaacaacacagagtttaatgaaatgacaattgcaagtgtttaaatataaaaataacaagaactataaatgacacacaaggattatagaggttctactcttaaatcggtaataacataatcccctttaagttgtatttcttcgagaaatagcaagatcatatgaatctggtcaagtgagtttcttactatctctaaatattacaactaatttggtagcataatagctcttttgagaatacagacttcgatccctgaatagtgaatatgatccactatttatagggaaaaagatgtagaatctttatatttaattacagaataaaacattatatatttgaatgagtcaatctcaccaaattcctaattcccctgattctcgtaattcctcaattataggagtagtgttgattgacctatttgtaaggaaataagttgtaggaatgaatctaaacattttctctcacgaggttcgctggtcggatatttcatttgcttgtttcttttctagttgctcggtaggacatatagcatgttccatccagcactcgtaggatgttggattgtcctagtccatgcatgctctgcttgacaccttccgagtagaccataagttcacccttcgtctgtctagccctaaccatgcttgccacgtgtcacatagctccatgccacgtcattagggaaatttttggggtaacatttgcccctaagtctgttctggtcgcatggggactttttggcttctttctttgcatggttaagtgacgcgtgggcttacttggatggttcatccaacttgggcgccaaacctacccgaagtaaatcttctcctcatattttcaaatcttttggcatgattacaccccttgaaaactgcaccttagggatcgtgtccgatgttacacgttttcctaagtggttttagaaagattcatggtgcatgtcgaaatggcaagattgaccacatttgcagtgttcatggaaattcaagtcatggctgaaacatggacatcgagatctgctgtcatagggtcttaaggaagactcgatgatgcagatggtgcaatcggagttcttctcgtgttaaccatggcatttgatcaaatatgatattaactcgctcttaatgaaagcaccaacctattgaccacaaaaattggcgaaccaacagcggaatcatattaaactaatgcttgctaggtttggccccattagttagcaggtaatgacctactctccttttaattgtattaatacctaaagataatactattcagatcaccataagtgggatctgatatagctct

SEQ ID NO: 119748 - DNA, 1030 bp, Cannabis sativa
tggtaaaatatttccaacatgttcgatgattttttttttttgtattactattatttttggaggggagcaagggcagaggtcctctgtccctcgttccttctacgcatttttggcagtttaaactgccattgcacattcctattcttccctcttgatcttcccacattgcttggatgttttgcacccaatgtttgttattgcaaattgttatattccattcgacattcatccgaagggggcgtctttccagcgattaggggacccccattcccttttttgacctagggtttgatgtgggggctaactactggatttcttatctttcaaatgagtgaagttcttcaagaccttcacgagcacggtttctttgggtttgaccaagaaattctcgattttcaccaagccacctccatggcgtatcccaccacaaccagcgccaaatcctccaagaaggggtgaaagaagctagccactctggaagaagttatgtaaggcctagttacatataagaagttctcctgccgttcccatggttgggaggctgatgaactccattagacactaacatgcgctcatcaactggagaggatagtgactgtgaacggaatcaaatcatctagctctggagtctatcaccgtcttttgaggaacaaagagacgctaaaccataattacaacagttttggagcctggagccagacccaccttatgtctggagccatgctaccccttcaagaatatttcattgatttcctcatgtttgttggactcgcaccataccagttgataccccaagcttactgcctgttgttaggcctttttgtcttttatgctgccaggggttgggtcgctcccagccttgccgaaattttatatttttacaaacttctttctgtccccaagaagggcaacaaatttaatgacgatttttataaattacaagctcatcctgttgggttttgtgtcctaaataaaaattatttcaataaaatcagatttactaattaataaagatcagaaatcacatttt

SEQ ID NO: 119749 - DNA, 1959 bp, Cannabis sativa
tttgatgtgtgtttattattagaccaaactgaccttattataaaattaaaactagccatataataactatacaaaaactaaaactatccatgtagcctaacaaaactaaaactagtcatactgatcttataaaatttaaactagccatactggccttacaatactaaaaactagccacattggtcgtacaaaagaaaaatagtcacattagccatacaagaaaactagccacattggccttacaaaataaaaaacaaaccacttacaaaactagacatattaattttgtttaattctctcatttgtttaattttttattaagtgcataaaaattaattgattaattaataaaaaaaatatttagtactttgaatattctataattttctattttttttttatttttactaaaaattaagataaaaaataaacaaaaaaatcattaatatatatttttttcccgtataactcaactaaaaaaacatatcaatcaccatatttttttttttatttttcatcaatattaattttaaatatatatataactaaaccttcaaatcattataaatatgttaaagtatactaactcagaattatcagttttttattagtcgtttctttctctctcagccactttccttctgagccgaatatggggctttaaaggccaaccattaacaatgaataaaaatcaatgcaataattgagtacattcatctatttgtgtaggttgttttcaaccgacccaaacttttaaaggtattagcatgtaaatcgcggatcattttccagtttgttttcttttttgtttagatgtttcaaatattctatattatgtttttttaatgtatttatcaatttatattagagagtataattatctttttgttattattaattttcatgtttcaaatattctatattgtgcttttttaatgtatttatcaatttatattagagagtaaaattatccttatgttattatattttttttacaatctcatacgttctatacatggtaatatcaatattcaatatctatataactatttatctatatatataactaaagtttcaaagggtgacataacactctaaattagtttcattctaccctaatcattttctcattttttcacactttcttaagtaatattaaatatttaatttaatttgaaaaaaaaaaattcagcccaactaaaactacagtacaacatctatctaagaatactctacataagaataacctctaatatattatataaaaaaaattaagtctcaatttgagttacttataaataaaaataatttttaaattgtaattagttatacattttttaaattatgtattaagaaaatatacctatatataaaaataattatatattaataaaatttatacatatagtttataaatttatttacgaataatttataattttattctaaattataatagatacataattatttgatttactcaaaaataattttattatcatataatattaagaatagtttattgttattgttgttacttgtaattatcctaaattttgtccacctgacgtggcatgtccacgtaagccaaagatagagtacaagtggagtgcagccccgccaatagcagaatagagcctccatgcaagatatagcaaaaccgtcaagcagcgactgaagggagtgaagcgagcccacaaggagctataccaacctccttagccagccaagaggagcctataggccggctaggatgagcctataggctggccaggacatgtggacatgctggcttgccaagaagtgacttccggaccctaagactctgttcgaccaagggaacctgacctcttcaaggaaataatgtaaaaaagttgtcctcaacttgcaaaaggctggcctccacactcaaaggttggcctctcttggtggagctatagttgttggaatttattttac

SEQ ID NO: 119750 - DNA, 903 bp, Cannabis sativa
ggaaaataaagagctctagcttggaaattcaaaaatgggattttgaaaatatgagatagtgaaagtgaagaaagcggttgggaaaatatttttatacctcggtcaggatccttgcgacttgagatggatgacccagttctcctcttccataaagcatttttatcttagatacaaaataagtgaatagtcattagagcattgagatacttactagttgtagagttaagaaagtgaggctattgtgatagtctggctaagagaagaaagcggttgggcaaatccttttatacctcaggcaggatccttgcgacttgagatggatgaacaagttcacctcttccaaaaagcatcttttgatccaatggatggaaagttcaaaaaatacatttaatgctcacccctggcatttattattcttcattgcacatctcgtgtacagtacgcattaaaggaggggtcatctcaattatcctaccaacattacaacttttcctaagaaatgtgccctcaatgcgcacctgttgccaataattgcattataggcaccgtatgtgtgccaatggtacctgcagttaatgatgttgaccaaaagtgaatcactcacttattttgatgataaataagtatttgattataatttgttactaatcttttcttgttcattttgcaagcaaatcacaaagttttaatatttgctcggtacagtcaaacataatcaaagaagtagattcaacaagtatatcaactacttcatacttcataagagtaaaagattcatcaagggatcgagaattcaagaccctattcaaaagaggtcttaaaaagtttaaagttaaaagtcaacatgaaagtcaaagtcaaagtcaaagtcaactcttggagaaaagtcaactttggatcaaa

SEQ ID NO: 119751 - DNA, 976 bp, Cannabis sativa
taagtgatgaaaatacttatgtctctttattgataattaaatgataaagataacattgaaatagtgttttatttagggcataaagcccaacaccattgactccatcttctctcggtaagtgcactacaattaagaggaatgtcaactttcttgacccaaaggttgttgatgaaacggttctttgaatccctcacactacatcggtctaatctaacccttcatcgattgaaaggcatgtagatggaattctccatcacgatgatcaagcacgaatgattaagcttggtccaactggggttgccaacaatggagtggctgacacttacaaggtaaggtcattattaattgtaatataaactgtgtgattatttttctttagtaattaaaacttggttaaaatatttgtagattcttgaagccatgctattcatctggcaaaactatcatgtgttggagaaaaagaacaaaaagttgactgctgataatgctttcctgaaattagagaatggaaagtatgtagaaaaagagcgtgaacttgaaaaaaccattaaatctttgaagggtgagcttgacaagttaaagaaagagttgattgatgagaaaaaaggggcagacgaccttgcctgagaggatgaacaagttgcattgactactgttatcaagactcatggagaactaatgatcgagtaccatgacagaaagaatgaagattgggatgtggctggtgaaattgaaacttgtcgtgcccacatgggttgggatgttgatggaggaaggattgagagacttgtatatgcttttattgaggaagaaactactgagatactttaccttagtactacgaatgattgtgaagaaccccatgtgattagtggttaaaaatacacttttatttattttaaatgataaaataaattgagttttaattgatattttcatgaaattattgtaatatactttataaatgaaaatattt

SEQ ID NO: 119752 - DNA, 876 bp, Cannabis sativa
taaaaaaataaaaggtggatggatcaaagagaacaaataactttgttaagaaaagaagaagaagcggtgttttgtttttttgtggtatgggattgattggtaaaaaagggagaatttcattgatgattgttattgattcagaatcacgccaactaattctttgatcactgcatgttttttctttttctcttttaatattttaatttgatatgatattaattattattttattcacttataaaacactagtggtactgcattagctatatcatttcatatcatattcggaataatcttctcaacatcacattcaaatcttacagttgcgtatactatgctaaaaaaaatattaaaaatatttagcattctttttaaataactataaaaatacacgtaaataatttatattctctccccttatatttgaataatattttttaattaagaaaaatagatattttgttataaagttcagatatttttttggttaggaaccggattctttttaatgacatgtgtgaattgaattgggtggtttttattactagcactgctatttattttctataatgaatattaaattaaataaaaatatataagatgtgatattaatttatatcaatagataaaaaagaaaataggtaaaaaaaagaaaagaaaaaatagtagtagatctgctctgtcctggtttttggtcaaatatttaatacactgctactactcacagtcacaccttttgaaatcttggggcttggacattttatctttcatgtagagaaaatgagcattgataaaattaaattattaacaaaaaatcaaactgttgactttattatttttatttattttattactttgtgaattcgatcgatctat

SEQ ID NO: 119753 - DNA, 3023 bp, Cannabis sativa
  modified_base (2978)..(2981): a, c, t, g, unknown or other
acacccatctggcacctaaggcaccttgccttctgtgaggaactccagcagcaagctcctcagtgacgtagtccactcgttcgactaggacttcgccgtccacatatactggctcctcgacctcgttgtatcccccaaaatttggaagttcagcctcctcctcttcctcagcctcagaaggactgccaggacaaacatcgtcatgttcctcaatttccttgacttcagcgtcccattcgtgatccccctcctcctggacgggcgaatcctgttcggcgttgggtaatgtggcaagctaggccacatgagtattggatgcgttgaccttaagtattattttctttatttgagccatcatcttatggctggacggatactgaggtgaatgccaagcaaccgtgacggcaggaacagcaatgggaatacctaagttccctaaacttggacggccagcgggcaaagtgtcagcagcacccggccagacaacgtatgtccagttggacggcagatagctcctccaacctctcttcaattcctatatgaagcggtcgtatccttctccagcgatctgctcggagtagtactggtgatgtactttgggttttggagtagaagagtgttcactactcacctcccaatcttcagagcttgacttgaagagtctgtcacttgaagaggacggagtggcacgaagacgaggatgatcctcgtacagaagttgaagcaggtcctggtctattcggtgtttgcttccacaaaactcacaagggttcatctacaaaagacaacacacgagatgagtgtttggtcaggatatcaaacaataaacaggcaaatatgccgaccaggagtactcaacagattaaagaatggaaatattcaacaataagtcaaaacccaaaattttgaaagttttgggtttagggtaaaatttcacgaagctttgaataagcaaggtgaaagacagacagtgtgtgatcaaaaggctaacctcataaaacgcgaagtattacagattataacacagaaaatcgcagagttttaaacctagattttctacctctcttctacaggaaggtcaagagcgcatatttgaaacccagaaattaaacatgcaaagtaaaagagaaggaattgaaaacttactcactattcgacatcttagttcagtccaaacgatgctgctcggatgcttttggtagaaatctcacaacagacttgaagcgaaaaacctcttttttgctctgagtttgcttactggagaaattggtaaaagtgaatttgtgaaggatgcacagccctatttataggtagaaaaatgaaaaaagggtaatcatttcaaatgccttagacgcatcggttccccacccccaaacgcaaatattgggaatcaaatataatcaagtgtaaccgtcaaacgtggtgagagaaagttgggtttcgaggcattaattgcgtcagagcattaattagtcgaaaactgaagagacggctggtcagcctcacatcgaatcgcgaacagacgcgcctaacatgtgtcacccattcaaatgaaagggcggctcggatgaagtctacacgcaacttcagaagtctcgtacagacttggggggcaaatgttatcccaatttttacactctgatgtggcatcacacgatggtgacacatggactcaactttgtgtatctgctcgcaagagatatgccaaacagggcaccacatatactcgctcggacaaagtgttcttaaccgggcagtgagcagtccgaacagcacgccaacacttagcaatttcagtcttcgcatcgtgagtcaccaaacaaatccttatgattttgcgattggatcacagaaatatggcaggctgtctgaatcccttgattagtgtattctgtatttaatatgcaatctttccacttatatcaattgcaaacagaagggaaattcttccctcccaagcttatagccctataaatagtgattcctactcactaggcaaaaggccgaaaaacttatctaagaattcatattcagagatactattgtaagagctctaagaaaggggactattttccttattcttaagtaaatacaaaccaagaggattaggttatttttgaactgctcggggctgaacctttacaaaattcttgtggctttatttgatttattatattacatacaccttatactacttgttgcttataatttagactcactgtcgttggccaaaagtgaggtcaataattaaatagattaaatttgcctttatagagttagaattaaaatatggcatttgagaaaagaaaaataagttttaataaagtggcaaaattgaaaaccaataggcccactaaggatttcggccatagggttttaaataaagccatcttttattccatatttaaattctatcctaaccctaatagctataatataaaatagaacattatagctcttattttcctaaactaagttaaccctaagtgacactttattagacaaattagaaaaataaagagaactcttataattttttaattgctaacattcttcttctcataatttcgtgccctagagtgaatgagtatttacccacataattcaagtcattaataaagatagtgttgaagattgtgtagtgttcttatcacctgaaggagaaactaggttcagatcttgatcatactctgcgacaaaaaggatcaagggttagagatctcagctgaaagattcatatttttttgctgtcaccaatgtaagattttctataactcgatatatatttaattaattattttagaaaattcatatataggatgttagattaaagtttataatcaaacatacataatagtaaatctagatcctgttaaaatatttccaatgtttagattttataccctaaataaaactcatttccatcaaatctcatttgttatcaatacatgattagaaatcatttatgtttacatgtnnnntttatgtttatggtttaatgtgtacaaaatctgttaagtcca

SEQ ID NO: 119754 - DNA, 849 bp, Cannabis sativa
aataaaaatataaccattgaatagtcacccttaataaaatatgtctatttcaatatcattttattttccaggatattacctatactacagtcccaaagttactgaaattaaaagcaagcccctaaacggaaaactccattaacatttagactaagctttaaaaatgttccaaactaaatttctaactcaaaatcatcgaaaatttaacaagtataaacatcaaagctagtcccatagctaccaaagaacaattctgcaaagtcagaatctccatgactaatctaaatcacaaagccactatataaaaccaatcgtttttaacttaagatgaaatgattttgccttaagcttttcttcttcgagggttttctatctcgccactaccaaagcttagatcgctaggtttcgggttgaaaactaaagaaaatggatagagggagatgggggtttcgttcaatggatgatgtagggtttgttcgtattgttttgtttatatacttaaaacatatatataaactcatctgacgataagttttaataataataataataatataataatataactgttataataataatgtaataacattaataaaaaatttattattaataattattttatcattttgtagccactaagaaacctttacgtcatcccaattttcgcactctgacgtggcatcaggagaatggtgacacgtggactccacttagaacatctgctcgggaagacaggccgagcaggatgcctcgctggcatatccgtagcaagatattcaacgatccgtgcagagcaaccaacacttagcgaattcaactttcgcatcatgagtcatcagcacaatc

SEQ ID NO: 119755 - DNA, 1706 bp, Cannabis sativa
atagatcttgggttaattgttaatttatttaacatggtggagagtccatgtgcattgcgaccctggctagagatcacacaaggacggtggtgtgggctgctatttccatgctcaacttcagagaccctctgattggagaggcggcggcatgtcgtcttgctttagaatcgactagaatcagaaattataactatgtcttggtggagagtgattcagaaattgttatcaaagcgctgaaaggattgcactttatttggaatactgataattatgtctcttcttgtaatcaactctctaattgttttttatcttgtaatttttcgtttattcctagagtttgtaactttactgctcataatgtggctagatgggctttgacccaaaacattgcaggttttgtagagccatcatcgatacctaaaactatcctttgtaatgaccgtgaggtctaattttctatctatataacgctttattatcaaaaaaaaaaaaaattgatacggtatttaacggaatggtaataatataaattgataaaaacaagcatacgttatttaatctgtccaaaaaaatgtgatatgtaagtatataaaattgaaaatataagatacttatgtggtatattttttaaaagatagtgtaaataatattcatgtattttaattgagaaattttgaagggaattttgtgcctagcataatattaatttaatattagtttttacttattttaatttaataaaaattataaaaaattgctattagttatatgacgtgatcataatagtgctagtattttggtactccaaatattttaagaacatcactatttggcaccaataatacttaatactttctatatgtagtgttatcgatattctttaaaagttatttattttaagttatatgagactcgatacttaatatagaaatcacacaatatatgagaagattataaaagtttatttttttatggtataaataaataatgctaaggagttatgaatttttttgtttttttacatttatatggacttttttataccatatttttgtaataaaaaaaaagatagaaatctcatatttgtaaacaataataagctttgcaggaaaagtctcccgaaaaattgtcattgccgataaaatcacaggaaaagttaccgaaaaagttagtgtcttcagaaaagttaccgtcgtcggaaaaattaccatcatcgaaaaaaaatcactggaaaagttacaagaaatagatgtctcaaatataaacaaaaatagaaccggttctataatataatgaataaaaataaataactcaaaccagttataattgatatataaccgattctgtaacataatgaataaaaacaaataaaataaaataactcaaactaattataattaaaatgaaaccagttctataacaatgttttaatgaataaaaataaataacacgaaataacttaaactggttataactaaattagaaccggttatataacataatgaatgaatattttagaggtagatatggtatgtgtgtaattatttggtgggttggagcatgttgaatgaatgtttttatttgagctattttatttaactggttttgtgtgtgagtttttatcatagttgctttacgaaaccgatttttttgtcttaaatttttaactagttgataaatataatcggtttctttatattatattt

SEQ ID NO: 119756 - DNA, 1824 bp, Cannabis sativa
  modified_base (1779)..(1782): a, c, t, g, unknown or other
ttactttctgtgttgactgacaatacatacaagaatatatcaaaatgtgaaggattttgaatgaatttataaataaaataagtattgacatgaatcaaataacacattaaataagtaatgaaataaatctatttatttattgataaatgaatatacaaagtttacagtgaaatagattttatttagggcataaaacccaacaaaatcttcatttaattacatcagttatcttttgagttttgacaatcaattttcatcttggtgcttttgtggattttatggtgaatctagaatttgtaatagattttacacttagaatttgttaaaatattatgaattagcaagtggaccttgacttggtataagagttttaaactatcttgtcattgatgagcatcaaaaatagaaagaacataacataaaggggagaagaagagagaaaaagattgaagatagtaaaggttatcttgattcattcaatgtaacaatagagtatatatatagtggatactaaccacaatagaatctaactaactctactaacacactagctgactaagactaacaaataacaactagagccaaaagttttaactaactgccagctctaacacctcccctcaaacccataattgaaatgctctcaattttaagtttgttcctaattgtagagaacctttggcttgtgattgctttggttaggccataaactaactggtcatatgctggaacatgtttgatctggaccatattgttgagaaccttctttcgaacgaagtacaagtgaagttctatatgctttgtttgagcatgtagaataggatttcgagttaccataacactactcaaattttcacaccatattgtaggtggttgaggcagctaaatttgaagttttaagaataaataatgcagccgtgataattcagcagtgacattggcaacacttttgtatgctgcttcagtgttggagtgagatataataggatgcttctggcttttccaaattatcaagtttgagccgaagaagatagcaaaaccagtagtggagcgcctatcatctggatctgaggcccaatcagcatcacaaaaggtaacaagatcataagtatgaggcctttctagatgaagaccaaagttcatagtgccacttatgtatctgagtattcatttgacagccaaccaatgtgtggttaaaggtttctgcatgaattggcaaaccttgttcacattgaatgaaagttcaggctttgtgattgttaaatactacaatgcttccactatagatcgattgagttggataacttctgctagttccctttggtgagccgacaaatgaatgctactgatcatgggtgtaggaccctattctgtgtgttgtacttcaaatccaaggaaatagtgaagaggacctaaatttttaagagaaaattatgtaatgagagttaagacaaggtttgtaaaaacattgtgatcactacttgtgatgataatgtcatccacatacacaagtaccaaagtgacagaatctgtagcatagttaacaaacagagagtgatctgaataaaatgaaacaaaaccaagagatagaagtttattttggagtttgtcaaaccatgctctaggagcttgtttgaggacgtaaagagcattatgaagcttgcaaactaatccgttttactaggaatttcaaatctaggaggttgcacaatgtacacctcttattgcaattttctattgagaaatgcattgttgacatactgtgacagtcagtagtcnnnngatccgtaaggggaaacaccgggtaagctgtacaatcccaca

SEQ ID NO: 119757 - DNA, 969 bp, Cannabis sativa
  modified_base (942)..(943): a, c, t, g, unknown or other
ggattaataatctactccaatttctctaactaaagtgtggattacttgtactaatgctattaggtcctaccataacaatatatatacatattattcttttttaaactgaaaaaatcgaaaaagaattttaagcattttattatttttacctgtattaaaacacgtcttttaaatttttaaaatagttaaaattattaaatataataatttttgtctaaatttaataaagtagtctaacaagtcaaagttcagaaaaaaaaaaatctaattaatttatttaaaatgaataaaatatatttatccaattgaacttctattttatttaatgaaaaaaaaaatatttcctatcctacaaaatttcttagaatatgaattttgtaaacatgtctctttaacttaagcactattaattattgatcaatcatttggctgagacgttggaccccatggtggctgaactaaaaggcaattttatttgggcttctattgctagaaagttttgggcaaaaaatagtattattgttgaatacttgactctgacttccctgccgatgccattgctcttatcaaaaataataaatagcacttttaccctctcaattttttaccttattaaatttagccctttaatatatactttctcaaattataacgaatacaaaaatatagtctttctgtttacttctgtttaattttactatttagggttcgtttggattcctgtataagggctccgtattgtattaaattataagagtactatgtttgggtgggaccttgtattgtaatagatattacaatcttaatttttaatacaatgcataaggctctattgtactctccctctcacccaaacttcttcattttcccgttcagctatcttcgccgattctctggcagatttggcctggatttctcggtgaagagcaacttcgtgttctnnggcagatcgatctctcagattcattt

SEQ ID NO: 119758 - DNA, 563 bp, Cannabis sativa
tcttatgataggtaagaaaaataagcactaattgttagaaaaaaaaaattatgccacaatactaaaaattaaccaaatatgaataaaattcatgaattattgtgcatacaaataaatgatcaaaaatttaaaatgaaacaaaatagtgaaaaaggcttaaaaataggttgtgcacgtgtccccatgcgcctcctttttttatagttgttcgtacggcatgtcattttggaaaaatgacgtgtcatttggtggaagaacgacatgcagcaaggtccaactgacccatagttcacggcaaaaaggggctctcttatgtgcaaaacgacatgtcgtttgcccgacaatggcaaaacgacatgtcgtttttaatcacccttgtcacccaaaaagtttccccatgggtctgcaggtctgcaactcggatcagtgcgacccgattcgtgacccggtcggatagaccacatccggccacctaatccgacgtcgtttgaggggttttattctattttcaactctctatcactatccaatacccatttaattcaaaaatacaaaataacaat

SEQ ID NO: 119759 - DNA, 2856 bp, Cannabis sativa
gacatgcaagaacccaagtatagactaaaaaaaaaacagcagatacagaacaatacaacaacataaatagaacatttttaaagatacaaaaaggaaagaaggaggaattttaaatagtgattgctattgaattgattaactgtgaattcggttgctactgaatagatgaactctgaattacattttaaatgaattgatatgataatgaattgtttagttttgaatttcattaaatcgcaaaattaaagttgcaaaaacattaaaatttaatgttaatgttgtttaaaaaaaattgaagaacaaactcttaaaacaactagaaattgtttgatgtataaaaatatattagaaaaaaaacatacatgttgatttttttgtctaatcattatataaaaaatattaataatcatttaaaatacaaaaaaaaaaatataataataaaattaagatcacaactgtatataatatcaacattatatagaatataaagattcaggaataaaccaacattgttgtgtagttcaggctaacaacacaaaaaaaatatatataaaaatagtcacaagcaataaacctacatttggtttaagttctgactaaacaacataaacataaaaaagcctacagaaaattattaacatattatatcatatcctgactaaacaacaaaagataaatataaagtatttttcttgaattcaaatcactctgcttttgctttcttccctctagcttttgccttcgtcttctttggagattttggtgggctttctggctcactttcaacattctcaatctgtttcataagtccaaacttatatagcaacacagaaagccttagccaatactcctcaacatcaaagtcagcatgaatattcttcccctcaatgaaatactcagcaaaagcaacaacaaacgatccacaatcactagaaacaacaaaaacaaaacagcaatataagagatgttaaaataacaacaaaactacaaaattaaaatagaacagaaataattaaaattcatacttatccacttgttcaggaagtacttcagcattgacaatagggaaatgtgcagtaggattcacagatgctagtaaggtataaggaagctcatcataaacacttaacagagagaaaaataatggcaacatgacagaaaattacatatatagcaaaataaatcctatagacaaataacacaaacataaatataaaaataacatatgtgggtctcttaagcaaaccagatttgaactaagcatcaaaggctttctcatcttcatcattgacatcgtctacaacagattgttccaaagcatatatacatttaaccttacttgtaactacaacaggcttagatggtgaactcaactgttgagcataaggagactgcaaatgtaaaccaggctttggtattatcctctcaataggaggagtgatctcatcaatattaacaaaattctcgactgcaatattaggcttagactcttccacattaacaacagaagccaaatcctacataaaagaaaaagattaaaaaaaaatataccttttaaaaaaaataatatatatacattaacaaaacaattagggaaaaatatttgccatattagcagaagttgctaattgtggatcatatggaaccaaagcatatgattgttacaaaacaataaaataacaacatcataacaaaaaaccaacaacataaaaactattaaataaattaaataaataaaaaataaaatacttaaaattttacaacaacttttaaaccagccataacagtatcatcatcctcaacaggtagctggctataacctttgaaaaaatcatcatcaacattttgttttttctcattgttgacaacatcttttgatacctcatcgtcattaccacaatctccttcaccattaccatcaatatcatcatcctgatcattaatgaaacctttttttatcaattttttgccccgagaaacatcctcaccctcttcattctcttcattctcaccctcttcattcacaccctcatcagtctcaccctcttcattctcaccatcatcctcatccccatgagaagcctcctcaatctcagtatcttcctcattatcataatcctcaacatcatgagaatccttgacataaaaaaataaacataaatcaataattattgaaaattaaacaataattaacagtttaaaaacaaattataaacaaaccttgcgaggaggtcttgacaacaacatgctaatttttttatgcacaaattctaaagaatgcatcatattcttaaaaatttcttttaaaatgaaaaattcagcagagaatgtttcctgcttagcagaaatatctgccaatctcctatgaaactctacaaatttaaaagataaactattttcatcaacagatccttgactaccaacatcatcaatctgcacagatttttcttttctcatgtcatttagattcttatccacaaataatctatccaaatgtaatgtcaataattcctcctcagttgggaacaaattcttgaccttaagctgcaacaaacataaaacagaaattataatataaaaaacacataaaataaacataatagtaacattgaaattaaattgttaaaactaaatatcttagaaagagaaacattgaagatagaattcttaaactccttaacagaaggagcatgtgacagtcagatgtgacaatcagtagtcccgtgatccgtaaggggaaaatactgggtaagctgtgcccacatcgcctggggaaggtcaagtgttttactttcacactttcctcagtttcttctaagcattgtttgtgccttatatattttttcatttattcac

SEQ ID NO: 119760 - DNA, 1618 bp, Cannabis sativa
  modified_base (27)..(43): a, c, t, g, unknown or other
  modified_base (91)..(113): a, c, t, g, unknown or other
  modified_base (1562)..(1567): a, c, t, g, unknown or other
agaatttatacattaaatataatcatnnnnnnnnnnnnnnnnnccatgcaacataaaatgatttcaggtctttattaattagtaaatctgnnnnnnnnnnnnnnnnnnnnnnntagggcacaaaacccaacaccctcttcaatgattaactatcctgctactacctaagcttgaattactaggtttcgggttgaaaatcgaagaaaatagattaagaggaaagagggttttgtcacaccaaaagaagaaggtttcgttcgtaactattttgttttaaaaacataatatatatataatcagataagttttataaaacagactttaataataataataatattaatattattaataaaaatttcattattaatagttatcttatcatttctttgccactaagaaatctctacttctaaggcactaggtcaaatcctacatactcctaattactcaaatacttacactataaacttatcattatattcctatcaaatctattaattaaatatgttatgatacttttagcctcccatcgagtccctaaggtcgtcgatcttgaaaatagttttattccataaatagctcatattacattcacacatgctatataaatctccgtaattaataaatctccgtctttctcggtggaacccctcctttcccctggttcttggtgcacagacacgctcctcgatcttcacgaccctaggggctagtttttcccttgggaaacttaccccctgcagacctttcccctttgggagatcagaatgaactttctgtggatcccgtgctattttgttctttcaggtacgaccgtagggctcccttttgggggaggtcttttaggagggcacctgattgaactaggctccctatacttctgcttttggcttcctgtgggatgagaaggtccttcccccgtcttctcttgcacgaaagggacggcatttgggtacacatgaatgcatgttctctattgcctttttcatagcgatcaatatttcttccattcgtttattttgttttttttttgttctaccaactcagcctcatggtcagtagctttttgcatcaatgccaccaatttcgcttgttatttctcaagaacagagaaacgacaatgaagaaagagtaattaatttcattgattgaaaagatattacagaggttcgaatttatacagtagagaaaaccaaaactaataacagaaagttagttagaagaagaagatagttggcctaactaactttaactaacctcactaactaacaactaactaggtactcttaacaacccctcttaaacttagggtggtgaagtaatccacaccaagtttgtcacgaagtaaagagaacctagagcttgagatgggtttaatgagggaatctgcaagttggtgttcagcaggaacatgttgaaccagaatctctttttgcagcactttgtcacaaacatagtgaatatcaatctctatatgcttcgtgcgtgcatgtaaaatgggattggctgagagttgcgcaatattgagattatcgatgttgggctttgtgccctaaatnnnnnnctatttcaatataatctttatcattcaattatcaataaagagacaaaagta

SEQ ID NO: 119761 - DNA, 1005 bp, Cannabis sativa
aataatctcaaataataattaatattttttctttaattatttgttgtattatttttaaataaagcaagacacacctagcataaaacttaatatacgtgcgcacgtagtatgttactagtatatatatataacctaataaaattcaacaaaacataggtgacaaatataaaagaacaaaaatctcaaatcagctgaaatctaatttggtaaaaccacactgatatctcatggatcatgattataatttgttacactaattgaagttcactcacgatcgatcttgacgctacagacgaatattcctccacatcaaaagccatattcctcttggcattgatctcaaatccctcacttcttttctccccatcgattaacacaaaagcttcttctccatgtacggcaccatcgccaatctccagttcatcatcatttaatctaagcggaacaaaaagctgaatgaacaagcagatcaagctagtgaccaccacgtttaccacgatcacgaacagaatgcctcccaattgaagtcccatttgtctaaacccagccgacgtccgaccgctctggaggccgtaaaatagcccaatgtacttgtcccaatcggagaccatgaagaagattcgagacagctttggcgtggcaaatagccctgcgaggattcctcctaagctgccggctatggcgtgggtgtggaatacggccgtcggatcgtccacgtgtctcaagatctttatcttgtcgtgaagcaccatcatcgtgtaccatggaacactacctgatatcattcccattataatggctgcccaaccttgaaccactcctgtatatagtggaaaaagtgcttgattctcaatgagtgtaatttatatatatattatatagctagctataaaaattgtcattaaggatataggtgagtaagaaaaaatattttttatagtattttaatttaccagcggcgggagtgatgcagaccaaaccggtgatcattccctggacagcgcc

SEQ ID NO: 119762 - DNA, 5158 bp, Cannabis sativa
  modified_base (507)..(521): a, c, t, g, unknown or other
attcaccccccctcttggaaacatatcttgggctaacattttattccttttaatccatataattgcaccctaagccttagtttaaacaatataaaaggaacatgatgctctcactcatccacttgatgccttcaaccaaatcaaacctagtattctctgtgagacaactagtagatgagaaagttccttccatagtgatttcacctccttcattgttcttcaccatattcgaacccatagtgatacagtgccatgcccacacatagcaagttaagtactcaatcatagcgagtaagacgatggtaaccaaacccgaaggagagaaagagatcaaggctcagatcttgataatagtctgcgatagaaaggaacaaggttaaagatctgagcggaaagagtcattatattctgctgcaaccaatgtaagtttttcttaaacccttatgtgtttattttcattgttttagagatattcatatttcggatgttaattcaacatacttgttnnnnnnnnnnnnnnntggtaaaatattcccaacactaacacgagattccaaggtaatcaaggtttccgacgaggtggaaaaaaaaactggagaacctatctagagtgcccaatgtgcaagagacgccatcaaggagaatgtcaagctcaagcctgctaccagtgtggggtagtgggccatgtcaaaagaaattgcccacagttgcagcgatcaaaatagaagaaagatgacactttggttcctacttgggtattttctctcacccaagcagaggccgatgcttgtccttcaacaatgataggttagatttctattgatggtacctttttgactgatttaattgtatctagtgccagacattattttgtgtcaagttgagtgattagaaatctgcataaacctagtgatgttttaccaagaggttttggtaccttactacctactagagagttagtaatctctagtagatcggttaggtctcttccactgcatgtagaaggtagaaaattgtttgttgatttgatcgaactgaagttagaggattttaatgttatactggggttggactggccagaaaagtataatgcaaacatcgattgtaagagaaagatggtgaattttgaacctgcgggtgaggacccatttatgtttgtgggcagggttcaaggatcctgaattccaataatcttggcgcttaaggctagagatttattgtgggatggatgtgtcgattttctagccagtgtggtggataccatgaaggaagaaccaatgggaccgaaacacgttctggtggtccgagagtttttggatgtctttctagaggagctactggggttatcaccaaagtgggagattgactttgaaattgatttgataccaggggaaaaacctataactaaatcttcgtttcggatggcacctacagaattgaaagagttgaaggttcagttacagggtatgttggctttgaagtttactagaccgagtacctcaccttaaggagcaccgattttgtttgtaaagaagaaggaagatacattaaggatgtgtattgactaccgggagttgaataaattgacagtgaagaacaagtatcctttaccaaggataaatgatctatttgatcagttgcagagaaagaccatcttctttaagattgatcttcgatctggttgtcaccaattgagaattcaagaggaggatattcccaagacagctttttgtactcggtatgggcactatgaattcttggtgatgtcctttagattaactaatgctccgacaacatttatggacttgatgaatcgagtatttaaagattttctagacagtgttgtagtttttattattgatgatattatgatcttccttgattcagaagaggtacatgagaaacatctttggatggtgttgcaacgtctccgagagcataagctttatgcaaaattcaagaaatgcaaatttttgctgcctcaagtaagcttcttaacgcacgttgtgaacaaagatggtatcttggtgaatctagtaaagatttaagcggtttaggattagcctcgatataagtcttcaaccgaagttagaagtttcctgagaatagcaagatactacagaaggttcgttgaagggtttgccgagatttctacacctttagcataattaacccaaaagaattgcaagtttgtttggacagacaggtgcaaaaatagcttccaggaattgaaatagaggttaattaccgcaccagtgctaaccttgccgattagtgatgagaaatttgtgatatactatgacgcttcaaaataagggctaggttgcgttttgatgtagtctggtaaagttattgcctatgcatctaggcaactaaaggagtatgaatagcggtatctcacacatgatattgagttggcagcggtggtttttgctttgaatgtttggcatcattatttgtacggcgagaaatgaaaatttacacggatcacaaaagccttaaatattttttcacttgaaggatttgaatatgaggtagcaacgatggttggaattggttaaggactatgaatgtaagatcctctaccatcctagaaaagtaaatgttgtagtggatgctcttagtcaaaaagatccaggataagtttataaactgaaaaaagaaaaagatctcaccagagttggctgaggatatgaccagagcaaagattgagtttgtagttgggaaactagccaatattaccttacaatctcatttgttggagaatcaagacaaaccaaaaaattgatccagaactacaagagtataaatagaagcttgaagttaggtcagtaaaggatttatcaatttcatcatatgagttattgtggtataaaggcagggtttgtgtaccagctgacgatagtattagacaagaaattctagacgagtctcataccacgccatacttcattacattcggagacaaataaaatgtatcaagatgtgaaatcactgtacttgttgtcaggtatgaaaggtgatattgtggagtacgtgtcaaaatgcctaacttgttagcaagtcaaggcagaacatcaaagaccagcgggattacttcaacctttaaagattcctgagtggaaatgggaggaaataactatggactttgtggttggattaccaagaacattagggttctgtgattccatctgggtaaatatgaattgatatacaaagtcatctcactttttcccaatgaagactacatatacagtgcatcagtacactgatctatatttctagaagatattttgacttcatggtgctttaaagtcgatcgtctcagatcgagatccaaagttcacatccaagttctggatagtttgcaacaaccaataggtactaaattaaagtttagtacaccatttcatcctaagactgatggtcattctgagaggactattcagatacttgaggatatgttacaggcgtatgtgttggactttgaaggttcttggaacaagaaccttcctttgatagtataataatagttatcagagtactattggtatggcaccgtatgagattctttatggaagaataagtcattcacccagtcaatgggatgaagccgatgaatagagataccttggacctgatgcagtccaaagaacacgtgaggtcgttgagaagattcgagcttatatgcttgcctcgcaaagtagacagaaaaactatgttgatatgaagcatggagatattgagttccaggttggggactttgtcttcttgcgaatatcaccaatgaaagggattcagagatttggaaaaaaaggaaaactaagtcctagatttattggtcgatttgagtttcctaaaagggtaggttaggtagtttatcggctggccttacccctactttatttggagctcacaatgtgttccatgtttcaatgcttcagaaatatgtgtttgatatggcccatattcagagttacgacgacattgaccttcagacaaatttgtcatacgatgtacatatcaaccgctgtgtcttggcttttagtggacaggatccacattttgatcgtgtttgtaaaatttaactctatgatgtaatagttgttttgtaacatgttgtaaaagtttagaaacatggggatccccaatctagtagtattttaaatgaaaatttatgtttttaatttaaataaattttacaaaaagttttaattaaaccattcttttcttaaactattagtttattattataaactaatttattaaagcacagatgtggcatccctgttccatagggcgttacaatgtatgttctcaagtttgcctgagcaaagtttgcaagagagttcaacccctaatccatatgattcgttagatatttatagtggtttgagaataacattaggtttcccatttccctctattggagagtttacactaaacattactcgtgggctttctcatgaagtccagccaataaagaagacaatctgttgactaggtagattggatttgaattgatttggtcaacatcatgttctttaattgtgggaaattaatctaaattaattacataataattgttatggaaagtttcccctttaatcttgatacaatactctgttgtgatctgacaactaatactggaagggtcttccaggaacacattttcttgcttctctagtatcctgatattggagatgtctttcggatacgacttattgaaggaagaaggctttatgagtacaaaactaagatacattattggaaggacatatccaggtgggcttggtccactttatcattgttgtgggtcccactaatgggtcttggatgttgacttggagtccacgtgttcaatgtcgaaatgcggataacatttaacccccaagcttccagaatattgcgtatggtggaagcccacatcactctcttaatttggacatgtggttattaaggaatgaaatttgtgacatttcaaatgccacttgaccgtggaagttagcttctgtctgtgatgatggtatgttcacatgtcagtcacacatgaggaatgttgacctcgattttagccaacaacagtgagtcttatttagtaagcgataagtaatttatagcaattgatatatagtaaagcaatgtaaagatacaagaa

SEQ ID NO: 119763 - DNA, 1814 bp, Cannabis sativa
ttataggcaatctcttcactcaaatgctttctgtgttgagatctgaccgttgatctggtaggtggtcgctccatcatacggtgtgccgagatgacaactcgtattgtctggacattccttacgtgtcactcaacgacctttcctttttggacttcctctccgaatgctcgttgtaccatgagcaagtacgatggtgcacgtgccttgtactatggcctgacgtgggggacgaaacctggcatcataccagtaaaagcatggtcgtcacttttgtagtctaacaggtacagacaaagctctcttgtgacatcgtacggggatacaactcattcaaggtcctttcgtaacctacacaggtgtactcgaggaagcccccagcctccacagggtgctccgcttccgctcctaggaataagagatgccatgattgcaaatgctccatgcgtccacgccttgtgatgaagatatcattcgcggaagccccttgtgggaattggggccgatggcacatcttgatgattatcatgacttcctctgttaggttccacgtgtccagcttacaaaaatctggacaataggataagtaataaacttcaagcgcaacaaaatgataaagaaatgaatcaaagcagtttactctatatttcacttatcttttcaaaatcacaaatactttttatctcaatctctcaatccaaatctgaatacaccatgttctctccctcactctaaccacacaacaaacttacacacaattctcttttcataacttacagtttttctccacatacacgtcacccacacacaaaacacatatttataggaaaaataaacttgggcaccaagatcacttgaggaccaagacaatccaaaactttttttagaaagactcttcaaaatttagtcatcaaaacttttcttttcacataattaataattaccaaaagaaaattataactttataaatataaataaataaataaataaagaatgaaataaataatttatgtgaaagtatatttaatctttcttatttactaaaatcaatttgcattttgaatagaggatataaggtcatttggtacgaggtgttcaaaataatttaattcaaggaaatattatgaaggagtatataattgtagaaaaatgtgtgaactgtgtttggctatgtaaggtaatatgtaatcatattcttattaattaaataacattgtttggtagagtacatgaatcttatatattattttaaaaaattaaaaccaaaatatttttttattatatctatttaatgttaattataaaaataaaataattcattaagaaaatatatttattaattagtaaatatcaaattttgttgtgtttttttaattaaaatggatatttttatatattttatcactatgtgatttatttttgttcactatatcatttatgtgcaccatccgcataaattttatatataatgattatatatattattgttaataatataaaaataactcaattaaaaaaattgaactcacaaaataaatatacatcgtaatatttttgttataataaattttaatattattgctattaaaatttatttattaatttaaaaatgctatttaaattaatgtaatggaaggtaataatttaattctatcttttttaaaatatcaacattactctactcaatggtagttatattaataatggaataacattctaagactaaaccctcaaaacaagataatgtttcatattaccattcccttgtaaacattaaccctgtaaagtcctttttttggcaagttaggtgacaaaat

SEQ ID NO: 119764 - DNA, 513 bp, Cannabis sativa
gggtaaataccccaaggagaagagcgccagagatgaagagctacatcacaagaaagaaacaggtgttcaatggattcttcgcaccttccacaaagggggcaacttggatcttctatgtgaaatctgttaccgatcacaactcttacagggagagcccaagataaaatacaccaccataggatcttatgtcgttccagaattttgctattccagagtttgttccaaagctttagagcgacatcgcagtggagtgctctttccaaggcttgagctagataggtagatttacacgagaattgcccattactttgcagtgtccagatccatctatctatgccggtacttgtgggttggcccctttttagaataactgtaactgattcatcgtcaaaacaatgtttcagcttgggaatatcccattgcccattttcacaaataagctcagaaactcgataaaggttggaaggagtaccccctcttggtttcggacagaaacctttatagtgcggaatc

SEQ ID NO: 119765 - DNA, 514 bp, Cannabis sativa
gtagtagtcgtgcctttgattgagaagcaaatcgttgttccaaggctctccaaagggtgtgtgaagagagatgattggcaagagatcaaagaatcgattccgtcatggatgatcggagccagctcacaagcaattgatcctttcgtttccaagctgtgaattcttgattgacagcacctgtaaccagtcgttcaggaggcgcaattccggtgaacaagagatcatcgaggccatgacctattaccgtgggggcaacctgagacttccaagcaagatagttggagcgatcgagcttgaccgtgagagatgagttgagcgaattctggaacggattccagtgttgaggttgggggaacatagccagaggcttgcccctgattttgagttgcagagcgaggtgggttttcgagaatttgaggatccatatgagacttccgtcaatggcttcctgataccatgtatgaacctatcaatactaagcactaaacagaaaacaattgaatacaatgtctct

SEQ ID NO: 119766 - DNA, 1190 bp, Cannabis sativa
ctgacctatgggaccattaagagttaagacatttggtggagaaaaagctacttcctgagtctaattgatgatttctcaaggaaggtatggatcttcttactaaaaaacaacaggatgaagcttttgatacctttgtgaattagaagaaactgattaaaaatcagattgggaggaagattaagaaactcaagacaaacaatggtcttcaatattgctccagtatgttcaaagaatattgtgtcaaggaaggaatagaaaggcatcacatagctctaaagactcctcaacagaacagccttgcagaaaaattgaatagaaccctcatagaaagggttagatgcttgctaactggagctggtttggaaagacaattttgggagaagctgttaagatagcatgctacttggtgaacaggtgtccctctactacaattgttttcaagaaacctcaagaaaaatggactggtaaggttcctaactgtgatcacctgaaggtgtttgggtgttttgcctatgttcacatcaggcaagacaagttgtaaccaagaacaatcaaatgcctatttcttggctaccctgaaggggtaaaaggttacaaactctggtgtcttgaaccagatttcaaaagacccatcatcaatagggatgttatcttcaatgagaaggaaatgaccttgaatctccagaagaaagcatatgcacaaggtacagacaacaatgttagaactcaaattcaactcaaccagaacacagtgggtagaagagagattagatgtaatattccgaaaacctaattatgaataattaggatttattatatattatggattaattaggtagtaatgagtaggattatgatcctattaacctaatttatcataaattgtaaattttgccataagtggataaataagcgtaatttaataattatggagatttatttgaaatatgtgaatataatataagttatttgtgagataaaaattttttcaagttcggcaactctggagaccccagtggatgccaaaaatgtcacaacgacattagagaatatgattcttagaacttctattttcggaaactaataatgtggatggctgggaacacaatctacaattatggaatcctaactttccttacggatcaaatgttggttccctttatgtattaattttggtactagaaagttgc

SEQ ID NO: 119767 - DNA, 1616 bp, Cannabis sativa
ttgggaaattacgactaaatgtgcagaatccaatcaactcaactttaaacaatcaaataattagcaatgacaagattaataaattgagaacaacgatcggatgaaaaacaagagcaaacagagtattaaaaagaccaaaaacattaaatgcagaaaataaagaaaacaacaccaagatatatattggtttaagactgatagatcgacgtgatcaatggctctactccagttcttgaacaccactgtaattcttctttattgattgagcaagaataggtacaattagggctgaacatttagacccgtaaacccgaaaacccagccacccgccccgacccgctgctgaaaaaagccgaaaaattaaaaacccatgtggtcgggtcgggtccaacccaaaaatgctccacacgggtgtcgggtttgggttttaataaaatgcaaatattaattcgggtgttaatccgaaactcgaaaattaggcacaatggcatagattttcgtaataggaaagttgaaggtacagttttttcctttattatgaaataaaaatgtgtaaaagaggctatctatcttcacatttgtaactgtgtcacgtacaaaagtaggccataatcatcatgcacgtgggtataaaaatagctactgaaaaaagttcaagtcattttctttgggaaactaagtttgttttactatttattttttaaattatattttcatttaaataaaaataaaaatgttattataatattatttgtactttttttgttcattgtgagagtgaaatgacaccaaaccatagaagttttttatgcaaatattgattcgggtgttaatctgaacccgaccatagcaaacccgccatacccgacctgaaatccgatggacctgaccacccgaaaacctggttcgcttacatattttaaacacccaaaatccgaaagcccaaacccgaccatccgaaaacccgaatacccgacgcgtgtgcagccctaggtacaatacagttgagaggagattctctattgagttctcacaaagtgtttcaactctcacacttttcacccaagaatcttcttcatctagagaagagtcttcttacaaaacccaaacccaatctctctcttttctctgcacctctcaatctttttttctctctcaaactctcgatcttatctgaacagagttctccaactcgtaattttcagtcatacctaaaataataagtgaaggtggtatttataggcttaggattaagatcctaaagtcggtgactgcaagagacgaggttgttaagtcagttaaaaataactaactcaaccaactcttttttgagcgaagtctccacatcagtttaagtgccaaggcctccaagaacataaacgagcttccagacttgcgaaccaaggacacttgcagaagacgcttccggatagaataaagtctgttgtagtcgactatcccgatctatcatttcaggaggtagataactagtcagctggaactcctttccatggaagagctagctatcctgaagactgtacccggagtggacatgacagttgtaacgccctaaataattaggcacgctacccaaaatacttataaagccctaatcc

SEQ ID NO: 119768 - DNA, 1061 bp, Cannabis sativa
aaatctttctctatatatatatatttatattcagatatgtagtgatttgtgttaatatcaaaaaaattaatgttagttaagattcattttgtttgtgttaatatcatttcaaacagatttttaaatatatattcataagtgaagtcatagagggtctttttgccttcaatttttttcgacctcttttgctttgtttggaacattttcggttttgaattttcttaaaactgaggctaaacgacctaaataaccgaagctaaaaaaatgtttttgtaatagtagacacgtacatgattatttttaggatgaaacggttggggttgttgctcaagataggcatgtcaaaaaaaatccatttagttagagcggattggagctccgatctaacgaattccgaaacataattatatatagacctcctatctctttttgccttaaaattttttttaatattagtctatataggcccttaatgtctaaactttgacagcaaaatagaacattttttttaatagaagccaattggttgaaactttctaaaacatgatttaaaaacttgtaaaagcgacagttgtagatcaaaatataaaatatagtgatgagtagttatattattttaattgaaatttattattttaaaaaagagtgtcatgtgataatgtttgattaataatttattttaagtgtgcatgtcattatttgaaaaatatgaaattttattaaaaaaattaatttgagtatgagttactcccttttttttattttaattcttgtatgccatttctcatttttgttagactttttatttagacttacattgagttttataagttttattaaaatttaaattgattggatagttttttgctatgttagtccatatgttagtgatcaatagttattgggcttagtatatatgtgtgtaaagtctagttatagcagaagtgtgagcttttttagttaactgaagtctttgatgagtagacccaatctaactagggttatgtagctaagttccctctctaactctatagatacatattgtctcatcacaattgtat

SEQ ID NO: 119769 - DNA, 2335 bp, Cannabis sativa
aatctgattatattaaaatggattttatttagggaacaaaacccaacaactaaatctttaagttggagccacatcttctcatacgttgtcttaaatatgatgtttgaggagactccattgtctatcatagtttgggccattgtcttgtttgctatctgcacgaccaaggggtcgttgtgcgggaagtggacgtgaatagcatcttcttcagtaaaagttatactgggttccctaccgatggtatttttgcctttctctcctctacaaccagaactgtttccttttgttcatgatgtatggcttgggcatacttttccgtagctttgcccgagttccagctggatgtggccccccaataataacttgttaatgcatgtctactggtagaggcattaatagattctaattatcgtatgtttgggcagccctttgattctgattgaccttgacatatttttacaaatgtgggttattttttctgatcaagaattcagtttctcgcttcaggttattgcactcgttcttgtcatggccataatctggatgaaaacagcagaacttggacgtatctctcttacttacgtccttcttcatgggagagggtttcttgtgcgggaccatagactgggttgttgtgtaaattgtctctaggtcgtcagtcaggacaaaaaaggcagtaaactttaaggcattttctctagggttgtgtttggcattaccaatgaacattcctttttccgttaccttgcctgccactgttattagacctcttcccattcgaatttgagctgctacggcaatgtggattttgagcaggtgcccctgccgaggagatacgttgctgacctttcttatgtccgactgtgtccacacaccaacagcgtcctcgagcttaataaatccatctgctcgatctataaattctgccatggaccccacggggccaaaccttttgatatcttcccacaattcctcaagcaacttaatgccccccagtatggcagccagcctttcctctttggttaaccccttaacctttgtagcctttgtcattaacctattatataatatttgagggattctcctgacactttttttacctcgaccaggtcttttaggtgcgaggggagttgacgggaggaggagaactgtgtgtggaattctgaggagaaagtctaccacaaattaaaccttcctgggggtatcttgaagtaccattgttgggcgacctctgcaagtgtagcagggaatattctacatcttacatcacctcgtacccactgcaggtccatctgcatctcaaaatattttagatgtgataaagggtcttctttgcccgtatacatcttctaggtcggcatcttgaactttaggggtaactcaagggcttcaatctctagggagaaagtttatccgcatgctcggttcagctcaaaatcagtgagttttgggccggtcaggccttgtaccatgtgtttcagttgatccaattgtgcttgcacaaatggatgaattggttcatcctattaactgacctatgtcacatcaggatctcttggagctgggtcttggatacgggtgcctggttggacagttggttggacgtattgttcgtctgggccccttcttctattctggtcagccttgaggtcgtgtgcagcacctaatccatcaaataccgaggtactaggtggtctcggtgtctgacttgtttagccagtaggttggttagaattttcagtttggatgaagttattaggtataactccacccaaagggtagtcaggaaggatcgggtcgtctactgcttggcccataggttagacctatggccggggattggacagctaaccattataagtttgggtggtaggcccagtagcatactctgttgtattgctcagtgggatactagacgcggtagctggttgttgattggcaacttggtaggccctccttattagtacggtggccttcctcgtgcgatcatcaatgggtgcttgctgagccttcaaagtttccatctccctgtccctccactctataaattggcatctttgctcgtcaaatgcgaggtttatagcagcatagagatcctcctcatcatgatgcaaagtattattatggccttgcatgagtccaagggttgtacagaggttttggatctcagtatcatccctaaccgtcctccgagcattagtggtggacgggacttcaatgttaggagtggattagttggctgtagaactagtattccagtctcttgcacacctggtgtgatcccagccagaggggaagtcacaccatggcccacagtaggtggttgtgtattggc

SEQ ID NO: 119770 - DNA, 2009 bp, Cannabis sativa
  modified_base (934)..(935): a, c, t, g, unknown or other
gaaataatgaaaatcaagcgtaaaactgctccaaaagacaccaatagacgagataacgctaactttaaagacccgaaatataggttaattataacctaacaatattatatagtgatagacttaaacttgtacttgtaaaatttagtttttacaaaaattaaattttaatatgtttttctatatctacatggatattttaataaaagaataaataattttttgaatcgcttaattagttttaatattttaatttcctttttacttttttgatcatttaaaataatttttttttaagatctgaattaatttttttaagatttactaaaaaaaatgttaatttttctcatttttattttgggtacgatttaatagttgtcaaaatttataggataaagttgctaatttacaatgacatgtcagcatttaaacggaatatagacgaaacttaactgaatgactaaatttctgcaaatgtaaaagtttatgggaaatttttaacaagccgtatattttaggagagaatcagtattgtcgaaaatttatgaaaaaaaaattgttaactattcaacaaaatataatattaataaacccatagtgtatgttctagaatggctaattaagatttttgcccctcgaactttgacatgtactaaatcatgctcctgaactttgaagaccgttaaaaaatttccttgaattattgagattgttgaatttaaggacttctgtctaattttagtaagaaaagtttaacttggatgaaagttcagggggcatgatttgacacatgtcaaaatttgaggggcatgatttgatagttatcaaagttcggggagcataatttagtacatggacaatcactgaattaataaaattgaatgaaattggacaacagtccttaaatccaataatttcaatagttcagggagaattnntaacggccaaaaaaattcaaggggcataatttagtaatgtcaaagtttaggagacaaaaatcctaattagccttctaaaatatagatataacagaattcgcattatccaataatgaaattttttgtactgaaaagagcttttgatgggacctttatatcttgtgtgtatttgttacacgaatcccatatcggttgtgtgtgaatttttttgaggtatttaatagtgatattgtcaaactcatattataatcttttagtcaatttttgtgtttgaaaatactgatggaaacacacatgaattccacatctatgtgaatttctcgaggtatttacattgtagaggagtgctactattaaactcatattagcttatgtattataaaaaaaaatatttatacctacattataattattcctactatatttattatattttctagaagttttttttactattttagtttttaattattaaactaaaaaatatatttttaaaatagggttatttgcggcataacctccaatactttcactttacttgcacttaacccctaaaactcaaattttagcggtaaaatccccaaaagtaggaaaccattagcaatttatagtttccatctattttaaatgttaagtttcatgttggactgtccatgtgtacatctatgtgaacacgatgtattttattagtccatgtaagaaattattttaaaaaattaaaaaaattaaaaaaaataatttgaaatttaaaaaattataaataattttttttttgtttcaccttttttcatttgaaaaaataaaaaaaaaattgaaaaacaaatatttttcttatttttttttctttttctttttcctcaaccttcttcttcttcagccatttacctcaatcccgaaccatttcacctctctctctctgccaatgggatttgcctagagcaaaccccaaactccaaccaactatggcacgtttactatacagtaatcagaatcggaataaattaatggaaaaatgtaacggaatgaaaaataatcggaatcaatatttgtaatagattgtttactaaaattttt

SEQ ID NO: 119771 - DNA, 747 bp, Cannabis sativa
  modified_base (720)..(722): a, c, t, g, unknown or other
aaattatgttgtgactaaaatttttttactaaaagtagcagttttttgtagtgtgaaatgtcaataatagtacctaattaaatgaacttttaaaataattaaatctaatattttgtgtcatttttacaaatgccactattaatttatgctagtgacatttttataacgttactaacaaatctaaatattcacaaattaatgacaatttcgacaaaatatcactaaaatatattaatacttacattttttttaaaatgtcactagttaaaatgtcatttattcttactatagttacatttttttaataaatgtcattaaactattattattgtgatatatttataaaaaaatattactaattgtgattttttgtgtagtgaaatatataaaaatatatttaatgtatcatgactataaaataattcaagaactttaacaaataatatttatcttgagcagagactcgtgttgataacgtattataaaataatatatatatatagaggaagaaaacggataacataagataaagagaagaagagagataattttcttggtattttatttcaataaggtgatcccctatttatacgaaaatataatccacaaaggaaactaagagaaaaaaataatggtaattacaattaaaaaaaaaaagaataattacataaacttttagtttttgtaaaatttttatatttttacgttcaaagatttttnnntttttttttacatttttacggcttt

SEQ ID NO: 119772 - DNA, 1518 bp, Cannabis sativa
taaaagtgggataaaaagttgtaacatatcttttatcccactttttatttttgttaaggataaaaagtgggataaaaggtctcctttcttgtagtcatccgaccacagtattgtattcgtagaacctactttactgcggatgaatatttaagatattcaaactcatctaacatgcatattattccacccatccgaccacagtacaatatattacagaacctacttcactacgaatgaatattcaagatattactagttatataatttataagtaactagttagtaataaaaatacatgaagagcaataaatattattaactagttaaatagttgcaactaactatttactagctactaaaacaataaacacatgaaaaaaattgaaaataaaaatatgttaaaaaatagaattaatttctaaacttttgtttctaaactaattttttagaaattaatttctaaacttttattttattactctcttatctcattctaattcaaaatatttaacaaacctatcagtttaaaatattcaatatatacaatatataaaaaatatacaatataattacaatattttaatacatacagagacattataattacaaaatatatacatattcaataaaacacaaaatatatacatatattccattaaagtttagatttttaccttattactaaaattcggccactaataccgaccaaaattcgaccaccaataccgaccaaaatccggccgccacacaccacaagagcacaatcttaaaaatctagaaaaaccctaaaaaaatttacaaaatcaaagataaagcaatgtaaattactaaaattagagattaggtttatatcttaatggacattgagattcaacgatttctccaccaaaagcggtgcccggagctaaaaccaccacctctaagcttgttttaccctgaataacaaaacaaaagacgataaaactttagggatatgtttgtgggtaagaaaaatgcaagatttaaaaaaaatgagtaaaactaaatgaaaaatggagaaatgggggatgtgaggtggtagttgagcaagggtttcgtgaaggggttgctgatttttttattagggagaagacgaagtgaggaatacaaagggctaaatagagttatataaatcgaatagtgtgagttattttgtcataatcgacgccatatgtggtgttattaaaaatttaacaccatatgatggttgttattttgtaataactgacactataaggtgtatttattaaaattttatttagccacactctatagtgtcgcttgtttattattaattaagctgagaaaaaacacctttaaaagcttgatttgtggtagcgtggacctattatcgcccaaggagtgagcaactactataaaatttattgttgttataaatactataacataatatagaatagatgagaagaaagaagaagatgatgaagagagaaagagaaagtgaatgagaattttagagttgtttattccaatggggtg

SEQ ID NO: 119773 - DNA, 3201 bp, Cannabis sativa
gttttctggtataggaccagaaaagttatttttggatagatcaagtaattcaatctcaacatttggtggaagaggaataggcggccctccttcatcaacaaactggtttgagctcaaatcaacatctgcaaatggagctatgttgaatggacttggcaattgacctttcatttgattggtggaaacatttaacaatgaaagattagatgaaatttgccaaaaccaatgaggtatggaacttgaaatgctagcatttgatatatccaagaatttgatctccttttgtgatcttctaagccaagttgggaaagaagaaggacctaaatggcatgaacccaagtcaagattccatacttgaaaaggaggggtccaattcaaaccgaaagccagtgtaaaagagttggaagagagatgaacatatttcaacttatgcaactttagaaaatgtgtttcggttatgacaccactcaattgattgaatgaaacatcaaaggaagacaatttagatagttggcctaaactattagggagtgtcccatttagtctatttccggctagtcctaaatttgtaaggttttgtaatgaccctaaagattttggaattggaccatgtaacaagttatagtccaaactaagctcaacaagattttgaagttggcctaaccattgtggtaatttaccatccaattgattattgctcaaacttaagttctgcaaactaggaagaggacttttcgaatgacaactttgtgttccttcaaggaattcaggtaaagttccagtcaagttattacctgatataccacaaaatttcatattgcagagtttaccaattgagcttggaatctcaccttgaatttcattgaatctgagatctaagtaagtgagagatgtcatattcccaagtgaagaaggaagtttcccatacagattgttagaagccaaatcaagaactttaatactttcccatcttccctgaaaaaattgagaacaacttgcactaagattagtattcccagccaaatgcaagaactgcaaatttggaagatcggcgaaaccaagtggaatccttccatacaagccgccataacttatatcaacactcacaaggctgctgatgttggctaaccaataaggtattttcgagttgatgttgttaaaactaaggtctaaaacagcaagtgatgatgttgaaataacaaaagaaatagaaggaattggaccaattaagttacatgaagacatatgcaactctgtcaaggatggaagattgtttagtattatcataatccaatctgatcccaccattgaaaggtcaactctattcatcacaagatgttttaaagagactagacctttgatccattcaagattatcaacatataataatcccaatgaatctaaatcaaggtactccaatctagagagatttcctatatttataggaatggaaccactaaaccctgcattagagagatttagatacctcaaatgcttaaaggatccgaaaaattcaggaattgggattcccttaaatgagttgaaactcaagtctaagtgtctcaatgacttgagttttgtcaatgaaggccttatttccccactaaggttccaaaagccatacctgttgggatatcggttatgaagatcaactgtaataactgctcccgccttgtcacaacctattccccgccattgacaacacttgcttcctttccatgatccaagccagttttgtggatctcctagaccagttttgaagtcaagaagagaacttttctcagactccaaacaagccacattcaactgagtccactctcctaaaataaacaagagaatttgtaacattagtggaaacattgtaaacacttcaaaaacagacttttgtgctatgatgaattattaaatctcaacttataatgattcacctccttggagaacaagaaaaaaggttctttttttagcataatttaatgaagttgtcatgacaggttgaggttggtatggactgattagtgacttttgaagcaaatcatgggaaaccacatagaaattaacaagttcatgataatgtaaatatattcatttgatattgattgagcaatagttttattaattttttccttaaaaaaataaatatacataccataaagtcttaatggactaatataaatatgtaaatggctgttcacttttcaaccttatatgctaattttcagagggaaagaaaagaaaaggtcttcatgtttatggctttggatttttatataaatatatatatttataaatgtctatattatattatgaagacttaaatttggattgctaagcagacaagataaccacacctaaaagtttatattttgaaaaaaaaaaggtaaattttttagattattttaatttaaaatctctatcaattataaatggggagtttgacaaacaataacatagttttatcatatttttttcacaaaataatttttttatttcataatattcttaacattttgacaaggaaaaaaaaactgttttacataacttgctggaaagaaaaaaaaaacatatctatttatcatatgtttttaccaaatactcatcaattatcctataatatttttgagtgatactgtgtgcattagaatgtgctctaaaaaattatatgtctgttagttttttcaagtaattatatgtatataaattgaaatttattattttaaaaagaacttacaccttaatgtataatatttttttgtacatatattatgtgcacaaaaaaaaattagaaaataaaaagaaaaatatgagccaccaaaaatttccgaaaaaattaattacagcaagaaaattttcaccataattatcttttttattacacattaattaaatataattgtaaaataattttaatttataaatactttttttatagtcaaagtctaaatataacctcacaaaatttattaaaattaaaatctctgatacacataatggaaatatgacttacaaaacttaatataaattaaagaataataaaaaaaaaaagtaaaaataaaaagtaatttcttctatgtaatgtcattgataagaaatgaaagggaaatttcaatttttgaccctaataaaataccccatttcaaaatatataccctccactaatttatacaaattaattccactattactcatttgtacccaaaatac

SEQ ID NO: 119774 - DNA, 2765 bp, Cannabis sativa
tatatgggacccgatacttagttagaccaatagcgatattgacacataggagggcgctaagcaccactggtgccctttagcatgtctcttttttcactccaataataagcatctattaaaagatattttttaaaatattttcattggaaatgctgagaaatattggtatcaaaggcagagcactcttttattttgtggttggccaatatctgaataggctgaaaatataggtgagattacatcgatttggactgaatgttgatcggaattgctgtatttgtggtggccggcatcaagaggatcttgcacacctattttttgagtgtcatatataattattaccgtaaagaatgtctgccaaaaattctggtgtggcttgggcttgggtgacgtagtagatcgaggatgttgaagtagtggtgagggtaagatttatcagtgtatgcgattacatatatagtacataccatattaatttggagagttggtaacatagctttttgggatagtaaagtgttgagtattatattaattgtacagttttgaacattagaagagacatacatgctcgtgtgagcaaaggaagaatttggtggttgtatatttggttttggtgaaatagaatttgcttacttacttactttacccaaataaatgaatactatgatatatatatatataatttgaagtggaagacttataataagcttattacgacttaaactgtttttggaaaatgtaccataaatattaaagatatatatcgatcctcccaactggggtcgctgctacaaattgattaattaattaattaatgatttaaaagccatttggttgttcgtatcgtattaattatgagcaaatggagtacgtctgaggttggaagagttccatatattaattcatgactggaacacatccttggttgatcttggaatatgaattgaccctccgtacgtggaagctacagaaggaatcttatataaatactttgaggagtttcaaacatgcatatgcatatgatccagatcgagagagccagctagctttgtctatatatatcctcaccatcaacaatactacaataccagcctttttatgatgtactaattataattacagtattgttatagagcattaaaagtacttagcactactacgaaatgatactttatagcggctttttattataatctttattaaaaaaataaataaaatttgatattaaattgccctattaataacattattacacctcataattaaggatattaagcacatttagcatttctcttataattacggcccttgttccaataattaataatataaccacttttaattaattataagaaacatatatgtatatattataaatactaaaaactactagcgcttagcacctttctatgtattaatatcactattagtgtaattaaatatgagtcgttgtaataaattttagaaaatatcgtaaactaattgcaaatgcatcatgtcgtctagaaggtactaggcactactggtgctcatagcaattctctgtctcaagcttcagcaagatcttaggcgaagcttgaacaaggccttaagagaaaattaaattacttttttagaaaaaaatattaattatattaaaatttattaaaattttattttcaactaaaagacacataaattaattaaattcttattattaagttattatttttatattaatttcatattactcttcacatattctataatcttcattgactatttttttttaaagaatcttccattaaaaaaacaaacaaacggtggatactgtttgtttttggttggaggattttccacatccacttataactgttatataatttctttaaattaatataatagtcttttctaaaaaaaatattatgatattatttaaatgtgatttatatataaaatttcactttagaaagattattaattgttaaatgatagttctataattttagattaatttaacgtaatatattaatgttcaaatttattgaatattttatgtttatcactcatatttggctgagtattcaatggttacaataaaaatgtaatcataatggttgcatttttttatgacatgctataacaggtcactaacaaataaaatttctatttttaaacttaaattaattatatacctaaataaattaaatttttaattaaaatatttaataaaaccttattagaaatttatatttatatatattttttagtttaaagaataaatcaaattaggttaatatcatgttacaagtaatttattaattatttttagtaaatttttcaattaatcacaaccgtttaataatgattcaacgactaaaagtaaatgtaaccatcatggttacgtatttaatgtaaccattaaaacccctctctcgcgttttccctcagccaccaccacccaccacccagcaaaactagccagaccaccacccagcacgatctcaaccggacctcaaccacactagaccacaaccacactcagccagaccaccaaaagtttcattttcctcaccccaaaatcaatgagtaagtgttttttatacaaaatattgttggtttttcattgtattgcaaagatatacacattattcgttgtattatgttgtttttgtgacttgaaatgaaagtagagttcgtacacgaacactgtttcttttttttttttttttttgcactacaagaattatggttaataccaacgccactattaccaacgcctaaaa

SEQ ID NO: 119775 - DNA, 866 bp, Cannabis sativa
  modified_base (674)..(688): a, c, t, g, unknown or other
atatgatgacctaatacattgtgcatataatatattctcgaatattaatttttgtgagttccaaaaccaataacatattcttagtactcactttccaatgtggtggtccaatgtctcttcttaatctttatatcaaaatattatttgagaataattatattacagcctaaaaaatgagacatttttcaaaaaaaaaaaaaaaattacttaagtgcaattttccagactattattcaattaggtataattgtttagatggtaaatgctattttagatttgatattttataaaaattattgattaaatttattattttattaaataataaaatttacattttgtattttcaaaatagtacgaaaacttaataaattgtactaaaagtaagaaaattaggatactacattattgtaaattctatatatataatattagagagtagtaaatcagtcaaaagttttacattagtatctaactattctatgagataaagtaacgaagaaaaaaacattaccagctgagtgtattattactatcatagtataattacaaccacttattacaattttttagtcaattttcacattcgaaattaaatgtcgaaatattttttttttaattttttttttcatagcggcattcgttatagttatagtatcatccttgtaaatttnnnnnnnnnnnnnnntagtttacagtaccgaaaacagagtttttgatatttcagtttactacgtgcgttcaaaaaatatcaaacgtatttttagttatattattttatataatataatgtttagattaaataattaagtgtgacaaattattaattttgtataattgtaacatacattatagagttacaaaat

SEQ ID NO: 119776 - DNA, 1300 bp, Cannabis sativa
aaaaaaaaatagagaagaaatagtaaataattaataaaaagaatcttaatgtttgaggaaaaaaataaaacactaaattcatcttgccacagtaaaagttatttattatttttttgaacaaaaattgtgaaattattagtcacaaagaaaattaaaaaaatagtttataaagactttacttaatatgataaaaaaaaaagaataaaaaaaaaaaacccttacaaagagtatgttcagtgttgtaatagtctttatggagtttgggatcactaaagaaagcatcaaataaaatagattaaccacatgatccaaactttattcaataaggatttaaaataaatacataatgaatatatattatcgcaagtcatgattgtatattaaaatctccataataaaaatcaaaaatatatgtgtgttatgtatatctttttgagaaaaaaagtacaaaaaataattaaatagagagtgatagaaatataatgaagaatggagagtatgagaatgaaaaagaaaaaaattacaatagtgtttttatcactttttatgaatctcaagagtctatcattaaacaaatataattttttctatatcaaataattcatactaattaatgagcaaatcatgaattttttgaaattattgatgacagtgaaagttgtcgacatctaagaaaaaaaaagtttgtatatctccaaataattatgaaaaaatatttgaatgagtgtgagaaagattaaggatctatctatttatatatataaattattaaaagaaaaaatagagtaaatattgacaatatcatatcatgcattgtccacttcctaatgttaatccttcgatcaaattatcaataaaaatcaaccaaactataacaaaacaacatcatcgatattatcatcatcataaataacattttatacccaataaccataatataccaatgcaacaaacacttaatatacccaaaaatattaatgaagtataattaaagtacctggaatcgtaagtttccaaaaaattaaaacaatataaaatatatataggtttaaggttatttgtattttaaaaattggagaattttaaagttagatatatatatatatatatatataaagaaaataaaaaaaaaatattatttatatttagaaacctaataaaaaataaaaaagtgagagaattaaagagagaaaaaaaaaatttagagagattaaagagtgtcacgtcaccgcctcatacttctcctttatagatatatatagatacaagtagaacctctatttaagaatactctattaaa

SEQ ID NO: 119777 - DNA, 1072 bp, Cannabis sativa
tatccaaccggtgcacttgacaactcaacatgtcccaaatgacgataaatctatcgtccacagtgtctaaaacttttaacgaccttttgcgactgtcgtcgtcataaggacttaaaacaatttcccactgttcaatcaatgtgtcatacacttcaaccaatgtttcgtttttcatacctccaatcacataaatcttgttcctcactatagctatgctagcttcagagcgcggtatacgcatgcttgggccccgatgccacgtgtgggaacgacaatccaatatccatacgtcagaagagcaaaggtgctcattcacgcggccaccaatggcatagatgttggggcccatagcagcataggcagaacccgtcaacttagacgggttcgcctggattcgagcaaattgaagacgatcgaggtttttgtaaatagcgaaccactcattcgtgtcaataaaggcgaaacgaaccttgaaatatagcaagttttcggtgaagttgagttgagatcttatggcgaacaactgcgaagatgagatgacagatctgatggattttgatacagatgagaggattgcatggtattgtctcggtattcgagctagaatgtccaatgccaattcgtttgggagacctggaatgaggatagtggtggccattgacattggagtagaaatttctaaaggagaaaaaaaaacaagattatacaagtaattatgtaactttggggaatgagattataagggtaactgagatacgttaggattttacatcgactaaaaaagatttgagttatagtttagtgtaaatgtaacacatacatttatttatactaaataatgaaatttgtgttactcaaaaacataattcgtttataattgtggctttacatatgtaaaaaaaagataatatctagcttaatttgattataaacggttaaattttaaaatatggattaaataattaatttatgtttgaattcaaaaattaaaattaagtattattattattattagaagggatatttgtgaaaaaatctggaaaatttataaaaatactggaatttaggttaa

SEQ ID NO: 119778 - DNA, 636 bp, Cannabis sativa
tgtgaagatcttaatcccttttatggtgtttaacatgtgaaggtatcctttatttgcatttcccattttttattgccacgaatttttcacattaatatttaaattctataaatatgtagtacatttattgtagagtttttcatccctaaaatatatcaacatagaaatatactataatcacgagtctactattaattcaaaccaaaagacgactttaaggaagaaatataaatatgatgaatttattagcaaaattgaattgacaaaagtgttttatttttcttccttttccattacatcttcgtagctttttaattagaatttgctatattatgtcccgtataatttacgcagaagacgagatgacttggactttgtctaaccctaattaatgttcgtaacacaaatattatacataattatatatattagtattagaatataaattctcaaaatataataaataaaattaatataatattattggtaatatcataataatatatataattttctttctgtcattaaatactggcaacagtacgataccacgcgtatatacatgtatatatactagtaaaaacttacgtgcgatacacgtatactaaattttatgctagtttttttctatattat

SEQ ID NO: 119779 - DNA, 574 bp, Cannabis sativa
aataataataataataaaagattaggaattagtaggaaaaactttattctttctagattaccgtagcagtttttcttttcaattatttgcaaaaaactaaattagtgataacatagaatattagtgcttcaaaaacgaaataaaacatagacctagtatataatagtgccatctattatatatgcatttcacaataggattataggtacgtaaccaatgggatttatttatcagtcaagcaccttttcctgtttataaaaatgtaaactatatatatctaagtgaaagatataaaaagattataaataggttgtattatttagaaagaaaaggagagacaatagaaaatttatttcatttaaattagaagtactcactatatgtaacatattaaatactaaaacaaatatcaaactttaaattactatgactattaaacctaaaaataataaacaacattacacaataggaagcaatgggtctgtagagtttactactttgagttttgatcaatagcgccttaaagttcaaggacgtgagtgttagactttttatttgggcttacattaaattt

SEQ ID NO: 119780 - DNA, 1071 bp, Cannabis sativa
ttttaaaaaatactaaaaatataaatttatttttctgtaaacaaaatttataaatttgtaataattttttttaaattaattttttaaaatttgcaattaaaacttacaagtttataagcatattttacaattttttaaataatattttcagaagcatattcgattaaaatattattataatataagaagcattttccgaaaaatacaattcttataatattgtttggatgttaactatataatgaataatattcacactaaatttcataaaatgactatatatacaatcacacaattatatagcatatacataatttttaatttacatatattttatgtatatctataattattaattcatcatgactcattatgagactttgcaagaagtagctaaaacaatttgtctatattaatatgatattcagctttatatatttatttatttatatatgtatgtgaataaatggttggtaatgtaagtaatgttactttattaattgacatatatagaagaatttttgttgtttcagatgaagtcttaataatatcatcaacctaccttaatatcatatatttaagttttcatgtatacatataacatatatatatatatgtacatcattgatatatttcaacaacctaagatatcaaaaattaaatatacttgatgattattttttcaaaatttcattgatcatcagtaaatgtataatctgcattttgttattatgatattttgtaccatattcatttgacaaatgaaacagtgcaagtcaatatatataaaccttaggcatcatcacttctttgttatagcttattctcattatttactatcacaatataatatgatcatatctaattagattttggtacgtaattggtaattgtaaatattttatgcacatcacttcattttttatactttttttggttttttttttaattttgtttttttcttatagaaatttataatataataattaatgggataatctaaatcgcaactaaaatttatatagtcccctatataaaaactactgtagcaacccaaactgtaaatttaaa

SEQ ID NO: 119781 - DNA, 899 bp, Cannabis sativa
  modified_base (850)..(855): a, c, t, g, unknown or other
ccttcgctatgacattaatcaatctatgtgtcgttttttttgaatctgtaataaagaagatttttttctttctttttttttttttttttttttccatggttatgacattaataaaactattgatggtgtcgtttttgagcctgtaataaagaaaagtctcattttaataaaaaccattaaatgggagaagtctaatttatgatgagaatttcaatgggggctccttcgttaagattattttgaataagtatagttgaaccattatgctgtattaaatgttatcatgtaacatcatattgtaaaacggctatttatagcgatatgaggcatttaatatattggataagttagtaaacaaataaacattgtagctggagttgttaaataattgtggaataatacttaatactaaattcatgagtacgtatagtatataatataaatgtttttaattacatagcaactgacatgagaagtgatttgtcagtaactattattaaataaaaagctaacaattattgaagttttataatgaagactcaagagtgatcctgctacggctggacctggagtggactagtaggaaattatcttttaagactgtagttccaatctccaactactactttatatttagatttatattctagtttactccctagtctttaaagcccgataacagccaacacgtctagtttgcacttacgctttgagctttaaatgtcttatccaattgggattgggttcagcctaagagagcccaaacagaaatgatccaatccggacattggaaaaactagataattcataaaaaaaagtaagttcaaaaatgtctcttttattaatcaannnnnnaaatttgcttctaattttatatttatttgaaacatacctctttt

SEQ ID NO: 119782 - DNA, 1153 bp, Cannabis sativa
  modified_base (40)..(76): a, c, t, g, unknown or other
  modified_base (119)..(125): a, c, t, g, unknown or other
aaggagtcattatattcctctgcacccaatgtaaggtttnnnnnnnnnnnnnnnnnnnnnnnnnnnnnnnnnnnnnttcatattaggatgttaatgaaaacatacttgttagtaaatcnnnnnnntggtaaaatatatccaacagtttcttcctatctggtctttaaacattcggttgactaacctctgataggtagctttgacatttttcaagccaaacgacaccactttgtagcagtataggccgacatctatttggaagctagtgtgttcttgatcaggtgaatgcatacttatttgattgtaccccgagtatgcatccatgaaagttagaatttcatggccggctgtcgcatccactaactgatcgattctacggagggaaaaataatcttttgggcatgctttgttcaagtctataaagtcaatgcataccctccaggtgccatttggtttgagacccagacagggtagaaggccttctttgatgaagtcgttgttccaaagtttctctatctcttccttcagtgccttaactctctctttgtcgggtaatctccttttttgttcaactggcttgaagttgtcaacattaatgtttaaagtgtgacttatcaaggtggggcttattcccatgtcttcgtgtgatcacgcaaaaacatcttggttctcttttaagaacttgatcaagttagatcttatgtctttagggagttctttaccgattttgattagtttggagggttgtttggggtctaatagaacttcctccaattcttcagttggaccaacccctgtatcagtatccccaaaatggagatcaatgtgttcgacgtcgttttgggcaagtcgtcattgctgagaactactcgctgtagctttgagggatttggatgttttttccctagttgtgatggataggctgtaacactatcgtgctactagttggtttcctttcaggtaacctattccaccctttgtaggaaacttgacgaggaggtgaaagatagatgtgactgcttttaggtcatatagggctggatgacacccccaactagcttattgctagtccctagcaattcaagcggagaaaaagaataatcgagttgaataaacaagtcaaaccaagcaaaaccatccaagcattttcaaa

SEQ ID NO: 119783 - DNA, 1716 bp, Cannabis sativa
ttttatagaacatgtttttaaaaatattttcactttttcacttttaaaaatagaaaactgattaaaaaagtgttacaaaacgccacctaaataaaataaggctaaattgactcaagcaccctttccttatataaatttaaaaaataaagtgaagaaaattttgttaatttgtcacttatccttaaatttattctagcaataaatcaaatatcataattaattctcattattatttttattccattactattacaattgtcattaccattatatcctaccaaacctaacatcaccatatataattaataaatatgttgtataatataaacatatatatatatatatatatttatatacaaatgtgatagaatacaaagtaattatattcaatttgctttgtttatacttcaatcaaattcaaaatcaactatttcaactgcatatataaccgaatttttagctaagaaaataagtacaaatacacgaacaatattccattagacatattcattaatcattagaagatggtatttaagcaataataagtacatcacataatgttttacaaatcagtgtaaatgaatttagaaaatgtcattcaaaatctgaatcataggtgaaaagtgaaattccatttttctaattacagagttaattactcaaattaaataattaattactgcacttttacggagatatttaaacaaacacaaaaactatttaaacaaaaatgagatacgtctaaaaagattactaacaaaaaataaaaaatgaacataaagtaaaaaacacacaaagttatatgtggtatcaataatcttctcaaattgctattagttcatgggacgacacccaaagaataaaatttatttttgaatttgtcgcaattgttgtaatctaaactcctaatcaaatttttgatgtgctaagtgttgggtttttatgtctgttaacaaagattttcgttaaccaaatatataaatctttatgtaataaatatactacagagttttataatcaaaataaatgaacaccagatattttttatgtaattttgtagttaaaatttacatactgcatgagtcatttttattagggatgatgatctagatacagagtacaattctcttaataaatgtaaaatatagttttttctctcaaatttgccgtctatttttccctaaattctgtccctattaataggtgtataaggtatccgttatttttattaagatctaatcatttataactgctcatgaaacgtggacattcctcacgttttatttttatacacatggaataatatttaataaccactcaatcgctctttggtctttatctttaaacggttttgctgactatgaaggttatttctcgctaagtgtgagttgtccttctttaccgtctttgcatgaaaaatgataagtattggtataatgcacctcacagtcttcttttaccatgatggtattagtaaggtagttattcagtcatatagagggcgagacggatgaacgtagatattctctccatgtacaactatgtgggtcaatgagttgcaagctctttgttatctcttcttgaacacttctactataaactctgtctatcccgagatggacatattgtctcgtcagttacacctgttaatagtaattattcttatctcgtatatgttagactatatatatagtgtatgtaatatagcatatacaa

SEQ ID NO: 119784 - DNA, 2460 bp, Cannabis sativa
ggactcagaagacccatcacacaagggacagctcttatcccccacgaaatcaagtctatctctagttggcacacagcccatgactgctctccagatcataacagaatgcctataatgcactttcttaccccaaactttcttccacagattgccatcttccaatgaaacacccccaagagtggcattataacctctcttaactgtgaacctcccatcactcgcctccttccaaactaccaagtcgctattgtcttgaggaatccggttaattgtgccaattctttcacccaacacatccccaaacatctctttaagaagctcaatattccaactgccattggggttagaattgtctgccacagaattaatgtgtggataccgaggctttacttggttcataagctcgataaattcaccatagtccagccacggaatccatggttgtgtccaaacgtccaccgagtcacctttccccaccatagtcatgcttcccttacgaagaagatctctagcattcaaaattcctttccaaaaggctgaatcactacctcgtgcatttatactccaaaaggactcccttttgcaatattttttcgagaagcaagagacccaaggtctgtcaaaactagaggcaaattgccatgccagctttgctaaaaggatcttgttcatatcttcaagcttcctaaatcccaaacccccattaaccgtaggcttacaaagatgatcccaccctaccagtgctagataacgatccttttcagtagtcccagtccaccgaaatttccttatcattctgtcaatttctcggcaactagaaactgggagtttgttagtagacatcgcatacaaaggaatcgagagggcaactgatttcaccaaagtagttcgacccgtaaaagaaagcagtttagttttccaaccttcaattcttttcaaaaccttttgtttcagatacaagtagtcttctctcttcttccttttgaacacaaaaggatttccgaggtgcttctcttggccatcgcactctttaacattcagaatgtccaggatgttgtttttgtgtgtgcttcccatattgctggagaataggacacttgatttccccaaactacacttctgaccagaccaagactcgtatttatggatacaatccagaatatttgtcgccacccttacgtttgcacgtgcaaataaaattgtatcatcagcaaacatcaagtggctaaccaccggggctgatctagagattgagattccctggatctgccccctgatttgctgtcttagaatcaactttgagagaacatcatggcataacagaaacggaaagggagacaccgtgcgaacacactccatgattaaagcacagactccactatcaaagtcgttccctttgagcaccttatgaagaaaattccactcaattttatcataagcctttagcatatccaacttaatagccataagccctcccttccctttccttctcgtaattgtatggaccaattcttgagtcaaaattgatgattccccaatccaccttccaggaacaaaagccaattgaaagggtgatattaacttgtcaatcacccccctcattctagtggcgtttatctttgaaataatcttataggcaaaattacacaagctaatcggcctgaatttatccaccgtacacgtgttctcctcctttggtattaagcagatgaaggtgtagcttagttgcttctccaaaatcctagtggtgaaaaaattttggaccatgtgaagtacatcggtccccactatctcccaatatcttctataaaagaaacccggcataccatccggccccagtgccatcaaaggatgcatagcagcaaccacattccaaacttcatcgggagatggaattgctttaagcatcgtgttctcctccacggttactaatggagaaagcagatcatagaatgcttcgtctaaaaccgttccttcagaactgtacaggtcgcggaagaactcattgaaaacagtccctatcttgtgtgccttagtttcccatcctcccaatttgttctttaccgcattgatctcatttcttcgtcttctaataactgtggaagtatggaagaattttgaattcttgtctcccactttcaaccaaatctcccttgatttttgtctccacatagactctttacggatccacaactctgaaattctaacttgaaggacagcttcctcttgcaagagagagtctaacacgggctgagtttggatccatccgagtctttccttcgcttccttgatcagaatctcacagtccccgaaagccccttttttccaattctgaagcgcttgtctagtatcactcagccttccacaaagtcggccactcatcctacctttcacacaccatgcttgctttatggtttcctcacaggattgctccctagcccaagcttcaaagaatctaaa

SEQ ID NO: 119785 - DNA, 7240 bp, Cannabis sativa
  modified_base (1148)..(1153): a, c, t, g, unknown or other
cttctgcagcttgggcggtggtggtataattgaggaccctaggatccaagtctggtttgtctttatgcggtatttcctctattctaaacacctcctatcgagggggcggtgcctctagcaagtaaattacgttgactgacttcttttctacgagttttactgctgtattgtagcattctcgtgactctgattggactcctcgcacagatcctactccagcaggagtaggaaacttcatagtgagatgataaatagatgtcacgatcttcatctctttcaggatagggcgaccaatcacagcaatgtatgccaagtgttggtcgattaccgcgaagtcagccattgacttatctaccaccggtgcggctcccaaggtaattgggagtttgatcatgcctttcagggcaatgatgtctccagtgaaaccgtagatactcgacacgatgggtcgcagatccttttcttgtaatcccatttgcttgaaggcctggaaatttaggagattcatggaactcccattgtccacaagtatgcggtggaaattatctcctccaatgtttgcgacgatgaccagtgcgtcagagtgtggatgatggacccacctggcatcgctttccatgaatgtgatgtcatcacattcccttttgaataacttttcaggccgctcgctcaagttgttcacgttggtgagcggcttttctttggcttctttcgcatatcgctcctgcgatttcctggaatcgcctgcgatgtgaggtctgccaatgatagtcaatatattgtgaggagtcctcgaaccactcgcattgtgattctcttctttttcatccgctcggggatgactttcctcattcttcttgtatttgttgaatttaccccgcctgatcaactcttcaatttcatcctgcaaaaaccaacattccagagtagtgtggccaatgtctttgtagtacttacagaattttttcgtgtctcttttatcgcggttccccctgattgggggaggccttttgaagaccccattcttctcttcgatggtgtagatatggtcctgaggtactgccaactccatgtaattcacaaagcgcggaccacctttcctcttcggagaggactctttctttggaggggacttggccaattttggnnnnnnctgtctctgtggactgcgtcttctcggactccttcctatgggatttttttcctcgaggactgtgaaatcgtgaccgcgacactggtgacttgcgtttgtctttccccttctctaactcagccaaagaattttcaatcttcttatgcggctctgccataacgaaggactcaacaaacgagttaggtcttcaagcctgcagttccttccagaaatcggttcttggcagagtacctattatcaacatacgtactagcgaagactcgggagccttctctactttgttacgtcagcattagaacctttaaaatagtcttgtaaatagtcatcgggttcttgctttatattagccagagtgctatggcgtggcttataggttatcgtggcttgaaaatgtgggaggaaaaggtcgacgaaggtctcccatgttgagatagatgcctcaggcaattggctgaaccaatcgtggccattctcctccaacgttgccacaagaatgcgacacttcacaagttgggtacatgatccacttccatagtagtattaaatttctctaaataatatatgggattagtggaacctttatattttagggattcgataatcagaatcccttgggcaatcgagcttgtcgcacttcagcagtgaaaggagaagtcccatgcagcttgtatatgggctttctctactgctcgagcatttttaatgcctgtagaagaataccttgatcgatactcccggttaagggagtattgacttgtgtttccgtaggcatcgttactactgcggcgatgttcgctgggatattaactccaatagttgcagctggtgcggtaggcgggtttatacgattgtttacgccctgatcgcccatgcggggatcacgaggctcttcgacatcccgaggcgtctgggagtgcgccgggtaaacaacgttaaggtgatcgcagagatcgcccctgtgaacctgatatcgccctccttgcagtgtatccaccgagcctaatctggtgtacctgctgggcgtgcagccatgtgagaatgaggaggcggattcatgtcattgtctcgcgactggggtctgctgcgaggattacgtcgttcaacatcctcctccgtctacgcctcctgattgaggtttctcacggattgatccctcgacgttggctggtacaaatcgagtccctcctgattggccctccgttccctgcgagtacggttactacgacgtctagaattagttacctgagggttgtttgtgcaagcagcgagtactcggggaggacgttgagtcctgtttcgtccctcaacctcggcctgcagagcacgtagctggtcttaaattgcagtgtactaatcggtagtcagctggataataccctcggataccattgttggagtaaaaggtggaaaaatgtcccgttgtggctgccggtgtagatgtttccccagcgtgagggccagtagtttcatggaatagattaagaggcgtcacattgcctcgtcctacttcgtcgttcatcacgtctacgggaggcactctgcctcctaacagtgggacgttcatcatcccgatattgatgaattcattgttaagacctccgtttgcttggtttccagccattatgattctccttctaaatcagcaagaagtatttcgtcatcccacaaacggcgccaaatgttgttgaagggattttacaacaccaaaataaataataataataaaatgatgaatcagtgcgagtattcaacctagaatggtaagtactcaaactaggaacataaatacttaacaaaaactagaaatacaaagaacatgagagaatatggtggttcagtcagatcacggtctgcttagtccactattgcaaggattcagtttttttcatatttcacggtggatcactcctttatatacaaagcaagtgtcctatcatttacacaaggattgcattctttgtcaatccgtttatacattcatttacaataattaagctaaaaacgtaaacattaataaatgaagaacagtttccagtttcattcactaaatacaacaatgtacgtgacttctatattgcgacttggctgttcacattcttgcataagcttgcaggcttagaatgcattcgagactagttgggtctaagatgtctgcgttcttgtatagtcgcttttacggacatcgtataacgagctgatagaaccaagacatgtgagtctacatcggtttatcgaggttgctgggtcatcaggaccaactcgcatcatagagaataaatctctatgttttcgtaagaggatcatggggatactcgcatatatcttggtatatgcgggttaaatccattccttggtcctacataatgttagttatacgaatgcgattagacttggtcatatccacatcatctcgccgagtctagttcaggtgaggtttgaactcgaggagtctctcattgacatctcaactttccttggggaaatagagtacacatgtccttcaaataggagtccggtctcgagtttctaggtgagataaatctcactataacaggttttataaatagcttctacctgccaattcgcttgtggccttgatactgacgagaagctcttaataatcttgttcctctcacagaactcagtgaataactcaccatcaaactgagttccattatcatatattatcttaatgggtattccaaacctataaattatgtttttaacgaaaaggtcgagaactttctagtaggttatggaaaccagaggttcagcctctttccactttgtaaagaagtcaacagccatcactacgtactttgctcctcctcgccctgtagggagtgccccaatcaaatcaatcccccatattaaaatgtataaggcgaggtcatcattcttaactcggttggtggtacgggaggtatatgtgaaaacctttgacctttattgtattttttgacaaattcatgtttgtctttgtttattgttggccaatagtatccttgtcgaattatcttctttaacaatctttgccaacatgcatggtctccagaaaagccatcatggatttctttgataatctaatctgcttctgtggggagaccacacatgtaggagaggcattgaatagccccttcgatacaattagccctctattatcgtgtagcgaggcactaaatacaagagttttcgtgcctctttttgtcagctggaagttgccagttgagaagatagtcgactatgggtgtcatccaagtatgcgagctttctatcatctcaacttcttccttttcacatatactcggctcgtctaacacttccactggtactaggttcaattcatcaagtttaatatgcgaagctagttttgccaaggcgtcggtattagatttttgttctcctgggatttgttcaatttttaaataatcaaaaattttagaattcttccgaaccttctttatgtattttacaatttttaagccctttgcctcatattcgcctagaacttgatttacaattaactgcgaatcactatggcatataagatttttgacttttaacacatcagctatttttaaaccagcgatcaaggcttgatacccagtctcattctttgaatttttaaattgaaatcataaggaattgtgaaacttaaagccatctggcgaaattagtatcacccatgcacccgagccatgttcattagatgctctgtccatgcacaacttccaagtatttgtgtctcactaaacaagcgaattttcatcgggagctatcccttctatcaggaaatctgccaaggcttggcctttgatggatgttcttgggtgataagttatgtcgaactacccaagttcaattgaccattttatcaatcttccagaagcatctagttttgacagaacttgtctcaggggttgatcagttaacacctgtattagacgtgcctggaaataaggcgttaatatgccagatgcatgaattaggcatagggcaagttttttaagaggtgaaaacctcaattccgcccccagttgccttttaccaacatagtaaactggttgctggtgctttccctcttctcgcacaattgctacattagttgcattttccaagacaaccatgtagaggagtaaagtttctacaattattagtttttccaaaattggaggtgttgataggtggctctttctgctttgaaaggcctcctcgaactcatctgtccactcaaactttttgtggcctcgcaatacattgaagagtggtaggcacttatcaattgattttgagatgaatctgttaagagctgccattcttcttgttaaggcctggacttccttcagttttattggtgatgccattctatttcacaaacatttcattaactagtcgctgatatgttgccccaacatttatcaaaccataaggcctgactttataacaataatgtcccatgttggttacgaagcttgtatgttcctgatcagggacatgcattttaatcttattatatccagaataggcatccttgaatgtcataagctcgtgtccagcagtagcatccactaactggtcgatccttggtagtagaaataaatcctttcgacacgccttgtttaaatctgacaagtcaatacaagttctccaagttccatttggttttgggacaaagacagggttggatatccacaagcgacaaaattcctcgcgtataaagtcgttactcaacaacttattcacttcctgcttcagtgccccttgtctctaagaatacaagggtcgtctcatttatatattgtctgggtaatttgggtcgatattcaagtcgtgacagataattttaggatcaatctctatcatatctgaatggctccaggcgaactgatcctggttttccctcaaaaaagcttattagttgctattttagtttttcttccaggtttttcccaatgaatatacactttgtaggattttttggatctaaaagaacttcttccaattcctcaatcgattggtttcaattggttctgctcatcttgaacccaaggattaagatcctcatcctgcttctcgcctttttcagttgtgactcccattagctgatgaccaacttttctattctgtagctctatgcggtagcattcacgagctagaagttggtcacctcgcaccacacatatacctttcggtgtctgaaacttcagggatagaggtttaattgaactaattgaccctaggccaattaatggtggtcgatccagcagtatgttgtaagccgatggcaggtcaacaactaaaaaatcttacattattctagtggataaaggcgtctcgcctacggttaatgggagttcaattattccataactagcgacactatcgcctgtaaatccacatagatttaccatgccaagttttaactttgctctttccaatcccattttctttagtgtatccttataaaggatattcactgaacttttgttctccaccaacaccgtctttattcttttgttggcgagctagattgtaatcactagtcggtcgacataaggatatctcacatgctttgaatcttcctccaagaacaaaattggaggttcctcaatcttagctttcttagatgattctggagcaatgactgagtgctcattcttaacttccttgacatatctattttgggaattgttactttctcctacgagatgtggccctcacgtgacaaccaaaatttcctctccttcaagaggaggaggttgtaatctttggttgcctaggttattgggcagatttggctggttttgtccattgccttgtcgcttcacatattgttgaaagtaaccgtgcaagataggctttctatctcttctttcagttgacgacattcatttgtcatatgccctatgtccttgtgaaatttacaaaaaaaatttgcatccattttgtgtcttgcatgcctcatgggctcaagtttgaaacatgcgaccttctgctcatgtgcgaggtagatattgttgggttttatgccctaaataaaaatctttacaatctgattagttatcaatataaggaatttgaagtgat

SEQ ID NO: 119786 - DNA, 3559 bp, Cannabis sativa
agcacacaaaataggtagaaaattcgagtaaataacactagcagctgaatatataatacctcaaccatatcatcctccaagatttgaattactcttccagaccaataacaactatcagtaaaccaatcaactaaatcgccaatcttcctgacatccttgaaaacaactgccacttctgagatggtattgacatcaggcatttcactttcacgatatactgtaggaaagggtggtcgcagcattatctcctttttctgctgtaactttccagtcttagttgggcacttttgatataacaaaattgactctggagctgcaaataaaaacaacaaatgacaaagattatgatataaccacttgagtagaactcactaccaaaagctagcctaagagaggagaaatcctaacaaattacaaatataaaacatctcattccttgtaaatatggtaatgtaaatattaaaaactcaaacaaaaatcctcgtacataatatagaaaacacctaagccaactaccattctgctccgtaaaagtaacattacagcctataaaaatcaagcactgcttagaaacaaatacaagtacaaaacctactaaaaatcatacattctatataaatcaaattcaagtgcaaaaaccaaataaaaattgtgcatggcttcttttcttttccttcattcgttgggaaatacaagtgcattgcttctgaaaatatagaaaaatatacaactaataaagactcatgatgtttaagtaaggtgaaaactgtaacatggtcataaaaacttcacatatcctagaggcaacatacaagcttctttagtccatataattagcatatacttgagaaaaatctagatgtacagccacagaaacttaaaaagaagtggcttatctcatgcatagtgtctgtaaatctaaactaatcattcagattgcatataatcatgtatatcagcaaaaccattagctttaagtgatgtttgaaaagaattatacaaacaaaatgaatatatgcctattcgtgactgtgctatacagctgtgaatgaatggtttcctgatacaaaacaaaaggaccatacataacacttctactttaccttcaccaggaaagtcaatatactctaacatgaacttctgtctttttccctttatattatcctttatctgaaaaataaaataaaattaagaacatgcttaaatttcgtgtcacagaaacaatgaaaaagaacatgaaaaaccaaaaagcttccaatgttcattcaaattaaggtaaatatgtcctcttatagtaataattgattaaaaaattgtttaaaatggttaactgcctcttttcacagaagagaaatgaactcaaaaagattgtagagtatcctcaaaagttgcattacttaacatcctttactccaatacttatgtagcccaacatcatacacttacactaaaacacgatgccccaaagattaaaaagaaaacatgcaatttttatttttatttttttgaactaagctcttcgtctaactctacaatattatggtacgaggaaatcatagcaattgctatgtaggtaagactcgaacctcgatcttagttggaccaaatcacatgcctgaagaaacatgcaatttaacagaagaaaatccagtcaaccaatgtgataaataagaaggatcacaaagaatatactgaccctctaccatatgttttagcagctttacatctcttgcccaactaaagaagagactaactaaattatatagcaagtgataaggcaaggatttggcccttcttcatgtacatacttgtcctaaactagacattttattcttatatgatcaaatttcaaatactgtagttttacaaccaaactgtaataacataatgtgatacgaaagaactgcagcaatgaatatggaatcctaacaacccagaaaacataatgcaacccaccaccaccgttgatagagccagcaaacgaatatagcaatgcaaacccaagaagccacacaaaatttgaattatataattttaccttgcagcggaaccacgcaccgcgaaagccctcgctaaatgatcttgattcggctgatgcacccactttgaatggtaaatcacgtaccgccatgacagttaatcaataatcaacactgcaaaaagaaaaaaaaaacaaatccacatttttttctcaacaaaccacgtagagaaagaagatcaagattgatgaattgaaaacactttttatgtttctcatcagaatcaaccgaagctgctccttcctcatccatggaaaaaaatagttaattgaaaaatagaataaataaaacctgtgaagtaacgttcactcaccatgactcattaaaaatgggggcgatacagagcttttgtcttcgaaaattaaagaaattatgaggttgaagagaaccctaaaatctaaaatgtatttcgtagaggatgaaagggagtgaagtcagtgttagtgacaccgttgaatgcaagttttcttaatttatgtttagaaatggtaaagaagaaggcaagaaagagaaaaggaatgtacctttgtttatttctctgatttattttgttgttgagtttctatgatttccttctagagtttccatttatatgaaaatctttgctgttattattcaccaaactttaatataatgaaaaaacttaaatatatttcttttttttttgaaattttctcatatattattttttttacttttttttaaatttacggtttgggtttttaaagtaattacttctaaatagtgtacgattttttattgcaatttagattgcagcgctagttgcaatagggtgtctatgtagaatttcgtaaaaatatagaaaaaaaaaagactgttttgaagtgtaaaaataaaaaaatcttattttttttatatgaaataaacaaattcttaaaatttaattttttattgttatattatttaactagtaaacaatacgcgctttgcggcggatgtttaaaaaattttaaattatatatgaaataaattataacttttatttaatgataattaagtaataaattactaatttttcatataattttactttgacttgtatgaaaatagatatacaaataggccgactcgacccgtatttaccaaatctcgcttttataatagaaacctagcgcgaccttacctctaatttggggtcagacctaacaaaaccaataaacataaattgttcatataaacataaaatcaaatttttagattgatcttttaagtgtttttctttttttttttagataaaacaaagtaatgaaaacacaactataatcttccttttgactcaaaataataatatgtgaaggagcgaatagtgaagttaacatctgcaactcaaaatatattttgagaatatatgtaaattaatcactaaaaataaataacataattatagaatgtttaaaatattattggggagtacacgtgcattccgtaggctctctctgcttgtgaaaagtcattgtcctgatcttctttttttgattgaaaccaggttgtcggttggt

SEQ ID NO: 119787 - DNA, 706 bp, Cannabis sativa
  modified_base (50)..(53): a, c, t, g, unknown or other
aaccatttaatagtaatccaatggtttaaaaaaaatgtaaccatgatggnnnnaataaaaatgtaaccattgaaatctcttccatatatatatatagaatgtagtttggtggttaagttaattaatcaagaacaatataacttaatataagtcttagattcgaacccatatctctctcttttaacttattaatattaaaattaagtaaaaaaagaccttttcttttcttcttctttgccatgcacattatgggaagttacaagataaaaaaaaaaaaaatcaaactaaaaacgcgttctatcatatctttaaaattattcttcattttaacaattttataaaatttatattatttatattggctgtttggctttacagtttaaaaactgttttctgttttttaaaattaaaaacagtttttaaaaactattagtagtcatttggcaaaaatttttaaaaactattttttaaaaattgaattttaaaaaactagaaaatagaaaacatcaaaatgctgttttcaattttcaaaaataatttttttttgtttaacatattatattttatatttcgatcctagacccgaaaccatacccgaacctagatccgaatgtgttaatgttatggtatggtgctaaaatattgatttttttttcgtaagaaaaaatctaaaaacaatttttaaaaatttgtgccaaacaccatt

SEQ ID NO: 119788 - DNA, 993 bp, Cannabis sativa
gcggtcgcttcaaatcgatgagggagtagcaaactcatccaggtggattcattagtggaatgaagtttggaatttcgctatgccatcaaaggtgaacgtttttgtttggcgtatgttctatttggcgttaccaatagctacacagcttatctttcaaaaagtttaggtacctctttgttactcacggtgcgaagaaaaatctaaaactccaaaacatgttttattttcctgctctggtttgattccaatgtggcatcaattaggggtatggttggtgctctgtcgttgtgtacatggaccaatgccagaacttctcctctttctctttaaaaagttatctcgtgggtcttttgaattgataataattaccttaaggtggctttagtatgatcgaaactcaatattatttggtaataagcaatcaagattagatgttgctccatagttagctcataatcatatcttagaattcaaagagcatatttggcgaggtcttcatttgaaattgtgttattcaaaccagttgaaaaacgacctactcattggatgcctcctcctcctgatttctttgctcttgcgactgatgcttcagtgattcctgggaggggctttgtcaaattgggtggagtaggggtgagtaacagtcggtttggtcagttttacacacacaaaattcaaaatttcttttttttttttcaattttcatggttataatctgaaaactgaccgaccattatataaatgtcaaaaacccgaccgttttaatcaacggtttggtcggtttaaaaaaaataaaccgagcttcatttttttattaaaaaacataagtctttaaatttgttataattatttgaaaactaaaaaaattataatattgtatcaaatattatataatttaagaactaaaacttttttaattaaataaataatgtaaaataaatttttttaaatttgctcaaattatttgtactactaatatggtaatgagctata

SEQ ID NO: 119789 - DNA, 2198 bp, Cannabis sativa
caaaatacaacctgacataaaacaagacttccttgcaatgcaatgagcagccctatttgcagatcgtttaacaaaagaaataaaaacattatgtaactcagaaaggagaaaacgacaatcttggacaaggaaaccaaattgagatggcatttgaactgaaccttttatagcctggacaactaccaaagagtcagtttcaacttccacatcagttaagtgattcgtcttaatccaactgaagacttccttgacacctacagcttctgctatctcaggggccaccaacccaattttactatttgagtaagcttcctcaaaattgccatgtttatctcgaacaatgaagccaaaaccaaaccgattttcagtttcaaaaagggctccatcgacattgatcttgaacttagttgaaacaggtttagtccaatgctctttaccactaccaaaactaacatttagtaaaggtaaggatccatttgatcgagcatttttccaattgtcaagactagtcttagccgatcgaatcacctcagaaactttagttgatttattgctccataagagatcattacgagccatccaaatacgccataaaatcattgttgcctcctcagcaactaccttcggtttctgcaccagaatattacagaaccagctacaaacatcagtgacatcgccatcatgaacatcagccgaggaaaggttccaacaagatcttgcaaagttacaccgaaacaagacatgtgtgatagattcgggttcagtattacacattggacaggttaaatccacatgaacatacttggtatttaattgtagtttcgttggaagacatccagcaagaacacaccaaaccagatgttggactttcgcaggtacattcagttgccaaaccttcttccaaaaagatgccccatcattaatcaaccagtccccattaacaacttgaagcagcttatatgcattgtttgcagtatagccgccactcctttcctaagaccaagaccaacagtcgcccctagtggaattagtgagctgaattgagaggattagatcactgtcatgtttgttaaatacatctctaatcagctcaacatcccactttcttgatccaatcttaaaaactcaatcaacaatacggccaacaagactaggatggtatgttgtaataaagctattatccacagtaggcagccatggatcttctagcacagatgtagttttcccatcaccaattgttctaacaacaccaatcttaatgagatctttagcttctaaaatacttcgccaaatgaaactcggattcgaacccaattcagcttgtagaaaattaccttttgggaaatatcttgctttgtacacttgtgccaccaaagaattctcattagtaagcaagcgccacccctgtttacccaaaaaagccaagttataatcccttaaattctgaaacccaagaccaccaacatccttatgacgacaaagtttttccaactcatccaagaaacacctttagttgaatctttagcttgtgatttccaccaaaatttggccattaacccctcaaggctagaacatatctctttagtgagaagaaatacattcatagcatagctagggagggactgagccactgactttattaggacttcttttccagcttttgaaagaaatcttgtctcccaactttgaatcttcttgatcatcttatccttgagaaatcctaggatagcgttcttactccttcccattgtgcatggtaaacccagattagagctattttctgaagcaggagccataccaagttacccacacaaataagttcgatcattttgctgaacattgttgctgaagaaaactgaagatttttcaaagtttattttctgtcttgaagctcgctcataaatagcaaggagtcgaagtatactagccacctccatttcattaactttgcagaaaatataactatcatctgcaaataacatatgagaaacaataggagcatttctagctacacgacagcctgttaaccactgctttcgcacaaacatattgaccagcgaggtgaatccctctgcacaaataagaaacaaatagggagaaagtggatctccctcacgaatgcatctacttggggatataggacccatcactctacctgttgggttttatgccctaaataaaactctgtttcaatgtaa

SEQ ID NO: 119790 - DNA, 1061 bp, Cannabis sativa
tctctctctctctctttaattaatgaaaacgtaatgagaaaaaaaccataatgtctctcactcttttgttgcttgcctcttcatcatcccctcttagttctagctatgcaccttaggtacaacaattataatcttattctgtataatttcccatccatgatcacgtaactggggcctgttattagatcttctacaaagcagctctgtcctccgggagtgtgcttatttctagatagttgagtattagggccatctaggaggttgagtgattgatggttggcacctctagtatctccatgcttagagtgatcatatgtacaatggggactagtccatatttctccactttcgaatctgttgctaatttaactaacatgtctacaaatgcgttcttatccctggggatttgcttcatagattagtgcttaaaatgttgcaatagctccctagtttttgctacataactagctattttttctccttttgtctggtactctctagacacttggttaaaaactaattgtgaatcactgtacaattcaagattcttggtgtcaacctctttagctaactgcaagccaacaatcatatcctcatgctcaacttcattgttggaggctttgaatttgaaacgaagtgcactttggatttgaagttgttgaggagatattaaaatgattctggctctagaacccttttcatttgatgctttgtctacatatattttctagacttctctctctaggactggctttttaggattgtcattttttgccgtgcactccacatgaagtcatgagcctaaaagtatggtcttaacttctgtaacgtaattagtaagcaaaaagaaagattttcaatcataagatatctggactctgcacctagcaatctcttgcttatgtaatatacaaaaagttatgcctttccttcttcctgctctaaagcaacacttataacatgatttgacactacaagtgttggaaatattttaccaggatttagatttacttttaagtatgtttcattaacatcctaatatgaattttctaaaacaatga

SEQ ID NO: 119791 - DNA, 1077 bp, Cannabis sativa
tttgattcttcctcaaattacacgagttcttaatagatgtctctccaacctcactgatcatctcagtcgtgaacctgacaaccagtttagtttctacattaaggatccgtgagtcaatttttttttgtttctactttagaatttttgtttggttgctgagaaaatgcatgaaagaaacaaagaaaagataagaagagtggtgaatcaaattctgggtatcagtcagaattcaaattagaaatttttgcaaaaaaaaaaataatggagtggcttatgatttgcttttaacattttgaacttgaatttgttatttcagacaagttgattggaatcgggcttcttgtcttcttgcattgtaaaacctgaaggtataaaagtacttgtaaatgtaattcaaaagtttctattttttttcattttcttttcttttacttgtttggtatttaagtaacttttattcgtcagaggaaacattaatgttcaattaaatttattagggtcgatttctttataagattttgtatggaaaatatggtaaacttaaatgacactttttgtccatgtgttaagtgtgaaaatataaaaaagttgaatttatgtaaggtcaaggaactatgcatacaaactatataaatatatcatgtattattattattaagaatgcatatgatgataactttaattactgtattatttatctttaaattttgtagttaagtgatgcaaagtatacagaagaagaaatcgatgaagtgaaagagcattgggcaagtgatgagatgttatcggttattcaaacttacgttagttgttttttattttaatagaccaatgttagttattatataattttatagttatgaatttattggaattgcatatgtttcttattaatgaactaatatgtaatatttattagttttgttgatgtaagtatttttaatattttctttaagaatagatatgaaatctattagaattattatattggtctaatttataattttaaatttagttaattaaaattattattgttatatttaattgtatgtgcatataattaatataaattattat

SEQ ID NO: 119792 - DNA, 559 bp, Cannabis sativa
aattagattagatcggatgatgatttttcaaatctaattactaattgaattaaatcggatgagaaaaaaaagttggattggatcggatgcccacccttacttaagagtatctactcaatgaacccaaccaaaaaaaaaaaaaattgaaacaatgaaataatattaaaaaaaaagagttacaataatgtatacattaagaaaaaaaagaaacaataaaactacattgaaaaaatgaaacaataaaacaacactaaaaaaaagaaaaaaaaatattctccctctatcactatcattcttttggtggatatgataatatttttcacaaataattatatataaaataaaataaaataacattaaatgtggacataaaaagaaacaatcactcatattaaaaaaattattctacataaaatcattgttaatacctctatttaagtattatcctaatgttatcataccttaaaaacaaagggaaatttgattttttatacttagaaaatcaaaaaatttgatttctaaaccaataatttaaaccctaaaaaaactataccttttt

SEQ ID NO: 119793 - DNA, 5013 bp, Cannabis sativa
ctctctctctctctctctccacctcttcggcctcaagcaagaaccagaggaaatccagccaaccttatcacttttttgggaaattcaacaaggatttatggtggttcaagtggaggtaaaccttagaaaaccttatcctttgtattgttgaggttttgttaggtttaggcttgaaaaattgtgaattaagatttgttttttagggtttcgtttggagatgctttctatagcttggtaatgatgtttgaagcttaattgagttatttttgttggttgattcttgagttgagcaagtttgagataaagaaacaaaacttggctcaataatgttaaaatttgcatgttgaggttatttttggttttattacatgaaaatggtttattatgatgtgaataggtattctcgggcttggttttgagtttggggctattttaagcatgttttgagactttttatgttactgcagtgaaaaacaacataccgtttctgcaaaaatggtctaccatttttactggtgcagaaccagaaaagcggctaactgtttttacagaaacagcctgccctttttcaggcagttttcttgtataatcatttttctcgtgtttcctcaatatttaaggtatttttatgctatctatcgataggaaaacttctaacttgagtttagatccctaaaaaaggtcttagaaagttgtttacccattttacgtgaatgtgatatagggcctccattcagcgcgtaattttccattcaggttgaccgacacgcttgaattcaaaaatgaggtaagattaggatagaatatatattttatatgtatatgtgtatgtgtattatatgcatggtgattatgtaattcatatgctatcaacactagtacgatagcggtactgagtgcattggtacatcatatgatgtttaagggtacaatctggtgttaccaacactagtacagttaagtatatagttcatgtggtacaacactaaataatactcggggtacagttcagccctaccaacaatagtgtagtagcagtacttagtgcatgtggtacagaggttgtacttctattataaacgttcttgatcatttgttaagccttgtgggtaggtgtatgggcacctaaatacaagtcagtaatatattgtgttgtatgctttttcttactgagttagtcgactcacagatatcgttcgcatgtgtaggtaaagaaaagactgaggctgagcaacagcgagtccaaagctcgggaaggattgtacatgtcaagatggtacgatctggagagttcaatctcgggacgacttgggcttaattttgtagtcactatgagacatgtttgtaaagtttattttaattatgtaaacaagtttaaaaagtgggatcccaacctttttgtacgattatatatttatagttgtaaaagtataaagttaattaaaaagtttaaatttattaaaagtttttataaaccctttgatcagaaaaagtacactgtaattaaaaagtcaatgtagcgtgcctaatcattagggcgttacaattttggtaccagagccgctaggttatttatcgaaaaccattaaaacatgtacaatcattatcacagacaagctcaactcacagtttagtaagccttacttgtttagtaacttatgtgattagaaaagcatgttaggaagcatgatagtaatatgttattatttgaatgcattgcctaaaaatccataagtgtggtacttagaaaatttagataatcgatgtctgacctacttgacttatgggttcgtaggctaagtcctacaatatggacgcccagcaaaacacgagaagttgtggtaatatggtcgagatcggacatagttggggaggtcaaaatcccttgaatccttgtggacgcggcagggaccgtagaaggtttcaaggggtggtcatgaaaacccaccaccaactcctcatgactgggagcaaaggtttgcagaaatgcaagcccaaattaatcaacaagaggaagaaatttagaggttgagacagcagggtcctcttgcagtgcatccacagcaagtgccagttgccttggttccagtggtgccagcagaacaacttgttgttggaaaccgtatagagcctttgtatgaaaggtttcgcaagcagacatctccattttttctaggtggtccagatgtcatgaaggtcgaataatggctcacagtaattgaaataattctgaatttcatgggtgtcatcaggaatgactgagtgacttgtgccaccttccagttcctagaaaacgtactcgtgtggtgggagatagtatccctcacccaagacgtcactactatgacctgggaagaattttgggatttatttaatgccaaatattataatgaggttatttgcagtgctaagaggaaatatttcattaaattggttctaggagagaccatgttagtaacataatatacgatgaagtttgatcgacgtactaagcttattttgggtattgtacccacatacttcagcaagaaggaaaaatacttggcgggtttgaatgccaatactagacacgatctggtcattacaataaatgacacaacaacctacgctaagatggttcaaaaggctctccgagctgggggcgtagtagaatttctttaggagccccgagggactccaagtgtttgtgggaccaccacccttcctacttctggctatggtggggatgatggtgagaccaatgttgaccaaaagaggaagaattttcaaacatctggtagttttggacggagtaagaggttctgtgggaaccaaggtagaagtggacgttagggttattcttatcctgagtcccctcgttgcaagaaacaccatcccagagaatgtaatcagaaggcatgctttcaatgtgacatgtttaggtatttcaagaaagactgccctcagatggaaaaggaagagaaagaaaagaggcgaaacctatacctggtcgagtgtttaccattatgcaagcagatgctactgccagtccttcggtggtaacatgttagattcttgtcaacaactcctattataatgtactatttgactatggggctacacatttatatgtggcgttaagagtaattaatgaatggggtaggccctgtgattttattaagataagataggataggatttggaaccctactacctagtggagaatcggttatctccaaaaggtggattaggtctataccaattagaattgaaaatatggaattaagtgtttgacctagtggagttggatttaacaaagttcaatattatacttgggatagacttcttgtctaggtattcggccactattgacgataaacgaaagatggtgatttttcagtcagagggtgaaggtccacttgtttatgtcaactccgtttagggttctcaaatcccaatcattttagttttaaaggctaaagatttattacacattggatgtgtaggatttctaacagttgtgattgactttagtagacctgaaacatttgggcctaaggatgtcagggtggtaagagatttttttttatgtttttctcgagaagttaccaggattgccaccacagttagagatagatttcataattgacttggcacctgagacaaagactgtttcaaaagcaccaaacaggatggctccagctgaactcaagaagctaaatacaacttcagggaatgctggatctaggatttactcgacccagtgtatcaccttggggagctctagttttatttttgaaaacaaaagatggctcccttcgggtgtgtattaattactgggatttgaataagatgacaatcaagaacaagtatccattgcctagaattgatgacctattcaatcagcttcaaggtaagacagtgttctctaggattgacttgcatttgggttatcatcagttgacgattcaggaggaagacatcccgaagactgcatttcagaccaaatatggtcactacgaatttttagtgatgtcattcagattgaaaaatgcttcgaaagcttttatggatcttagaaacaatgtgttcaaagatttcctcgataactgtatatagtgtttatcgatggcatccttgtatactctcagtcaaaagcgaagcttgagcaacatctttgaagtgcctgatttagggcatattatcgaacaagatggaattacggttgattcggggaagattgagtcagttaagaattggtcgaggccaaggacaagtactaaggttcaaagtcttctcagattggcatgatattatcgacggtttgtggaaggattttctaagatttcaatgccactaacggaattgactaagaagaaccagcaatttgtatggtctgataagtgtgaaacaagctttcaagaattgaaacaacggttgatcatagcaccagtgttagctttaccatcagaccaagaaaagttcgttatttattgtgatgaatctagacaaggtctagggtgtgttttgctgcaagctgacaggtcatagcctacgttttccatcagttgaaggaatatgagcagcgtttacacatgatttttagaacttgttgttgctgtgtttaaaaatatggcgacattacttgtagggggaaaagtgtgaaattttatatagaccacaagagtctcaagtatttctttactcaaaaagatttaaatatgagacagagacggtagttagaagaaagtcaagattatgactatgagattttgtatcattttggaaaagctaatgtggtggcggatgctttgagcagaagagatcccgggtaggttttaagtaccataatgatctcacctcagttggctttgaatatggttaaagctgatattaagtttgtgattaggaaactacataacctaacacttcaatcagacttgttagaaagaatcagaatagtgcaattggaagactctaagctagtcaagattcgagaggaggtattagcgggtaggggtgttcattggatca

SEQ ID NO: 119794 - DNA, 1441 bp, Cannabis sativa
  modified_base (1311)..(1321): a, c, t, g, unknown or other
ttgggcttgggttttgtaagaagattcttctgtaagagtgtgagagctgaagaatagtactgtcggtaaactggttccccaaccggaaaatcagttctatggggtctgccaggggaggaatcagtctaccggttctacaggaccaaactgaaccggtcgaccggttcagcgtaggaacctcaaaaaatctcacaaacatctcaaatcaaactcaattcgtaccaaaccttccagagtacctaaaaataccatattgaacttaaatcatgcaataaaaccaagtaatactctctatagcaaaattcaccattaaagagcaaagtttgagttctaaagctcaaaccttgctcaaacacaacaccaagcaacaaatacaagttaaatcagcttaaataacttataattaatctaaccaaacttgaattacacctacagtaccctaacctccaaaaattgcatgaacacctattctttaaagtttgaaaatcaaaggaacaaaaagagggaagcttaccttggatgagaatcactaaaaccttgctaaatcccctttgaattgcagaatacaacttacttgactctgaaaccctggttgaattgaagcaagaagaaggaaaggcaaactttagtttttctaatttctctttttcttctaattctaccaattacttagattattttttttttcttaattaatgctctagaaaaaataatagtggctagcttcccaaaagagagggtaccacctagccaagccatcaaaaagactaaaatactctcactaaggtttttaaatggcaaaatggcataggggtaaaagggtctgaaaccataaccccgccaaaccccgacattctaaatgtctatctaaattgctccgctatttctaaaatcctaaaccataagaaaagtgactctatcgaccaaacgtcgcattactattactgggcataaaatatgaaaaatatgaaatttcacatgtaatataaatagcacacctagaatttaaatatatctccataattacgtaaatcataattaaaagtctaattctaaattaaaccctaattatctgctaattctcatattaaaattaagcggtcattacaaagacaataaggttgatgttgtccttagcagttcaattgaagttcgagattgaacaacttgatgttaagattacttttctaaatggattcttggatgaagagatctacatgaagcaaccacctagatttcatgtggaaggaaaaggagttgaaatggtgtggagtcttaatagatctgtattgttgggctttatgccctaannnnnnnnnnntttcaatgtaatctctattatttaaatatcaataaagagacagaagtattttcatcacttatttaatgtgtcttttggttcatgttatcatttatatgtatatttgatttataaattcat

SEQ ID NO: 119795 - DNA, 799 bp, Cannabis sativa
tatattattttcagtgattattttttttcttattggattagtgttataccacttgtattcaaataatctcactgtatatgcaacaaacaatgtcactgctaagtgaaagagagaaagagttgatacaagagaaaggtggtgaccgagtgtttgtaaagtagtgtcagtcccaaatcaaaattctaaactagtctttttgcgtcagttttggacgttgatcgacgtgttgaccgacacaaaagactattttatagtagtgaagcttctatctttggtgccaagtaatttagcctttgttgcaagcaccatgattgcaaagaacaccatccaatcccaaaatgttcttgattacaaaggcctgactatatcctccaatcatcctttaggatcacacaaagttgttggccctaaagacacaagagaagtcttattaccatctcaatctcataaatacatcatacaattaaggaattcccatcctctcttagccatccgctcaatagagctggtagagcacaccctagctaggaaaggagaagaaatggaagagaaagtcttaaagtggttaatgcaaaaagaacgaaatgtgtggaaaaaaagagagtgacttacgaccggtttgactttgtattttattttttatttttaaaattgtgcttttagatttgagaaaaaaattagtttttaaaaatagaagacgcatttggttaatattttctaaaaaactatatatatatgtatatatatttaaatattaacaatattactttattactctatactttgtacctcaataaga

SEQ ID NO: 119796 - DNA, 3066 bp, Cannabis sativa
  modified_base (245)..(254): a, c, t, g, unknown or other
  modified_base (280)..(283): a, c, t, g, unknown or other
  modified_base (775)..(781): a, c, t, g, unknown or other
  modified_base (1631)..(1631): a, c, t, g, unknown or other
  modified_base (1926)..(1953): a, c, t, g, unknown or other
  modified_base (3040)..(3041): a, c, t, g, unknown or other
gaactttctgagatgaagattttttattatatttatcattgcaagtggatgcgattctccacctaatctttaactttttttttagttaaaataacaaatatttactgttattaacattatttaattaaaataataatatttacataaaaataaagaaggaaagagagttgtgactctcgaataattagcatcaaatatcatttcaaatattaatgggatttgttttatttttattttattatttnnnnnnnnnnttaaatataaataaaaagtcacccannnntttctcataaatcaagaatttagttatataggcacactttatatagaatagatatgtatatatatatatatatatatatataaacacactagtgatgagagcacgtgagttacacatgttctttgagtgagactttctaaaccatttactgctatttttgttgaattagcttcataaaattttgataggaataataatagtagttgacagattttctatatatgagtattagacagtctcacccatgcattaagggaatcaagtagtatattatgtgaaataaatttaaatggatatttgaacataataattaggagtttttacaccacatactcaaatttcttacttttttcttttatactgtggggcatattttttttcaaaaatataatgtaagttttcactgttattccactgttgttttttagttgttctacagttatttttaattgttttgttttattattttatgattgttttataaaaagacannnnnnntgtaaaaaaattcgtgtggcagtaaaatagtaaatttttgcccaaaatttaatatttttgtaaaaatcactaattagaaacagaaaactcaaaacaaagcacgagccccaatctttaaaaggaattttgtttcaaaagccagaattgctaccatcaatcgagtcaattgaatcttcactttcataattttgcttgaattttttgtgtaaaagagatcactctctaattataaattaaaaatgtcattatcaacttaaattttctaataaaaattattaaaatattaaaattagcatgggtacatctataaatccatggtataaactttaaaaaataacacaaaaaagtgatagaatacatgggaaaaaatgggagaaaatttttaaaactacctggatcccaattctaaagtgacatgtgattacactcttagatcgagaaataatatacaaaaacataaaatctgcacattttccttgttggagctcattggaacttctattatttttaagcctaattcttctatgaaaatacatggtttgttaaaaattctccctaacataacagttacataattatgctccttctgttatgttttgtttcttttaccattaaaaattagtatttttaccaattaaactttgcctaatacaaaatttttccctctttcattaaaaaaattaactttaaaaattataatgttctattaatactgaaaaaaatgataaaaattattaaaacacctgataaaaatattaaattaattaaaaaatatatagtttacttgcttatttatatttataaactcatattttaaaaattaaagaaaataattaaaaattcaataaanatataaaattattttaaaaaaaattagaaactaaactaaaaaaatactatgtttttacttaaacaaatctaaatttttggagaacaaaaatagactcaaacttgttctcctaaatttagtttttacaaaaattaaaattttaatatatatatatttttttatagctaaatggatttatttaataaaaaagaaataattttttaaatcgcttaattagtttcaaatatttaatctcctttttaatttttttcattgttcaaaataattttcttttaagatctaaattaattttttnnnnnnnnnnnnnnnnnnnnnnnnnnnntctcatttttattttaaaggggtacgattaatagttttcaaaatttagggtgcacagttgctaattttcaaagacacgtcaacatttaaataaaataataggacgaaatttaacagaatgactaaatttctgtaaatgtaaaaattcaggagagatttttaacaagtcgtatattttaaaagacaaaattagtattgacgaaaattcagagtgcaaatcgttaattattctagctcaaaaacaaatgggaaattttcaatattatacctaatattaaaattaattatgaaaataacaatgacaatttaatatgcactaatactattcttctattgaaaataatgataataattatctctctatccctatttttgctagctattcattctatttttatcttttttttttcttttgtcgctatcgactaaactttgagcaaaataatattttattaattttccttccctatctctttctcactcaattttattattttaaaaaactttttaaatcatattaatcatttttacttaagaattgtatcattatgacttatgtttaaggtggatatttggaaaatattttttttctctttacaccaaaaaaataactaaaaacaaaaaaaaaaactttttaatctcttttatactttattaaaagataaataactatattttaaattaaacaaaatttatataccagctaatttttctataacttatttcaattataaaatgaattatcataaatataagagattaaaaaataattttttaataaaattagtattgttattttttttccaaatgtaactcatgttctaatgtttgagataagatttattttatttatttattttatttagaaatctatcaaaattactctataaaaagcgtaactaatttaaaatactatgtggtaacatttaaaaataaaataaaaaaaaatactttttagtaacttatgatcaacaaccacttatttgagatatatttatgttacttttttagtaacttttcatattaattctaactatatttaataaattataattaaatataagggaattactccatatactattttnntaactttttttttttaaatttacgg

SEQ ID NO: 119797 - DNA, 3079 bp, Cannabis sativa
aattgggggttagttgcaaaaacctacctactttaggggattttgccgcaaataatccttatatgtattactcatatttatatttttatcatatgtcgtacgtatagagaaattctcagcccagttttaaaaatttgcttttattgatctttctgtgcagtacggcagtaccttgtattatctatatctattagaaaaacatattcatatttaaaaagttttgttattatattgctgttgttgttaaggcgtgaccaaatcgctatgggatatgaaattcttggtggttctttgttcggcaccagtgggcagggatagttactcatagaacaattactagtggttactggtgtgatttgttgaagatagtagaaattttctcagttctttatattaagcttaattaattttaaaattttattttttacataattaatatatttaaaattatatacactgtttgataatcagcataaattgttacattttgaattagaacatttatttaagtagttttttcctttaaaaaattaaataaataaataacttttcatattaaagtaatttttttttattattattgaccgttaatttaaaacaatgtcagataattttttctttttaatatttattataataagaatatattttttttgacatgaaattacaacttcattaaattagcattccgaatacaaaatagtttgaagatgagggggaagagaagtcccaagaatgctacgaccagataaagacccagcgtgcctagcaacaaagtgggtaactcgatttgctgatcgtctaacaaaacgtaaactaacattggaaagagaggataataaatttctacaatcactaacaactagaccaaataccgaagtcattggctgagtaaaatgaattgcttgaactgctaacatactgtcgctctcaatcatgacacctttctagttgtttgttttaatccaactgagtgcttccttgatgcccattgcttctattgtttcagctggaaaatagcctccatgatacatggcttgaatgtggagtggagaagcatgatgatcgcgagcaataaaaccaaacccataggaattttcctattcaaatacagcggcatcaacattaatcttgatggttcgtatctccggtttaacccaaagctcattttgatcacctatattgtcaaaaaatatagctgatgaagtaatatcttgagcttttctccaatgatcaagagaagtaaatgctgataccataatctcgttcaaagaggaagttttatttttccaaaatttttttacgagctttccataacatccagcaaaccattgctattttgcacatgtcttcggtggcagcagaagaaaaaacctattcgagccatgaacaaaggtggcgaagggagtttgatagaggacacctagctgatgccaacaagtagcagccaaagagcagttaataagagtatgggaagtgttttcgggttgggaaagacacatcgggcagagattagatatgtttacatgtttagtgacaaggtttagacaagtaggtagataatttgtcaaggctcaccacaacaagtttttaacctttggcggtatcttcagttgccaaagctcttttcagaatccgaaattatttgctgcaggttgaggagctttttctttctgcagcagcaaataggcgctgctaacactaaaactaccattggattcaccaatccaataccagcagtcatcttcatctgtagagctgagtggaagtcctagaatgaggttggcatctctaggattgaacatatcgtgaaccaaatcataatcccagctagccgcaccagtagtaaacagagaagaaacttgctggtttaagagaccgggggtctgagttgtgacataaggttgattcttatcaagaagccatggatgatgaaggatactggtattcatactagaccgaattgtgcgccgagctcctaacttgattagcttttgagcactccaaatacttcgccagacaaaattaggattggggccaagttcagcattgagaaaatcagagtgaggaaaataccttgctttgtaaacccggctagctagagtattgggattacataacaagcgccaaccttgcttagcaaacatagcaagattgaaatcacttaaatatcaaaatcccatacctccaagatgtttataagtggtcattagatcccaagacatccaaatgatcccgtgacctttacttgaactagttttccaccaaaaccggaccataagcttttcaatctcttgacaaatgccaataggaatgagaaaagcactcatggcataagtaggaagcgattgaattactgtcttaagaagaattttcttgcctgctctggagagaaacttatcatgccataataataatatttttattctctctagaaacactaattatattgggtagttttttatttttaagtcattattctaattatttttatcttaatattattttaaaattattattactattttaaaatattttatctttttatatatgtgtttaatattttattatatttgatttttctacttttcctttttataaatttattttttttagttatttaaatttgttatatattatttgtatagcctattaagattactatttctaaattttattgtattatttttttataaagtagatatttttactactattaaagttattagttatttgttatttaagtgtattattaattggttattagagttgtaaaattattgagtcatttaagttattaattatttgaagtagcttgcgttcaagatccttctattatttttgacaagatgagtattctaatttttcactcaaaattgactattttaactatttatcaatactatttatttgtagtaaaattttattataaactttgtaacaatatttatttatttgttataatgttttttttttccttcttgactaatgtatttttatttagggataattacataaggcactattttttgtaaaaaattacatttttacgtttaataattttttttttacattttta

SEQ ID NO: 119798 - DNA, 1145 bp, Cannabis sativa
  modified_base (1088)..(1089): a, c, t, g, unknown or other
aaaaaaaaaattaatacggcctggcaatagcggcgggggagggcctccgccgctaataaccccattattagcggcggaggagctccgccgctaatacccccgccgctaatgataggatttcttgtagtgtactcaaaacgaaatattgaccaatattaattatatttatgttgctctaacttagattatataaaaagggaaaaaagaaaaagcaaggaaattaggatctaattaaaataatgaaaattttataatgcactcttttaaaagtggtttatctatatttttatttattttgatattcgaaaaaattaatttaatttttttcatagttataattatttaaaatatcttgtaaaattttaaaaaaatttaacatgcacactgaaaaacaataaacatgtgaaatagtctatttgaatgtactttaatattttatatactataaattatctttagtggcttttttggctcgcaatagttctttttggttcactatattatcgaatcacaagcgattctttaagctcattttttggataggttaggtatatggatttttatctcaaaattaattgagaattaaaagaatagttcatgcattttatatatagtatttaattttcacatattattaatgtgaagctctctaataattaaaatatttttttaatactgaaacaaataaaaaatatatcagtacatttttttaataaggtacgttatagaaacatcctaaaataataattaattttataattacgtaaaaactaaacaaaatgtacgataaaataatctcataaaattatttcttacgttttgcaacttaattatttttttaaaaaaataaaaaataaaaacattattcattaaattcagctatataaattattgaagaagcgtgcataaaggaatgtgaaacaaatagaaaacgtgaaataaaatatataagaaaattatctcatttttggtacatagcaattaatatatatttttaaaaaatattcattggcattaatcatgatatatatgtatgaaattagatggatattagatattggaaactaaataatttaactataaatatnnattttaaaaatattaaattattaaattttgatccaataacgaataataaaagaaaa

SEQ ID NO: 119799 - DNA, 989 bp, Cannabis sativa
  modified_base (936)..(958): a, c, t, g, unknown or other
tttttttttaattagtcactaacatatagcttattcttttctgagaatttctgggttttgagggctcaccaatatgcctcgacctgctatgatatgatatttctcagctaattcaaaacttcaataattaagccaaaattattaatcaattggaaatgaatatatatgttaaagctatagctagtcatgatgtatatatatacttttccatgtcaagataatatattatttaagttccacattgtattaaattaaccatatatatctttatgcattgaaggggtactatatatacgcattcatatataagtccacatatatatatatatatcaatttaaattatttatacaatttatttaatttgaatcacaattatcatttgttcttagaattaatatgtactgcgctaatgtaatgttgcttatatatgaaaatcatcatcagctcaagtactctatatatatatatatatagtctagatatatatatagagagtttaatttacaacataaaagagatttcaatatctaaaaatcttatatttatgcatgaaattaataatttgtaagtattattattattaaccctcagaaatataatacttatatattgcaatattgactcggtactattgtaagttgtaatattaattcagaaatattaaaaaaataaaaataaaaatcacgtacgttaatatattatttggtgttactatatatataagtaatataagatcttgccttgccggccaagctaattaataattttaaaacattcatatcatatgtcttttggagccaaaacgaaacttccacaataataatcacaaaaatatttattatgaccatgctctatgtatagacatgtggttagggttcacccttgtttttggtatccaaaataaaaaagggtttgggtaaatactattttggacnnnnnnnnnnnnnnnnnnnnnnnattggaccctgtgttttattaaatgacaaaa

SEQ ID NO: 119800 - DNA, 737 bp, Cannabis sativa
  modified_base (634)..(646): a, c, t, g, unknown or other
aggaaagaaaaatgctctagtggggaactagctactagcaagactcagatgtatataagataaatgaataattgtaagtttagcaaaaatatagatataaggaatgaaacaaggtgtatgggttgagaaggtacctgtcggaatagatgtgggaaaaggtaagcctgttgcgtcaaaattctcaaggagaacaggtgtcgaaagcctaaggacgtaagttgtgctcgaaggaaataaagactaaaatgttgaagcgaattcagaaagataaaggtgaatccaagctatgaaagaagagagggctatttataggaggggggagtgattcatcaccgtaggatcgaaataagatcaacgattaagatcaaatatgcatgcccatgaaagatcacatgggaccacctaccttattgaagaatcacatcaatgcggcagtgcgtagttctagacataatgccagatgaggtgcaccgtaaaagcagagaaggcagttcacttatagtcaaaaagatcacttaaaataaatcttttggactggggtaagtgttaacaaaaaaaatagaagaagtaaaatgtttatatcaatagcaaatggagaggtgaatagaacaagatattgttgggttttatgccnnnnnnnnnnnnntatttcaatgtaatctctatcagttaaatatcaataaagaagtagaagtattttcatcacttattgggtcatttagttcatgttatcaatt

SEQ ID NO: 119801 - DNA, 3620 bp, Cannabis sativa
atggtcgaaaaaaatcttttgcatagtttgtaggcgcccatgtgtgcatagagtcgtgacatccaccgagtccacaagcaacggaaaaccgtggcatgcatggccacataggatttatatggatgaaaaccaattcttaaactcaagaaaacaagaaaacaaaacaaagccaaacatggtcgaaaaaaaaaatcttttgcatggtttttaggcgcccatgtgtgcataggatcgtggcatccaccgagtatacaggcaacagaaaatttaggcttccatggccacataggatttgactggatgaaaaccaaaagttaaactcaagaaaactagaaaacaaaacaaaacaaaggcaaacaaggttaaaaaagatcttctgcatggactgttggcgcccatgtgtgtatagggtcgtggcatccaccgagtccacaggcaacgaaaaattggggcttgcatggctacataggaattgtttggatgaaaacaaaaagttaaactcaagaaaacaaagtaacaaaagaaaacaaagccaaacttggtcaaaaaagatcttttgcctagaccgttgacgcacatgtgtgcatagggccgtggcatccaccgagtccacaagcaacaaaaaaccctggcttgcatggatacataggatttgtttggatgaaaaccaaaagttaaactcaagaaaacaagaaaaaaaaacaaaataaagccgaacttggtcataaaagatctttttcatggatcgctggcgcccatgtgtgcatagggtcgtggtatccactgagttcacaagcaacgaaaatttttggcttgtatggacacataggatttgtttggatgaaaactaaaagttaaactcaagaaaacaagaaaaaaaaaataaaacaaagccaaacttggtcataaaagatcttttgcatggatcgctggcgcccatgtgtgcatagggtggtggcatccaccgagtccacaagcaacagaaaatcgtggcttgcatggccacataagatttttatggatgaaaaccaaaagttaaactcaagaaaacaataaaacaaaataaaacaaagtcaaacatggtcgaaaaaaatgcattcgtgtttttcactgtggtgctttctagaggataaagtccatttaatttttttcctctcatcaccaccattgaacctctacaaactttcatgatttctttctcaattttaacaagaaatccttgatcatctaacataccaacatagatcaaatttcttttgagatcaggtactagtcgggcgtcttttaacacattttcaacaccatcataagtttcaaccttatggttccaattcccatcatgttacaagacttgttatctctaagatacacagtcccatagtttccagatgtaaattcttcgaaccaagatttatttggtgtcatatggaataaacacccagaatctaagatccattagattcaaattctcagaggttactagcaaagcactagctgagtcataaccgtcactactcactgttgcatctccttcagatatcttgaatcacacttcttatgcctctccacacacgcctttttgagatgccctattttcttacaaatccagcatctaagatttttctagtcatcagactgtgatttggatcttgattttacttttgaaccattgtgactttctcttttctcacttctaccccttgtatacaatccatcaccactttcggaattctttgactcactcctctggtttagctctttcaaattcaaggctgactgcacatcatcgagtgtgatcgactctcttccatacaacattatatctttgatgtgagcaaaatactttggtaaggaactgagcaacaaaaaggcttgatcttcatcttcattggtgacaccaatgtttttaagatcgagaatcaacttgttaaactcatcaattcgctctccaacagatttgtcttccatcatcttgaatgaatacaaggtctatttcacatataatctattcaccaataatttagtcatatacaaactttcaagtttcagccacacacctgtggctaaatcttcttttgcaacctttcacagaattttatctccaagattcaaaatgatcgcactatgagcctttgcaagagtctctttcttgtctttttgagacatcgaatcaggaaaagacttctctcctagaagagcctcatacaacccttggtgaaccaacaaagccttcatcttcatcctccataatccaaagtcattcataccagtaaacttttcaacatcgtatttcgcggcagccatgattacaaaccttgctctgatatcagtttattatgcgaaatggaaacaatcaataacttacgattcaatttacagtaccaacaaacatgcaacacaatcaagaaacaatatatcaagagatctcaagattcaaataatgaaataagtattaaaatagaaaagaataataccaagtttaacgagtttaagccatgtgcaatgctctacatctcagttgcaacaacaccagccatatctatattgatatcagtgtttacaaggttacaagaatcttcacaaacttctcagagattacaagaagaagtttctctctctagttcagaatatctctctcaaccttacactatcacgagtttcactcaagcaaatctagtctgattctccataggttataaagatttacaactataaatagatttttattgttgccaaaaatatctcctaaatcatcctgacacatttagattgtcttaaatgatccaactcatcaccagcaacaaaaaccacatcatcttgaaatgcgcacttttagtatgaacaatctggaagctctataagcacacaagccttttggatatgtacaagacttcattcccggatgaaccttcaagactgacagtatgttgtccagaagtgtactcccagattaataaaaagctatccgggagagacattccatgcacggtacaagcttatctggaagtaccttccgaattctacaacaccttccgcccaggatttttcaaatccacactaagcttctagtatcttctctctagattcacagcttccaattctgaatgacaaaacttgtaaccataacatagaagagattatgagggttctaatggcatgatgtgtgtctaatcatcatagccacacatgagggatttgtaattagaagcacgaattctcgagtgactgtacaaccattgtatattgattgtacttagttctatctctattgcttcagctcaataaagaaactcaaagcctgttatggctgttttggccggaagtaggctagatgaagtaattcatccttgttcgaacctccttaagtttgtttgtgctcttattagttttgtttactctgtccaagtttgatttctatcattgtttttcataacgagtttataacttctctctttgtctttcttgtttgattttgttcttgcccaattatgtttcacaacacctagaaactaaaatttcccaataaaaatacatgcttatagttttttgggtaaatgccattttggaccctctgttttacaaaagttaccaattggaccctgtgttttgttaaatgacaa

SEQ ID NO: 119802 - DNA, 1104 bp, Cannabis sativa
  modified_base (418)..(422): a, c, t, g, unknown or other
  modified_base (1076)..(1078): a, c, t, g, unknown or other
tgtcaactaacttgccaaaaaggattttacatataataatatgagcatataaaatatgtattaaaatattacatataaatgtaaatgtaatttgttaaaaaaaaaaaaacaattgtcacattcctatttttatttcgtgtgcacattcttattttatcttacctttcaaaaaatattttatcttaatattatagtaaaaatattttaatggtgtgataattttattgactattatatcccattttttattttctcttatattttttttgggctactcactctttctttaagttgctgctcgtaactctcccgctcaagctttcattaggtccttatacctacgaaatgatgtctcttatacatgagtacgtcactctggctgactgattctagaaaccaacacaagtgtttccagcgnnnnntgtcctcactcgcacacttcatgaaaaaatttcctaggaggttacccgttctaaaattagcccaggtcaagcatgtttaattgtggagttctttcgtgatgggctatcagaaaacaagatgcaccttgttcatataggaagtaccattcaatccatttattttaagctctccttaactatgtattcctatacctacacagtctcagaatcatcacacttgtccttccccaagcgatgtgagattgcacaatttacctaatatttctccttacagatcacaggactactaacggccacaatcaccccacttaccggggtctgacatcctcgttaaccacactttctgctgagtcaagactctgataccatttgtaacattcacacttcaagcctccattatgccttccccatggacttatggctctaatacatgggtacgtcactcagactacttcttggactaacgactgactctatagaccaacataagtatttatagtgtgctttgtcctcactcgcatgcttcataggaaaactttccaagaggtcacccatcctgaaattacctgtaacaccctaaatatttaggcacgctactcaaaatatttatgaaaaccctaatcccctaagcgggattactaatcaaaatagcgnnnaatttaaacttttataataaacggaa

SEQ ID NO: 119803 - DNA, 781 bp, Cannabis sativa
aaagagcaaatttaactaaagtatggcaaaaacattcacattaattctgggttaaaaattataacttacaaattaaaataattacaagaagctttaatatcaaatatcactaaactcaaagatggtgcgacataacaatgataatagtattgtgcctgacactatcggagaaacaacaaaaaaaaaatctagtgagattttttccgtttgtactctaaaaaaatggtaaaggaaataaatttgtataaaggcaaaaggcaagttgtatttataaccttcagcccatgatcattccaggtattattagtttgtgctaattcaaattccaattagcacattatgatccaacgtcagtcggaagaggacatgaagaaacacatttataagaaccgaggagagaaaataatgcaggcatgcgagtcattcatcgagaaacatgtggtgtaccgcgcgaacatgcgtgctttatataaccttgacaccatggtgtaacccctcgaggagaattgaaaggtcatccaataacaaatcccaacttacaatattacaaactgaaatttggggagtaaatattgtccgtaatttttaccaagatatgtgactatttgagaggtagccacatcttcaatcgaacttcaaaacactaaatatagtgtagtttcacatatatttacttccagggccgtctcaaatatttttgagacctaacaaaaaaaattataatttgtaaataatattttcaaatattatcatattagaaaaatatattttacataattaa

SEQ ID NO: 119804 - DNA, 2541 bp, Cannabis sativa
attcaaataactaaatacaacaactaaattaagtgttcaaataaacaatacttatatcatcacattcatacaattacaatacaatactataatcccaattttgtgaactctcctcatcatcatcatcaccattctctccagactattgttgtagaatttgcggcatttgtggatagtaattaagcttgctgtgatacttctagagtttgcgggtagtacagttactgtatgtgtggcatttattgcattggcgtcatcggtgacagaagctgcagtgtctgctgcactgaaggcatctgctgtaaatttgacatctgatgcatatgtgccatctactgcaatgaatgcacctggtgcatctgtggtgtctgctgctgcatttctggtggctgttgttgcatctgtggtgtgtgttgcatggaaggttgctgctgcatttgtggtgtgtactgcatggaaggctacaactgaatttctggtgtctactacatcgatggcatctagtgcatcgaaggttgttgctgcacctccggtggttgttgttgcatctactttgtctattgtgtttactgcatattcatcacctgcatctacgacatcgacaatgacaaccaagaaaaaggggacatttgctgaggtgatgatgaaggatacataacactacaacatttattgttaatagcggcgaatgagtttgccgctaataaaggaaaattctacagctattggccattagcgagggcaatctgccgatgatggacgaacaataataattggacgctattaatggttattggcagcagattttgagtttgccgctaataaccaccaatagcagtgggtaatagcaacagatgcccaccgctaatgatgtatgttagtttcgttaatcaaaactgacacatattattagcagcgagcatccgccgctagtaattaaatatttcaaaaaaaatttaaaaatgaaaatctattaaatataaatataaaaattgataataaattataaacattataattatattagtaataaattatataaaaatttaatttaatttaactaattttaaatattataatttaccactaaataataaatacaatattcattactattataatgtctcaaattaaactaaataaataaaatatactttatatttgtagtgtctaaattattaacaaatataaactaattattccataaaatcatcattaaggtcttgaagaaaaaagtcctaatacgcattattattattattgggaggtcccgctagctagctgtggcggagaaggaacatatggttgatctgacgataaaccaagtgtaagtttctctaattgagcttgattgagtattggggtcaagaaaattattactcctgcaaagaacatgcaaatattctaaaacttgggtttagggtttagggtttgaggagactacaaagcggttccatattgcggactagactattgttgctgctacggagaatgtcagcgttgatgtgttgtggaggagtggcataactctgagaagacaaactaccaagattttgcgattgactgtacatttaaataaagttatcaaactgtgagtaatataaattggcaaattatttaggtatcagactactccttaatgtgtcaagtatagttataaacatatctgccacaatgatacattttattagggggcggaagaggcgcaactgactgactttgattgtattattttttttctttacctttgatactataacccacacctctttgatagtcaagtctttcaccaagaacttctctaagtacgtcgaattgaaaactactatcaaattcaatatcagatgtatcactctgagattatcttttgagtcgtttcctatcaagctccctacacagttctccctatttaaataaaatattattataacatataattaatataatatttaaattaataatataatattttatttacttacaaaatcttctgcatcgacttcgttgacaaaactactagacggttttttcgtatgagccaccctccatacatcgaccacatgctcttatggttgaccaccttatataataataaatgaataaaagagtttataatgtattttaagatatattatattaaaaaataaatgataaatattactacttacaaagttgtgacctataaaagccagcaatcttgtgttatgcattgttggatatttcatcaactgtctatttgctttgtttttttcatagcgattcaaaaaaaaaatcgctaatgaacagttcgcaaataggcttctaattctccttattcaagttgttggggggtaggtcaagaactttctcccaatcttctagtttagagtaatattacttaaaccacctatgtttgatggtctttctctcactatatcgctctgccatctctgtataaagagttcccgttagttggtcttgatatggattctcatcaatatcaaaataaaactacatgataaagcaaataaggatttatattaatgttgggctttgtgccct

SEQ ID NO: 119805 - DNA, 1917 bp, Cannabis sativa
gtttcccaatatatctgcagccagtcgacatattcgttctgatcaacaagcttaggccaacgcaactcaaataaatacttccatgccttgtcccaacccgaaatcctgcaagaacacatatatgttccataagcaagttaaattcttctcttcacttacacattccgaattttacaatgttttttcataaaataaataacaaacaaaaatcaaccttccacgttttcccccatttccatggccagcttcgtcgtactcttgctcctccttgtcctcagaaccaaaatccctgcccaaaaaatggagattttgttatctatcaatcaaaacaacaatttgtttttcctttttgagatcattcctcaaattcccaaaacaataaacttttccctcacatacacattccaaattttacactgctttgtcttaaaataaagaccaaccttccccgttttctccgattttcattgccagcatcaacatactcctgctcctccttgtcctcattactcaagtccctgctcaaaaaagtagaggtttgatttcaataaaaaaatatacattcttttctctttcttataacaatattacataaaccactaccaaatttttttcttcacatacaaattccaaattttacaatgttttgatataaaccagataatcaattgaaaaaaccaaccttccacgttttctcccatttccatggccagcatcattatactcctgctcccccttgtccccagagcttaaattcctacccaaaaaggtggagactttaatgttaatttaaaataacaaaatttcttttcctttctgaaatcattcccaaaacaataattacacacaccattaacaaataaagtagcttacatcgccatttccaacttgagcaatggcaatggaggtaattgaagaagtagcctatcaaacaagtcagttggcagcttacatataactggcaccaaatcatcacctacaaattcatcacaaaacaacatcaaaaatcaaaatcacaaattttacaaattagtagcagtatatttaatttagtgtactaataataccacgaagcagttcgtttttgacttcctcaagacacaagctagtcaaagatggagctttccccattctgaaaccctagaaaaacatttcccccaaatcagaaattagtccataggagttagggtttcacatgccggaaagctaagatgggtactcatcggaagcttttctcatcatataacttaatttaattttatttttgccaaattttgctaaactatctcatttttattgattaagatgcagctttttcttatatattttactaaattttactcataagttttttttttcttatatttacagcaaattttgattttttgagtaaccattataggttagcaaattttaaaatctttgtatattatatgttgtgtgatagacatagtcttaaaatttgcattaagttgctatattgatttttaggtttatttttttcaacaaaaattacattttgcattagtgttttaagtagtttttttaatacatgtttcatattccgccacatatagtttaagtctcagatgggttacatgtagtattttggtaaacctacacaacttgctacagaataataatacaaatattgttactggacactagtgatatccaacataatctataagtagtgttacacgattgattagctaacaatattttttaaaagttatttttttaaagttatatgaaattcgatacttaattacactaatagcagtataataccaagaagagtgctaggcaccaataatacttagggcttgtttggaacgctgtattaagccgtattgtattatattatattgaattggattatatatatattatatttttatataatactatgttaaa

SEQ ID NO: 119806 - DNA, 1258 bp, Cannabis sativa
  modified_base (1195)..(1219): a, c, t, g, unknown or other
cgctcttccgatcttagggcacaaaacccaacatcaactacttcactaagtgggccgaagcagatcccttagtcaccatcacatcaaagaaaattcttgatttcgtggtcaagaacataatttgtccatttggactccaatagtgtcagacaatggaacacaatttggaagcgacccctttattgatttttgcatcagacatggaatcataaagagtttcttagcacttgcccatccataagcaaatggacaagtggaattagtcaaccaaactcttaaggatacgctaaagaagtgcccagagcaagcgaaagggaattggcttgaacaactgcctgaagtactatcggcctatcgcactactataagaaaaatagcaacatgtcacactcccttcgctctaacctatgggtataaagccatgatacccgtagagttcacacctccatcctatcgaaggcttacatatgaccagcaaaccaatcaccagctgttggtcgaatccctatatggaatcaaagagatcagagaaaggtctgagcttagaaaggcagcgtattagaaaaaggtcgcaaaacactacaactccaaggttaaagatacgaaatttaagcctggagacatgatgttatgattggtattcctgaatacgaaagaagcagcaacatgagtactcgagcctaattgagaagaaccatatgtcgtggttgaagcgcttgaacccagaacttacaagttggcatgctatgactacaatttgaatccagtcacgatacgaaggtattggaatatggtgcatctatgacaatactaccaataaaagcaactatctctaaaatagctcgcgtcacagtgagattcaccttacttcatgtaaatgaatcgatcgccccttaaccgctgcgatgcgacaaagttgtccctaggttaagaggttcatcgctaaggcatggctcctatgctaaaatttgaacagggcattagcatagtgaggatcacttcaataaagcttggatgaagaagaaaatctgcaactactacttcaaaagtgtattcttttttctctcaactttttcacattaatataattgtatttaatttaatgagaaaaagcataactaaagttttgttggtacttcatttaaattaatcaattacagttcatgtaacaacctaactagcataggcgtattannnnnnnnnnnnnnnnnnnnnnnnnctcgttgctaatcaacgagatttatggaaaacgtgatta

SEQ ID NO: 119807 - DNA, 1174 bp, Cannabis sativa
agagagagagagagaggtttaggtttttgtaatttgtgttattttggttaagtgtcaaacaaagggataaacttaatctcttaattactaattaactataaaagaataatcaacaaatcaaaaacttactaaggacaaagttaggggaaaaagataattctacccatgcttaaacatgaaataaccaacatgcttaggggtaaaatggtcttaaactataactccaaaaattcccaaaattcaaatgtctatataaattgcccccactattctagggtattaatccatactaaggtgactctataggccatacatcggattctacaattactggacataaaaatataaaaaccataaaattcatatatatcataattactaaacttggaattcaaatatatctttataatcctaaaaatcataattaaaagtctaatttcgaaaataaaccttaattatctgctaattctcaaaataaagctaagtgatcattacaattatcccccattaaaaggattttgtccttgaaaaatgtgaataactccgaataatgagccctcatatcaaacttcaactcccaggtggcttcctggccaccttgctatttctctagagtatattgaccaaagtaatggtcttgttccaaaggactttatcctttctatcaatgatctgcactggttgctcctcgtatgataaatctgattagagctctaggattttatagctcaaaacatgtgttgggtctgaaacttattttcttaacagagaaatgtgaaatatgttatgcactactgagaaggttggaggtaaggctagatggtaagctaccaatccaactttctcaagaatatcgaaaggccctgtaaatctagggtttaacttgtcctttttcttgaaacatttaattcccttcattagagatactcataggaagacaagatctcctacctaaaactcaacatttctacatttcgaatctgcataactctttcgcctactgtgagaggcaagcatcctgccatacaacatttcatagggagccatccctatagtgctttggttactattattgtatgaaaactctatgagtggcaaataattactccaggagctttcaaaatccatcacacaggctcacagcatatcgtctaatatctgaattgtcctctcg

SEQ ID NO: 119808 - DNA, 627 bp, Cannabis sativa
ttaagtgctgatccaataaaaaaaatccacataaggtttggacctgcaaatattcaataattcctccttgttgatcaaaggtctaaaactaatatcttttatattttttagaaacttactgcacatgttatattaatattttttttttttgaacaagaagaggttctttattcaaaaccagcaaagaacaacaaaaacaacacccagccgcccaaaaaccaagcagcccctctaccagctattgattacattgaatatatattcatcaaacttttttgttttccccccactgctacaacaaagcaacctatatttcaccacctgccttatctctttgctaatgcagtctatagtattacatttaagataaaaaatacagcaaaataaagtataaagtcgccaaaacaatcgcgtttagcaccttctcttgcaagttgttcgagggacgggagaaccactccaggatgttgtacgaccaagaaaaaaaaccacaccaggtggttatttcctgcactacttttttggtgaaacaacagcttataaataggtgttaatggtcttcaattgttgaattgcaaaccgggcaaagagtagaaggaatagagataaatctgctaagtttgtgtc

SEQ ID NO: 119809 - DNA, 899 bp, Cannabis sativa
  modified_base (626)..(626): a, c, t, g, unknown or other
atcagttacctaatttaatcggagtggttgaatgcgacgtagactccgagacggcaccaccaccaccatctgccggttagtggtgcaaagagatctcaaaatacagagaggggtagtccagcagtgagggtttattgaagatctgaaatcttcaaatgagaaaatgaacaaggaaaggggttccagggatttaatcccttctttttcttcttttaatgacgatatttcaatgaggacaaagtcgtcagtgatggacttttcactaacgaggtggcagtccatcactaacaactttgtcgctagtaatatttttagagggaaaattcctgcctcttccaacagctctttttcaaaaaaaaaattaaattttattgacgaaaatttcgtcattaatatttatatcaataacgataaagttgtcattgatattatttgttgccattgatatataataaagcaaaaaaaaaaattacatttttattactgaggacaattaaatgtcgtcaataataatgttatttttagtaaggactttatgccgtcggtaatagtgtcgttagtgatacctattattcttgtattgatatgaaaagtccattagatttttataatatatttattagatntaattaattgtataagtggtattaaataatattattatctaattaatgttagaaaattaagtttagagaaattcgcaagtttacaaactattttactaaaataactatatttgaagttttataactctgattgaggtgattctagtacgttgaaaataaactgttttactaaaataactatatctgaagttttataactctgattgaggtgattctagtggcgttgaaaatataatttaaagatctataaattttgtagaaatagctatatca

SEQ ID NO: 119810 - DNA, 766 bp, Cannabis sativa
tttatgttttggtgttttcaaagttgtgtgccctattctgtcttcagatgaaggttgattcactctgttgtagctttttattcttcatgtttactgttctatgagcaataacaattttgtcatttaatttaattttattttaattttaattttttttttttttttgcctccttgcaattactgttatgcacacggtattgcataattctgaatgggcattgtaaaagcattcgtataaatgagataatataatatggatatagatataaaacagagttatatttgtgacccaagttcactttgtatacgctcaacgaaaatcataaaggccgaagtaagcaaaggaatagtaattaattttgaactgtaaaaaagttaggataagattttccaaatctttttgttgccatcttttgggtactttattacttatcaagaaaaaatagaaaaaatgaataaacttttgggtacttcttgattttacaacaaggatcacactggtgttttaattagcaattagcaaatccttaactgctaaaaacaccaatgaaacaaccacttaactaaagactaagttttattccaaaaaaaaaaaaaaaaactaaaactacgtcagtcacaagcctagacacaatgctaatgaaagcagtctgtatcctttggtgattctcttgaattctagtcagaaggctagacacaaaactaaacaattctaacgagaactcaaaaataaagttactgttaggccttagggtaataaataaag

SEQ ID NO: 119811 - DNA, 3837 bp, Cannabis sativa
  modified_base (288)..(293): a, c, t, g, unknown or other
cactagtcttattaatcatagcgcgatagctgaaaaaggggggttacgccatctgtcatgtcgtttatggtgatttcaatacgtcttcccccatacggcattaaatgcaaggtgattacttaatagattccagtacctcccggaactgccttagtatgtccctggcctccaggagcataaagatccttcttatgtctcctccaggtgacaccttcccagagacactcctcttttgcctaagacttagttgatttctctaagagctggtcctctcagctccacgtgtcnnnnnnatccaggtccacgtattttgggcaaaatcaagggcaacaaatccaattagtaattgaatttggaaaatcatcatatgatccaatctaatataatccaattactaattgaattggatcgattttttaattagatatccaattacacacataaattttaatattaacataaaaatatgaagaaaaatacgtaagaaaatcaaatatcatcttttatttaagtttaatactccataaacatatcatcattacaattaattaaaacaacaacatttctaagtaataaaataaaataaaacatcatgaaaataaatacacaaaacaatcaagtgttacaaatccaacacaaaaaaaatccaataaaaatataattaatatatattatatttttataatataaacaaatataaataattttttaacatatataattaaatgtaattggattggatcaagtttcaattggattttgagatttgacatccaaaaatcgacctaactacaattagaatccaacttttagcatccaatctaatccaattgtgattagatatctaattttttgtaattagattgaattggattggtttagttcaattaaattggattgaatattgcccaaccctaattttgattatgtgttttaaaggataaatgtagagaacttcacatgaatggtctagcatcttagttttattagggtttatgttttaaaaagcaagttaaaagataatatattacaaatatagcttaaatacaaatattataaatgaataggttaattaattataataattaattaatagggttaatactattttggaccctgtattttagaaaagttaccgatcagattctttattttattaaatgataaattagatcttgtattttataaaatagtactacatagtactatgagctcaattttcgataatttttttgacgtaaccaacttgaagataatttctagcatgaatagtgtaaaaaatgtaaccaatcttgtcgtaacacctctagctcaaattattattaagttttattttgataaaaagtcaactcatggtactattttgtaccattttggataggggtgttcattaaactgcccacatcacacaaattggccgcaccacaccacattgcacaaaaaatatggtttgaaatcatttgcggtgtggttgcagtctgcatttttgccgaaccgcacgatttgtagttttgaatttaatagttgcggttcaaactgcaccgtattatatattacaaaaatactaagtttaacattataatttctatttcatacatgagcaactcatatggttataaagtccaagtcatacaattaaatttaaggaacattcatattaattattctcctttttttcccaaaattttattgttaacgtattattattgatatataatatataatatatatgtatattatataattttttaaagacaatttaatataataacttgattagtatctatgttatgacgtgaaaattttgataagatagttttttttttcttgtttaattgttgaaacttgattagactaatcttttgatttttattttagtgtttgataatgatgatagtgtaaaccgtttaaactgtactgcatcgcaccacatttttgtagtgtagtttttacgattttaaggtcttgcggtgcggttgctgtttgagaaattgtaaaaattgcatatacagtttggtttgaaaaaatagcctaaactcataccacttgcaccacgaacacctctaattttgaaaaacacaaggtctaatttgtcatttaataaaataaagggtctaatcaataatatttataaaatatagggtctaaagtaatatttaccctgataaatatatatttatatataaagtccttattcatgttcgaatgtatggttttatatgaatacatgataattaagatcatacatgataattaacatattaaaataaataatatttaattaatgattatagtacagtttactaagcacaatattgtgatgcaagtggttttgattcagattactaatatgggtagacattttagttaatgtactatgtataatagtaattatacatgattagaccgatgtgaattaatatcgatttttatcaactaactgtttatcataaaagatttaatttatattgtgaagatgattattagtatataagtctgtaagctgtaatcatgaagtcttgttcatattttcaacacccatctaggtatcttataataatcgtactgattaaataatttttttattttagaaacttagtaacataaacggttgggaacatgaataacaataagctggtggcatgcccaattttgttaaggtagaccatcataatgtggaacatgttatagaatgtatcaacacttactgtaaatggttggggcaaagactaaataagcataatttaaagatcatctcatcaaaaaattgtgattcagaggtctttcaagatctagccaactcccttgagtttgcttttatggagagcaatgagaaatttcttgagaatccaatgtttgttagggaaaacaaagccttaaatttgtgatcgataaggtccaagttcaattggagggggcatgagaatttaaacttttgtcataatcagctaggactattttgattaaaagtgtagttcaagctatacccgtttatcaaaaatgttagtattcaagtttccttctaaggtcactaatgatcttgatgagtgtgtgcatagattttgatggacgagtttgatagaaggtggaaggcagctaaatccattgatagaattttgaattctcatgggaagccttcgtgaccagatcacttgtcaatggaaggatccgagggtagctaataatattattcaatgtgagattggaaggctccttaaatcaaattgtctgctatggaaagctacgatgataggcatttgtcgatctcttaaataagcttattaggcctttaatgcatctagatttgatggaacaaattagctttttaagaacttttggagggccaagattctagagctgaccaaattgttcttgtggaaactttataaggatgcacttccttttactgctaggctccaacaaatctttggtaaagaggttggtgattttgctctctatgaagatcctaattctgaccatgccattcatgtcttcgggtcaataaattttcatggtttcaaattaaatggggctctgagatcgaataacttagaatgattttttctacaataaggctaagcttattgtggattgacaactaagaacatccaaacaactttttcgatacactagaagacttatgtttctgaaaggggttgtaggactcgattgcctcagggatgctacaactctttggagtggccgaatgtggttagaatccaagttgatggaaagattactaccctaatggcacgtttactatacagtattcagaatcggaataaattaaaggagaaatgtaacggaataaataaaaaataatcggaatcaatattt

SEQ ID NO: 119812 - DNA, 912 bp, Cannabis sativa
  modified_base (358)..(361): a, c, t, g, unknown or other
aataacatactagttagtaaatctaagatcctggtaaaataattccaacagatctgaccgtctttgatcatcgtaacttgtagaccttgtacttgagtaactctcaaactggctactccttgtgtaactcatactttcttgatcattactacctcgaggtctatcccctccttgcgtagatcgactatgatctcaagatctcgtatgtctcgagctagaacttgccttgtcatgtacggccttctcctttgggaaagggttaatacatgccccctgctggggttcgtatacgcctcttccctatcagtgttagaaggacgttgaccatgtctcggtggtaacccacttgtcctaggtnnnntcccaagatttctctcgttaccacgagggatttcctgctccctagtctgaggttaacttctactcatatttctataagaagactctggaaaatcattgtttttattcccttgggctgtgaaaccttgaggtctttgaggcacttcttgacaaggtgcgtgatcattcagttgttcatcttcaggaacatccccactttcccaaggttgctcctcctcagtattcttgggtcttcttgagctgtctcctgcctcttgtttctcgagctttgaggtctacctcgcgatcttctcacgccaggatcaggttggttttgtgtgttgttttcttatgttgccctggctggggctgcctccctctccaactcaaagttttgttggtttgcctcttccagacgtgatcggagttgaagattttccaattcaaccaatggcacatacctggtggcatcgtaggcatcctcactccgaggtatataaccatcagcattaggttcctcattcccagtttttgggttttggtcatcatctgttgggttttgtgccctaacta

SEQ ID NO: 119813 - DNA, 1156 bp, Cannabis sativa
  modified_base (36)..(69): a, c, t, g, unknown or other
ttatttttcaaaaataaaatttttaaaaacaaaaannnnnnnnnnnnnnnnnnnnnnnnnnnnnnnnnnacaaaagtgttaccaaacgacactataatatgacattaattacataaatgtgttgttgtcgactctaaccaaaccagaatttgcagaagaggggccagtttattttctataaaataaaaatagtactatataatttatattattatataaaataattatacttggtaatacttatttaaataaatataatataagtattaaagttaattatattaacaaacagtgtgatgaataattatattaaatttataaatgtaattacacaatatttatttttagaaaattaattaatattattaaattatgtaattattaacttatttgttaaacataaaaataagaattcatatgtaattacattttgacattcaaatacaaattatattttaaaatatagtataattagttattaccctaataattacactacttaattattacactattgcatctaaacacactcaccctagtaaattttgcacgacattccttcatagatgcaaactcatctataatggaatcaacgttgtggtaatatctttctcaatacaaattgctaagcaatcattcaaaaagttattttttatcttgtttctaagctgtcttcataattttcattattgagaatgcaaattttgtagtttctgttgtcataagaagagtgcaaacaagcctaattagtaacatgtataataagatatacataattgcttcctttgctttccccaagcgttgactctaaaattggagaaaaaaaaaagtgtaaaaaagatttatttatttgggcaagtgagttagtggaatattgttagtgagatgagaattataagactcacggggaaagtccataaatttatagcctattttagtggataaaatagcatatgttatgtaacgatgagctatggtttttacatatcgaatagataatggttttcgcaaaagttactaactgaacctggtttcgtaaaagttactaactgaaccttctattttgttaactatagttttcaaagtagtaataatagaactagctcaattttcaatttttttttaaaaaattactaactttaagacaatttctaac

SEQ ID NO: 119814 - DNA, 997 bp, Cannabis sativa
  modified_base (47)..(50): a, c, t, g, unknown or other
ctgaatacacgtgtcctttaaataggagcctggtctcgagtttctannnnagagaaatctcactataacaggtaattttgtaattttattttaagattaggtgtcctttcttattgtggacaactatcccatttatgaacataatagccatattatgtttttatttttcagcctagaaattagagtagaacaaaaataagaaaaaaacctagaatgttttgccttctccctccttcgatccaacccaagagtgaagaaaaccagagtgaggcattagtttttcttggagattttagatagggtttgaggtgtttcaagtagaggtaagttctagcaactctattcttggattactaaggtttaattggatttagggttatatgataaagttatgtttctgtttaattaatctttgattagggttgtgttcaacaatttttaattgatgctgttttcttttggaaattgtccaaggagggtgtttcaggtattctggaaggtttggtggaaattgcggtcaaattggtaaagtttcgaagtttggggtttttcctccagtagaaaccggttaaccggctctgtaaccggttctacagaactggttaacccattttctaggcaggccaagaaaccagtttaccagttttggacttttggtctgccggtttttgtagggccagaaccctagttttcatatttttctcggggtttagtgtagtattaggttgttggtctttaggactacccttgattttaagttttggggtttcgggaatggcctactcaaagttatttacccatttatgtaatgtgacataggacccccattcaactcgagaattttccattaaagttgaccggcatacttgaatctggaaacgaggtaagaaaagtatagaacgttttgtatatgcaaatgtctgtatgtgtgatatatatacatgatgtgttgtgattgtatatgatttgggtgatatcatagcggcacaaccattgt

SEQ ID NO: 119815 - DNA, 2807 bp, Cannabis sativa
taaattagggacaaaattactattgtaccctttaatgtatttcatccttaatacacttagctacttgtaaatgatatttcaagaaactaacataattattgaaatgaacattcaatcatttatcggctttaaccaagctcaaagaaaactatcatttctcttctaataggcatagaagttatagatgtccatatctatgattaacacttctaatcaattatactatcgggttccccatgtaagtactagtcctacaggtaagctggtaaaatataaagacatgtgcaatacaattaagctagagctcaactatctcaagatttagatcaaatgatctatcatcaactaagtgacattaacttagaaaagatataacgataagtttgtgttatcttttccactctcaatattgatcaattctgatgtatagccaatgcatctgtatctaaattactttaataatgccttggaaatgatatttcacttatctaagtgtaagcatactttatcgctgattatcacatcactgtaagtttgatgcactgataaattgtggaaataaataatttgaaacatgtaatcacaattactttgtactgtgacgacatcactataattgtaaataactatatgttcagaagttaataaaacttatatattaatattataatcacgtaataaacacgtgaacaaagcatatcacaatgccaagatatgatttttgatgtttattgaaaataaataagattacaatgaaattaaattttatttaaagcataaaatcccagcttcaagaacaataatataaactctttattatatatataaatataaactcttactattaacaaaaaaataatattaactcttaaatatgatcatgttataaaaaaaaattctataaaatcccaaagatcaatttattaagttgtaagatatttgacctcttcaacataatttagcatgagtattcttttatgtatttctatccattattttaatgacttctagcttcatgactacctctttcatcgttggacgattattaccatgcaaatccaagcaacatttcgcaagattggcaaaaatcataatctcttccattggtccctctagcacttgagcatcaagaatgtcaagtagacgattctctcgcattgatataagaaaatatgtagccaaactcctaccttcttctgttcttattagagaaattgctttttgtccagtcaagagctccacaagaaccacacctaagctataaacgtcactttttacggtgtattggtttgattgaagatattctggatctaagtaaccagcagtaccataaactactgttgtcaaatgagtttgttctaaggtaatcaatcttgaagtaccgaagtctgcaatttttgctctaaatttttcatctagaagtatgtttgtcgacttaatatctcggtgataaattgggaaagatgcagctgaatgtaaatacgtaagagcttctacaacttcaatggctattctcaaacgcattttccaatttaatttaaactcttcactatagttgtgaatgtagtatgaaagagttccattaggaatgaattcataaactaaaagaggaacttcagtctcgagacaacatcctaacaacttaacgatgtttctgtgattgatttgtgaaagaatgactacctcattaatgaactctgtaactttggcttcatcaactttggttgacttctttaccgcgataatttttccatctgccagcattcctttatacacagttccttggcctcctttgccaagaaccctatttatattaaaatggtcagtggcgttttctaattctttggagttaaaaaccttgattttctcaacattaaccttttcagcagatatctcttgttccaacaacatacctccatttcgtttgaagatctttttcacgtgtttagcatcattatgtttctttaatgttttgtaaaagtaccatgttgtaaaaaacagaaacaatgctcccaaaccactaacaatacctgtataataatgacttgagttattaaataatatcaatttttttttcgcatcagtgtgtttaattattcttgctaaataaagagccatgttttattaatcttgttttagaaagtgataacacatttaaggtagtatagtgcaatataatgttatgaaatttaatttacttagtttcgaatttctattgtattacagttataacctcattagtcttatctctaaatctaatacactataatttttagacttatatgaaatttagtttgaaaatgaattgcaagattattttttacattctctacgcttagttataataaaatatttttcttttctaaaacaaatactactataaaatattaaagatatatgttatatcttttattatctcaaaaaaaaaaaaaacctatgatatgacatataactattattaaaacttagttatataattagagtttgttagttttattaaaacaatttttttttctttttttcttttttttgaaaaacattcatatataaagaaacaagacaatataaaaatattaaaagtaaataaatttaaattcacataaaaaattcttaaaataatttatttaccaataatgaacttattgatatttttccgtgacttcttcccgcatgtgtaggaaccataattgttaatgcaaatggtatcagtcagatcatccgaacataccataggattttctttgcattcattaatatctgagacatgtatttgcaaaaaaataaataaataattaatgactaacttg

SEQ ID NO: 119816 - DNA, 1083 bp, Cannabis sativa
  modified_base (897)..(902): a, c, t, g, unknown or other
  modified_base (969)..(985): a, c, t, g, unknown or other
acacacacacacacacacaccatagaacccagctagggttggtgtttttgctgcctaattcaaaggattcacagtaagatcttagtgattttaagctcaaggtgagttcctagtacttctctttttgatttcttgggttttaagttaagaaattatacatgatttgagttttggagtgatgtagttgctgttggtatttgaaattgttttctaaagtttaattaagataattcaggttgttttgaggtatatttaagggttgtagtgttgtttgagcaagttttgagttttagaactcaagcttggctgtttaatggtgaatctttgattttgagcatgttttctgtagcttgtattatgtttgttggggtataatatgcaggtctggaaggttttgtaaggtttcgattcgaattggttgaggttttaaaatttttaggttaccaggcataaaatcgtctaaccggatcagaaaccggtatcctgaacttttcgtgttgtcgattcgtgttagtttcagagctttagttggttaattccctgttagtttagggtacgtatttccatgtcaactttcagtaggaaaacttttggtttaaaacctaagtccccggatgtgatttagcgtgtcacttacccatgttatgaactatgtgatttaggggcctataattcgccgggcagttattccactcaggttggtcggcacacatatattcagaaacaagataagattagtataatgttatgcatatgtattttcatgtttagcatacatgttgtttgtaatatcccgataagtctaatggtaaataattagagtttatatttatattttgagttaacaggtaataagtgggattatgatcctactaatttatttcagcataaaatttnnnnnntgctataagtgagtaaataatcgcaatttatttattacggaaattttatatagcatgtgtgaatgtnnnnnnnnnnnnnnnnngaataaaaatattttcaggtttggggaccctgaagactcaataagtggatatataagcgtaatttgttaattatagagatttatttaaaatacgtgga

SEQ ID NO: 119817 - DNA, 2395 bp, Cannabis sativa
  modified_base (1366)..(1388): a, c, t, g, unknown or other
gcttacaaacataaaactttaggtacttatgccgccatttacccttatttttttatgaattttaagttgtgttttagataataattaatttattgaacaacaattaatgtgtaatatttgaatttttatttagtttaatatttttatatatttaaatttttattataaactttatttttctattagaatagttcttgtcccgtgctcgttttattaggagatttcacgcctcatcttctatgaacaataagtggtgatggatattaaaattctaatcaaaatgaggacggaaggagtactctctgccaattcttgaccttgtgtgcatcccttgttgtatggtaccactttaaaaggctaagttgttaccttcttctttggtaggagaatttgtggttactaaaatctattttttattaaaaaacaaagctaataatcctaaaaatatcaagattgaggaagaatgtatgggggaaggtggactcaataacttgaaaagaaatatgaggcacgaaagaatccaaaatgcattgaaagtggaatccaaaataaaatagggaaaatatgtattgccaataaattaatgtagaaatgaaaaaattaaatgttgtacagcaggggcagttgagaagatccaattgattagtcaatatacggccacgtttttcctttcttttgtacagtggtaatgcttggaatcataatcgttgatccgtactacatcttaggggtgtaacgtgttcatttaaggccccaccctgtacaaaccgctccctccacagtatactgcacaaaaactagagattaaaatttttgccatacagttccagtttgtatttttaccaaattttgagtaatgtaatttacaattttaaatttaatcatcgcagtttaaactgtaccttattatatattacaactataataacttttctttttcatacatgaacaattcatatacatacaaagcggaaaccattaaatttaatgaacatctatataaattaatctattttttttttatattttgttaacaaattattatgatatatataaactattattattattatattatatgaacattcatataatataatatatatatatatcattattattattgatattattattaatatataatatatgtatgtaatatatattattaatatgaatgagatttaaataattacatcaaatatataaccataataattatatttatttttaaccatttgatttgaatggttttcattaatttacaaattaaagaaaaaataacttgtaatctaatagtaattctttaataaagcttaaattaaaattaattttattttaaaattaaattaattattattattannnnnnnnnnnnnnnnnnnnnnnattattattattattttgtaatttgttgctaaacaagtttcttttaacaattaattttcttgcactaaaattattttaatatttataacaaaatttcttataatttaaaattataacacataatcttataatttgaaaatttaacatataacctcataatttgaaattattacacctatagctttaattttaaattgttacacctaaatattaaattttcataaaataatttatttaaaaatttcaaaattatatacatacaacttacaagtttaaaatctaacaaatattaaaacaaaaacaattataatactaatggagaatgctttggtggattgtaccctcctattttttttataagctaacatgtttatatttcattttactttttactttataactttattaattttatctagagttaatgtatttttatctttcataatattacacacctacgtgttaattacgtctatatcttcctcaccaattggtatcatccatcatctccataatttttttttaattgttatctacatttacaataaataaaatcagcaaaaaaaaatgtagacttatttttcctctcatttcctttaagtgccctctcaattcaaattgctacacgccaaaaaatattatccaaaattcatacccacaatgctaccagaacattgagatcgagaataaatagattcatatattagtttcactttatcacatacgatataaatataaatattgaatttgttatttattttaagccgaaaaagttttgatcttattttttttattttttttcaaacgagtattttttattgttttaatatttatatttgtttattttttaattaattaaatttatttttattattattttaatattttaattattgtatttgttgggttataatcaaatttactaattaataaaagatcaaaaattgcattttatattgcatagttcacataatttatttcatgattatatttaatgtataaattct

SEQ ID NO: 119818 - DNA, 561 bp, Cannabis sativa
cggttgggctcggcttcgaggattgtgtcgctcggtatcctcctcttgtggcacctcgcagtcagcatttcctgcgacttattccctatgcgtgggctggttcaactcgagtccctcctatttattttgttgttctctacaattacgattattagtttatcggctgttagttgttacttgagggttatccgaatgcgtgtttagtactcgaggaggacatcggatcctaatccttccgttgacctcagcctgcaaagcctgcatttattcttatagtgtcgtatattgggtcatggttagttaaataattcctttagacaccacagctggtatgataggcgggaagtgtcccatagtggctattggtgttgacatttctacaacatgattgctggtctcaggaaataagttgaggggagtaatagtggcacatcccactcctccattgattgtgttatagtgagaattttttacctagaaactcgagcccaggctcccataaatatgacacgtggactcactctcctcgaggagggctgagattgttgggttttgtgccct

SEQ ID NO: 119819 - DNA, 1198 bp, Cannabis sativa
ttggcaaagcatactctgcggttagacgatgagctatcctggttcgaaaaggttccagcgccggtggcagacgtctgcgtcataaattcataagttattctaattattttgtaaaaaaaaaaacgcattttttatttttgttgaatttttttattttcgttaattataatatttaaataccaaactttttttcttgccgaaaaaagtttcaaagtattgaaatattactccttcaccacccaaataattttaaaaaataaaataaaacaaattttaacttataaaatcattaaaattatagaaaaatatataaagtagcctaaattaatcttaaaattaagtaataattgtatttaataaaaatagtaaatggatatttttttaatgtatgaatattttttatttattattttgttctctttgaatattttattagttattcatttttctttttaatgttttttaatcaaaaaatattatttttattaaataaaatatttatttaattttttaattattttagtgatttttattaaattttttttataattttaataatttttttaagttgaacacatttttattaaatttttcaaaattatttagatagtgaaggagtaatattttaatactttgagtattttttatcacaagtttaggtatttaaatgttatatttaaccaacacaaatatttatgccaccaaaaataaaattgagtatttaagtgttatattctttaagtgtaatttactctttcttttatacaaatttaaagttttgaaaacattcactattcaagctaatggattttgtaacatcctaattaaaggaatgcctcatgttgtgattacattgtgttaatctcattaattggggtctactaaattcagtagatctaaataaaacaactgataaattaaaacaaacttgcaataacttaaactttaaaacaaaataatatttacttgatcgggatcccgtatttttttttataaaatattacaagttgtttacacaaaagtcgacctaagcagcaaaatgagatttctaaagcaatctcccataggacccaacccttgtggtccagcttggccggaatatgtacaccccatcgttgaagccctcaaactcatggctggtttgacgatgccttaccatttcctgcacagtagagcacccgtgagccaagcccagcaa

SEQ ID NO: 119820 - DNA, 757 bp, Cannabis sativa
gtcaacgacgaggcctctggcctcctatttctcccagcttgaaactattttttaaaatcttgtggaaactgctcccacaaggtgatggaatggtgcgtaaatttatcaaatcaattgctagctggtcttgttagggaagttagaaacaacatgcatcacaagttgttgccaatgttacttgcttgcattagggtattaaaattattcagatgagctactgggtcagtggtcctgtcgtagggtgtgacatgtggatttttatatccttttgggaaatgggaattgactatgtttgggtgtaatggcttggtctcttcgtcagaattatatcttaataattttccatacttcccatcttagtatctcctgaacttatgctataattttatttctaactgaattggatcattaacaagttgattgacttgttctcagagatttcttgtattgtaatttaatttctctcgtagatcttgggtattacggtttatcttctcacgcaagtcaagatgtcttcgattcaaatgttctcgaagatttagttcaggacgtcgctcataccttgtatcataattactaactgatcttactggcgagatgctttcagactgataactttttagattgctaatgatttctcactcatcatgatagtcatgatgggtatttctgttgggttttgtgccctaaataaaacttatttcaatataattagatttactaattaataaagttcagaaatcattttatgttgcat

SEQ ID NO: 119821 - DNA, 1537 bp, Cannabis sativa
  modified_base (1489)..(1490): a, c, t, g, unknown or other
aaagagagactactagggtagcgggtagcaatagagaaaagataagagttttcttttatggcaagaaactgagagtatatagcttaggttaagagctctcacatccatttccttatgtaggccatcactaggctaatccttattttctagctaataaattaattaaaaataaaagataatttgacataaaaaaaatctttcagagctgaaccctatattaaattgggcttggattttttctcttgaatttatcaacccaatgggatcaattgactttagttttaatttttcgacaactaataaattttttatttaaatactaattctattttaataaataactattaaaaaatataatttaaatatatattaatttgacaacatgtaacataccgaaatccatagacataaaaaaactctttctaaacataaattttaagataataatattcaaaagtctatatatattagaatttttttcaaggtatgcatacatgtcctgaattaatttttcagagcgaaccctaaaagtttcagtaatttgaactttaaacaaaatcacctaatccaaaaggctttgacaactccaccatcaagccacttgtacattctagcaagtagactcagtgctcattagcacattttatttttcaacctacctataacatgaagcaactacaaaagtgaaaacacttcgtaaattaacacctttcaaacaagtcactactataatcaagggagagagagagagagagtaaaagaaccaagaaacattgatcaaacctacgactagaagaatcatacataataggatctccaaaagagaacccttcaatccaatactagagcactgaatactctatcacacattcttagaataacgaagacttgtaatacaacctctaaatgaggacgtactcacatataccacacgttgtctcatctcaggtataatatacatgtacacaattccctttagagttaagattagatttcatatataattacatactgcgcaacattgtactatatatcatagagtatgtaaaaatatatacacatacttgttgaaagtaaatccccacattcattgtaaaaatcagaacaactacaaagagattaacaaggcagtaaataaagcttatgtggtcttaggccgctgtttattacctagacaggtcattaagttagttataaagtttattggaactttataactaacgatctgattcactgctctcttttacaacatatataaactagcagtagcaacaaaatcaaaaacaaaaacaaaaacaaaaacaaaaacaaaaaaaaacaaaaaatatcacaacagaccagatcagagatcagaataacaactcaagattagattcatagcagaacaatataaaaaaaaaaataaaaaaaaaaaaaaaacccaaattgtttcctagagtgaaaatggcgaaagattgagtttggaggagtaaaccttggaacccttggnntagggttcggatatccaactcaagggagaattgttcatgcaacaaag

SEQ ID NO: 119822 - DNA, 988 bp, Cannabis sativa
  modified_base (927)..(961): a, c, t, g, unknown or other
accgcctctaaatgtcaatgcagatattttcacaccctttagcttccctttttataaattgggttgaaaaaaaggaagctaaagccctacattgtagtagtgttcactctttagtgacattctatatttttagtgacccacattacaagagactaacattgaacttttagagtctaatatttgtgcatgtcactaaaaattacttcccactctttagtgacacacacttttttgtgagtcactatattgtgtcactaaaagagcaaattgtagtagtgtttggatcccattgcgtactgtgttcttgtgggtgttgccttcataaatgtaccgtaaggtttaacaatggtagcaatttgttgaagaaacaatcgggagcagtattgatcagtatggcctataattctacagataaaacaaaatgtaggcacaaactcaaatcgaaaattaatccaaaaccagtctcctccgatttgctacagcttcattatacgctttaacggtttctcaatatcaatccggacacgtacccgtaaataatctctccaaactccattaaagttattctcatcagacttaataaatccccctatgtaattcccagcatcccgaaccactctttcagtcttaaaccccgatcgtatatcatgcaattgcacccaaatttccagatggtgtagtctcatggccctaggaacatctcttggtttcagcctctcaaatatcaaaggagcgtttttgaaggtccatagacttctttcgatcactctttgaacatcaatctcatggtagatttgaaagttagatctatttccccccaaatccttcgcatacattcccattaataaaaatttcccataaatttattcttagaattttccgttcacatgtaggttaataatgtacattaagggctcgtttggaacnnnnnnnnnnnnnnnnnnnnnnnnnnnnnnnnnnnattatattgaattgtattttatgcaat

SEQ ID NO: 119823 - DNA, 1651 bp, Cannabis sativa
  modified_base (851)..(859): a, c, t, g, unknown or other
taattataattattaaataaatagttttggtatttataggattgaattggaaaatatagtattattgaaagaagaataactagttgaaataaagttgcaaaattatgactaaagattggtcttttaaatggctggtcgttgatgtgttttttgtctaatattttatttttttttaattcatataataagaacttataactattctatatatatttataatttttatttttataaaacttacttttattataattatgtgacttttttatagagtgatggggtgacttaattttttttgttttttttgttggctgaatttcaattattaataaggagatggtgtaaatagtttggtatttatattatctttcttatttgttattatcttcttactagtctagctctgtgttggtcaacccattataggatgtaagtttacaaagatattcttataattaaacacacattatttttaatttgagattgaaaacttacatgaataataattattgtagagtgatttttttatacacaagtttatacattatgtttaattggatgcacaattaaaatatagtggtgacaacatgcttttggaataaagtgttcaaaataatttgattatagggaatattatgaaggagaatatgattgtagagaaatgtgtaaactgtatgtaatcatattcccgttattacactgtttggttgagttcataaattttatatattattttaaaaataaaaataaaaataatttttattatatctgtttaatgttaattatacataaaagtaaaataatgattcattaaagaaatatattgtatttattaattagtaaatattaannnnnnnnntattttttattaattaaaataaacttttctatatattttgttactatattatttatttttatttgttatgtcatttatgtacactattcacataaaatttatgtataatacatctatatattatgctaataacatagaaataactcagttaaaaatataaaaaaaaaaattatctcacagattaaatatatatcgcaatattttttataataattaaaatattaatgatatttaaatttatttattaatcaaaaaatagtattcaaattaatacaataaaatggaataattcaattccaccattttttttagttatcaatattatcctcttccagagtagttatattactaaaggaataacattagaaggttaaacccttagaacaaacaaggtaatgtgaaggtaatgtttcacattaccattctcttgctaatattaactcatttcaaagagtccctaaatataatgataactataagtgagatacggtgataaaaatacagttgtgtctataaaacggtgaggacaacaattttaaaatcacatcataataagttctataaatttatcaatgtctttatttttagatcactattttgtgagaatattctttaatttatatttctattaatttatcaattgtcttttatttagttaattttttttaacatatgtatttatttttgggttttttttttcagttttaacaaaaaaaaaataacaatattacaaaaatacttccagctggccaaataaacaaatatacaagccaaataaaaaaaaaaaaatta

SEQ ID NO: 119824 - DNA, 1220 bp, Cannabis sativa
ctagttaccaatttttcagctttgaccaattcttctccaaagtgttccaaatcacttccacttgattttgaaccatttatacaccttataaatgaataaatcaagtgtccaacagttatattttcaatagttatcattcatttacattcataaacaattagatttaacaaaagaggtaagagttacatattcaagatatcatcaatttaaaggatttgcaactcctattttgtgatcattctacacacattttgtaactccacaatatatatgttacgatttaacaaaattaatattttgtcacacttaattatttaatctaaatattatattataaaaaataatataacattttttgcagcatataaaatataagattacttttaattttttattttataaatattttaatattatactgaattcttttgtttatttaaatttatttattgcatttcaatttttttttttatgtatatatactttattaaattcttaaaattttgctatttactatacaaataaatattatttttaattaaaatttcagtcggaatcaatacgtttaactgtatttattttattttattttagatattcactttgtaaaagatagacctaatcccattaaatcatgcgtatcatcaaataatacaaaaaaaattgacttttaagtttggagaaaaaattatagtgaaaattgaaaaatatggtgacaacattataactaaaaaaattatagtaaaatttttaatcgcaataaaaataatattgtcactaaaagtctcttttagtcaaaaatctatttgacaaataattattaaaatgtcaaaacaattagtcataactaattaatttttaattacaacttattttttttaataacaacttttattgtcagtaatattttatttagtaaatttttgttgtcactaattaatgtttttttagccataacttatttatttttagtgataatttttattattaatactataataattgtttagtcccaaattatttttattgaactaaaagtttttttttttagtgaaacattggttgtacccgaacggatcctgtccccctcttaattttgaaagtttgtgtactgtaaagcactacaatctctatataattataggggcatgattttgtcccatgatgtattttcacagaatgtattccgtggtacattagatgggtctctgggtacatta

SEQ ID NO: 119825 - DNA, 1064 bp, Cannabis sativa
  modified_base (50)..(54): a, c, t, g, unknown or other
acactaaccaaacatgacttgtttctaaaaacttcaaaaactattttttnnnnncatttctaaaaataattttttgaaaacaaaaaacaataccaaacatgctccaagttttcgaaaatagtgttttcagctgctattatgggactggtttatcagatttggatcaatagaaacgagtgcttatgaaatcaaaaaatacaaactattaataaatgtgttcaagcaatttaatttaatgtgaacaataaaattgtatatgttagaaaaggaaagatttcacaagtggatataaggtggtttgagtcattgtaaaggggattttgcttggcaagttaattagtcaatggcaagctagccttgttatgagcggctgtgtaggttgtaaacaattttaatggatacaagaaataatgtcacttttattagtagaataacttttatcgggaaaaatcatttttgtcagcgctttttattttatcttgacaaaagttctaataacgacgttgatttgtcaaccccttttttcaacacatcacaagtaaattctataattaccagcgcaataccaacttttaccagtacaaaaattgtgctggcgaaagtgatatttcttatagtaggaatacaatatatataacctgattcatacaaaaaaaatattgcggatcacctaaagatagacaattttttttctttccttttcatcatttcaaaatgtgatcacttaaggaggaaagaaatccaatacgaataatcaaccaagtagtcgatgaataaaaataaaataaaaaatctttatttcagatggtgataactagggcgactgagaaagaagagcaaaaaaagaaaatttaattttgataaagccctagatacttgaaaaagaaaaaaaaaaattaatcgcacaaatggtagaaaaaataaggcagatgcacaataataagatttcagttgagaaatcatgatggtgagatgtttgtaactgcttactattataatagattttgtaataaaataaggcagatgcacaccgtataccttaaaatgtttgtcctgatagcata

SEQ ID NO: 119826 - DNA, 2068 bp, Cannabis sativa
  modified_base (26)..(31): a, c, t, g, unknown or other
  modified_base (1553)..(1555): a, c, t, g, unknown or other
  modified_base (1801)..(1808): a, c, t, g, unknown or other
ctctttctctcttcatcttcttcttnnnnnntctcatctattttatattattttataacaatttgctatttcttcttttcaaaatgattataaaagtaaattattttgtaatggggaagaggtgtgaggtgagctgaggtaaatatctcattttttttttatatatatatcagcattatataaatatgatatagattatttaaaattattaaatgaagtttttataactagtatgcaaaaaagagaaagaaagaaagaaagaaaaagagtatccaatgtccaattttataaaatttaatttaaaatataataatatttaaattctatactcttaattaaactagtaaatatatcatgtcttatacaatgttctttttataaacattttgttgcacatgaaattaattcgtctgtcatgattaagaggttcgaaatatataccacccacgtgtagccataatacgactaaatttgtgcatggcccctgttttatttttatcatgaaatgaaaatttggtgacagaagtaataaaaagagaaaaatagatttaatataagagtgaatactattttacactctgtaaaaattattaattgaattttttattttgttaaatgataaaataaattttgtattttttaaaatttgaaaaataagactctgaacagatttttttagtcaaaataaaatataataataatccgatctaaaaatattacgacaaaactggttatattttctatatttgttcgtattagaaattatcttcaagttaattatactaaaaaaaattattgaaaattgagttcaagactatttttatcattttagaaaatataaagtcttttttatcatttaatataatagagagtccaattaacaacttttataaaatacaaaattcaaaatagtatttaattgattcaatttcgttttgtctactttgattgttaccactattaaataattttacgtattttatttagattcagatataaggaatccaatgttgtttcaaataataataataataatagtttaactaaaagcgaataaaaacaaaaattgtggaaaatggtggtaataagagatgttttgcaaactaatttagtttagtttctttcactaaaatatttagggaaatttacaaaaatactgaaatctgagttaacttttacaaaaatactgttacacgattttttttttaaaatactttgtttttataaaacaacagtaggacacaaaaaagaacaactaaaaataatagtggaacaacaaaaaaaataactgtagaacaacaatgaaaactgaacacagcacacagtataaaatttacacaatatttttgaaaaaaaaatcgtcccacaataagaaaataaaaaattagaaatttctgtggtaaataatccaaatatttatttttatatatttgattatctatcataggcgacccatgatagtttggctgatgttataaggctttttatattaaaaggtccatttattattatgagataattacataaggtacaattttttgtaaaaaaattannnttttacgtttaatttttttttaatatttttacagtttttcatagaaataacaagaaaactacataaaagtaatataaaaaataacatttaaataacattaaaataacaacaataaatagcacacaaataacaaaaaattaacaagagtataacataaaaagagcatattttctgtaaataaaatcaaaaaattgtaaaaatatttaaagttttgtgaaactgtattttgtaattttttttattatnnnnnnnnatttgtgaaataatcccttttattattcctttatatataatataataaatattttttatataatatataatgggtgactattcaatggttacatttttattgtaaccatcatagttacattttcctttaacctataatagcggattacaaataagtaaaactttcatttttagaattaattaattttttaaaataattaattaaatatttaacaagacctcttttagcaattaataattataaataattttttatataaa

SEQ ID NO: 119827 - DNA, 1873 bp, Cannabis sativa
tctctcttctactctagccatgggccaagcccaacaaaccctaaccctagcaagcaaactgaagattaacctgccattgataccattgtgacggtcttgttcttcttcgaccgattagactcacgttgcatgtgcagggatccttgctagtctggtagcgttgccagaggtaagtctctctctctctctctccattctctggtttggtggtacagccattgttttatgttgtaatctagttttgactagtctaataaattcgaatcttcgtatttttgagtagtagtagtaagtaattgtccgtatggcctcgatgaagattgcaccttcttcccgacaaacgacctcgagctggcccgaaccgtcgggcctggtttgtactcttccggcaagagggtagtaagggaccaaggccttagacagggcggacttaagaagacaagccaaagtggacccatcatgttcgaggcccagtctggtgttaggtttgtagattaagagatactcaatggggaattggaggaagggttgggagtcattggctgaaagtggaagaaagcaagttggggtcgcctcggatggggtgaccactatggcctctttcactcgctcgtgagagcttcccaagtaacaaaagagaaaatatataacttgaatgaaagaaagggaagggagaaaatatatatatatatatatatttatgattaagattagagatttattagttattgagggaagacaatcatttgtgttgatcactgctttggtgatcttaccttctatgatgttaactgagttaagtatactgtcatatgtgtctgcaactggtgtgttttcttgtcttataattctttgttcaatcttgtgtattggtgtttttcggggagttgggtttcatgaaagagggagtttggctaaagtgagtggattgcctactgctgtgaggttgtacatagtttgctttgctggacaccctgttattccttctatctacacttcaatgaaaaacaaacaccaattcggctgatcatccatcactacgactcctctaatttttggtctaatttcttagtgggattgttttgtcatatatatacatatttcttaattttgagaatttagaaattgatatctatatgtattaatatctgattaatatatatgtaaataatcagagaactgttgatcattattagtgtttttaattgggtcatataatgtaataaatacattgtttttaataagtttctgttgatcatatagaattaattgagagtcaaggatttggatttgatgacatcatcattttcactatatctcatgtgccactcttcttaattagaattcatgagttcatgtattaaccaattgaaacaagatggcttaattattctaaatatatatagccagatgatattatatatagctatagctaaacatatttttgaggtgaaaagatataaatgaacaagtgttgtgcaaataaggtatatatcaaagttgaaaggttaaattttcctaaatactgcttcaaaatcaatgtgtggagattatattcactttagcactagaggaacttttttatgacaaatttaatgaccctttagcacttgatgaacctttttcaaacaaatttaatgatgctggtgttcactgattttttttattattatttcaaaccagattagcacttggagaacctttttaaaacaaattctttgatttcacatttcagattttcatatagaatttggtactctccgacttttgtactaaaagggcatttctagtttgttgtatgtgtgtatatttttttattttttttatgtgataggatgaagaattattcagtggattgtatgaataatggtaa

SEQ ID NO: 119828 - DNA, 1104 bp, Cannabis sativa
cctggtgaaatatattccaacatagagttgggcaattctcgtaaggcccagctcaggaaggaatcgatctactgactaagaaggttagatacgattgagttgtcaatatcgtgtcctataattgtgagcaattaattataggttaattcttgatctttatttagttaatttcactttttagcttaatacgaacttctattgagattcaaggatcatttacttccatattctgatcacttggataaaaagggaaactggactagtcttccaggaatacgctgtatggtcctctagcgtcacgatgcttgagttgcttccgaatacggactttcattggtggaagctcatcgagttatggagctaaggtgccttcatggaaggtcttatatgtcttgggcttggcccaaattatcttctttggacccagtggtgggcttttggtgctgacttgaaatctacgtatccctatctaaaaatacgaataacagttttcaactttaattttccaatcactaatttaattgacgagatctaaccatcaacatagatacatttaaaaatatgaaaaagatcaataaattcataaaaatttatatataaaaaatataagatctttcttaacggtaacttcattcaaggttgatcaaagggcaagagccctacaattccaacaaaaaaaccgcaatctcacaaggagatgacaatggttggccaaccacactaattcgaaaggagcaataagctcaaagctcacgcaggagcataaagaggaacaaacttcccataaaaggcttcacgccaatgccactaaggacataaagtgtacaataccgaaaaagctaaaagaattaaaataaacaaaccaaacaaaaacataaggaaaaaaaataaaggaacaacaactttaaagttaatccccctaacccaaaggaggcaacatgacgacccaaaacaagcaaacccaaaagtagaggagcaataccatcttccaatgagaaaaatccacactcattatcctattgtggttttgaacgacaaaggttcagggaaaagggaagcacattcctttggataaaacccgagtcctgttgggttttatgccct

SEQ ID NO: 119829 - DNA, 1503 bp, Cannabis sativa
agaatttatacattaaatataatcatgtgaactatgcaacataaaatgtagtttctgatctttattaatcagtaaatctgattagggcacaaaacccatcagtgtgcactaccatggtctgacataggggataagatctgatcatgtgttagagcataaccgtcattgggcgatctgggttcttcttcaaggtaggcgtctgtgtttcttttaggtgatcagtgtttgttacaggcccttcaagtaacctttcaggtatcgtttgggcacactaacttgatcatctccaaatctcgaagggatagtaagcctttcgcatcccggatggcattataaggcagggtaaatctccgtatatcctttggtcttgatctgttcgtggatcaacataggttctccgtgacctagtccaatcagggagacttgactagtgactatttaaaaccgtacatctcttttccaggccacgtgtctctcgtccagaaacacggataacagctaaaagtttttctgcgtcgacaattatcatagtgcgtttgagaacactctaaaaaaaatgaaatgatacatgtgaattaactaacccaaaaaaaaagtaaattaagtaatattatataaattatgttttgactagttgttctatttcttttcacttaatatttatttttaaatagaattgtttatatatatatagtgacaattattgagagaactatattggagagatcaattcatgcatttcacgttctcacaaatctctctctaaacaattcaattggtaagttagtacaggtagaaaaatatataatatttgatcacattatacatgcatatttacatattttatatatgtatttaaaatgtgatactatttattataagagatatgttcagtcacaaatatttgattcggtccaataataagatacgagaatctattacttcagttttgggaggtgagtctccatgtgctcaataagtttgttgttttagcttaataaagttggagttttcaaccaaaaaaaaaaaacagaagaaatcgtacatattttttttctcttgggagaatgtattattgaagttttctatatgaaaattgttattataagttttttattatatgacagaaactaaaagaaacattaactgtacaactaagataatggaattgacataaacataaagtttattatcaaattattggctcttaattatttatttattttcttcagaaattagctcctgttttatccaacagaaagctaactattgtatgcaaaaataacaaaaattatatggctaaattaaaaaaaaaaaaaattaaaaacacaaaataacatgctacaattggttaattttcaactaataattttctcaccatttccctaaaaaataattctggtcagttacataataaataatggataaaagtaatatcattatatattaaaagtgtctatctaacggtatttttggtttaacatttcttggtttaacagaata

SEQ ID NO: 119830 - DNA, 956 bp, Cannabis sativa
aaaaacactgaagttatctcaaactgaatacatcttcaaggtattgagcaattttagtttttctgatgccaaaccattaagtacacctattgctcaacactttaaattgtctagcaaacagtctccatccagtgaacaagaagcaaaagaaatggaaagcatcccttacacaaatctggttggaagcatcatgtacattatggtttgcaccaggcccgattttagtcatgcagttagcattgttagcaggtatatgggaacccaggcatgaagcattggaaggctgttaaatggttaatgaggtatctaaaaggaactactgatgttgggttgatatatagccccgatggaaacgaacctactgtaaatggctttgtagactctgactatgcatgtgatatcgacacaaggagatctcagttaggctgggttttcagagtcaataactgtactataagctggaaagcaaatctccagacaatagtggcactctcaaccacagaggcagagtatatctcttgcatagaagctgtaaaagaagccatttggcttaagggaatcactagggaactggggataaatcaaggagccattaccatactctgtgatagtcaaagtgcattgcacttgaataaaaattagatgtaccatgagagaactaaacatatttatgtaagattaaatttcatcacggatgttctaactgaaggaaagatgaaattggtaaaattaccaactgaagagaatgcctcagatatgttaatcaaggctcttccaactacaaaattcagacactgtctgaatcttctcaggattacgaattaagaacagtgatccttgtcagtgtctgtaatctagtttaatgtttttaatcagtgtctattgtttgtaatctgcattagtcttatcagaattccaaccaaggtggggattgttagatatggtcgattattctg

SEQ ID NO: 119831 - DNA, 3982 bp, Cannabis sativa
tatgatctggatttaactgattctgtgtgtaaatgtaataaacatattaaaccattagcatgtaaaattgatgcaaataatccagtgttagattctccaactcatcttggttgagaataggagtcgaacaaaattgttgctcctacgacaaactcccaaataatccaaaatcagcaaaatttgagctaagcggaggagactctgatggagttctatataagaattgatttcctaattgcgtaccagactatttttgctgttgagaaaaagattggggttgctgctgcaaaaatttttggaattgctattgcgaagaaggccgaaattgatgctacgaaggaggttgttgttgatgttgtggaggagcagtataactcttagaagatgaaccaccaagtgactgcgattgactatacatttgaataaagttctcaaaccgtgggttatataaattagcacgttgttttggcatcaaagtactcttaaatgtgtcacgcatagttgagaatagttctgccatagtgctaaacatttcaacagctagcagaggaggcaccgtcgactgactttgagtaaatgacttctttccttttcctttgacccttttacccaagcctctttgatagtcagatctttcaccaagaacttttcccaaaacgtcgtactgataaccagcatgagattccggttcggatgtatcgttctgggattgtctttcaagtcgtttcctatcaagctcctttaccagttcctcctatttaaaaaaaaattattagaatatataattgatataaaatttgaattttaataataaaatatttaattcacttacataatcttttggagcaacttcattaaaaaaattccaaacggctgtttcgatgaaccaccttccatatgcatcaactgtatgctctccgggaggaccccctatacgaatataaaaaataaattaatttataatatatttgaagagaaattatattttacaatcaaaggattaatacttacatatccgtgccgtatcgaagccaacgatcttgtgccttgcgtcgttggatatttaatttgttgcctatttgctttatttttacttaagcggttcaaaaaaatttcgctgatgaatatttcgcaaataggcttccaactctccgttattcaagtagtccaagggcaattgaagaactttctcccaatcttctggtttagtttaatgtagttcaaaatgcttgtgtctgttggtctttcgctcactgtacctctccgccatctctgtatataaagtctccataagtaggtctcgttggggattcccgtcaatattaaaataatactatgtaataaaataatttaaaatttataaataaggatataaaataattataacaataaataattgaaaatcactcacccttattcgattgagcacttgatccttatattgttggggtacatcggaaaaattataatgatgacctagacacagaagagatacttactgcccataaatcgtaagcacttgcttcagtcccaactactttgccagtttcaagatccacctcaagctcaaatttcttactagcgtccctccttctttgttcaagtttagcatttgacgaaaggccacgaccctttctgatctttggttcagctttatttattcaagaaaaaaattattctattagtacattgaacatttatcatgtacttatagtaagaataatgtcaaatttgagaacatatgaaacctgattcacggggcgagggtaccctggaaggattagggggtccctaccatcaccatccccgccgtggtatgtccctagactagctgacattgtactttactttgaagatgaaaaatataaaaatataaaaaatcacaaaatgtgaagcagataaatcgaagttgacacaaatattaatacgaaggaaaaataaaatattatttaatcattagttttttttaccaacaacactaagattaaagttacaacgaagaatcactatcatttccattattcacctagttttcattttcatcctcaacaagttaaactagtaaattatctatttcttcagcaacgtaattttcatcaagttcattttttcctctcaggatccactgactgattggtcgattcaacaattactgaaggttcatccgattgcataatcaactctccaagatcaaccgtcaacacaaaatttgaagagttagaatcatttccaacatcaacacctgtctcatcttcattgtcattaatgtcccaaatttgtcgatggttaacatcttgaacaacattccaatttcgacctctacgtggatcttcaagatagaacacttgcttggcttggttagcaagtatgtacgactcatcttgataccaaaatcctcatatatttatactggttatattattttcactgattgtcttctttcttataagattagtgttataccatttacattgaaacagtgtcactgtatatgcacgagtataagatatagtgattacatcttcaagtgtgccgtagtaattaaacccttcggttcaagcaacagtaacatcataattttgtgtcttttgcttttcatcactttcagtcgcaataaatcgaaaaccattcactacacaacctttgtaaaaggttgctaagtaatttgagccagaagctaaagcgagtaactcatcaccattttgtaaggatccaaacttgtgtaactcatatatctaaatacataaaatgtattaatatgagaggaacatatattgttaaataaaaattttaaaatattgtcatcataccttcttatgaaaccacagaaggaaagtttgtctatgcaaaatatcgtggtttccattaggatattctggcttgatcttctccaaatgttcactatgaaatgtgatattgtcaaagtacaatagagaaaaagagagaagaaatacttaaaatttaataaaataattcattggaatgtaacaaacttactcttaataagcttgtatttcaggagaattttgaagtatgtactactcagctttttcacgaataatacgatcaaaagacttgataattccgctagtcaaagaacgacattgagacttaaaaactgtaagatagcgagagaccgaaggtgcatcttcattccgatcaagccgattaaatcttgtttcacaccctttaaagtacattgaacaaaaggttactgcctcatctgcgacataaccttcggcaatggacccttcaggacgtgccttgtttcccacataattcttcaattttttcatgtacctttcaaaaggatacatccacctcataaataccgggccacccagtatagcctctttaggcaaatgtaataccaaatgtatcattatgtcaaaaaaagctggaggaaaaatcaattccatcttgcacaataacaaaattaaattattttgagcatccttcatatcttttacatttaaagttcttgaacataattgtctgaaaaaattacatagttgagtaatagtggctgcagtatcatgtggtagaaatttacggacaccaaccgaaagtactcgctgcataatgacatgacaattgtgggattttagcccaataatatttaactcaactggagaaactttgctcattaaatttgaaaaaaagccatcaataaacttgattcttttaatgaattgaaaaaatagttgtcttttttcacgactcaaaacataaggagaatgcggtttcagtagccttcagttctcatctttataaattcacaacgattctctaataccaatcttctttaaatgatctcgtgcatgggtggtatcctttgatttattgttatctaagatggtgcctaagagactgtcacacacattcttctcaacatgcatgacatcattgttgtgctttaacatgttcatgctccaatactctagctcctagaaaatacttttttttcctccaattagaagtt

SEQ ID NO: 119832 - DNA, 1179 bp, Cannabis sativa
aacccctctgtcaaactactccttaccatttcatccattacgcattaaaccggccccttccattttacgcaatcttatctcttctatactttgtccagttaaatcgatcgcttacaggaaaaacacgttcccatgttctaaactaaggaaatcgttcttaacaacaatataaattgttcaattaccaaacaagacaattccaatcaacgtaataactcatgaaaacaaataatacataccaaaacagaaaacttcaaacttcaaatccataaaggctttaataaattcagggctattttgaccccttttaggataattcaaaaagtaaaccaccacccaaatcaaagctctgtaacccgaaattaaaatcatttacagcgcatatatatataccagttcaaatcttgtaatccctagattacaacaaattgaggttaataaaaaaaaattccaaacaaaacttaattcacaggaaaaacaaaccctaaccctagaaatcgaatacagggaagaaagtaaaaattaaggagaagaaggaattacgaacctggaatagaaggccctgccctagaaaaaatctcgtattgtacgagtgagatgaggaaatgaggaagtgccacagaaggaatggagcagatggagagagaatacgggagactaggattatagagattagagagtttcaaaatataatttttattttcttctaaaaaaaataattaatatttttgcaagtatcaagttgtgcactacttattattacataatttaggttataaatatttaaatttaacttttaattacaaataaataattaagtttaatttttcacggtaataatataaattattgttattatatttcactctaaaattataacttgtaagtattatatgtgaaaatattcaatgtaaatacagataatcaaataatattatttcttaataaattaaaaatcgaactttaataatttctaaatatcaaaaatgtgtaatattaaagatgaaataaattaattaaagaaacaaaaattatttctagagaattaatacagaaaaaaatacttaaaataaaaataccgatttcatcctctaatttatagtaaaaaaaaaggtaagcgtgttagatttttttctagatttttctattttttcttctcctagaattctaactacataa

SEQ ID NO: 119833 - DNA, 4476 bp, Cannabis sativa
ttttatttagggcataacacccaacatgtacatctttatctcgcttaagacaatacagtcagggagttatatatatgctctattaactccgcatttaatgagttattcaatttaatattctttaatataattgccattatatttgttgatttatattcttcaaggttgtcacgtgtcatcctctgaagtaccagccgaatttcgagtataacaattgccccttaaaaagtattttcagtgaaaagttctttttaaatgattactgagggtatttttgtcataatccattttgaaaaaacgcatgcctttgatattgacagttttgtggtttcgaggcacatcatgagcattagataactatcttttccacttctttttaatttataccccttggatcatttactccttaatttaacagagatcaacccagtggtataaaacgaacataggaaccaccttttcatcatctttgccatttcaaaaaattgcttcaagttctctgcaaaaaaaaaaacccacccaaattttttgaagctttgcatgccatctttgtctttgacatacttcttgcgagtttcgtcaaattttcttttcgacctcaagcattcaaagagatcaccaaatcgttcgctgcatcgttgattgcagaactattcatcgcgccaaaacccgacttcaaacagtaattgattcattactctatgctttcttatttgccctttcattttacgtttctgggtttgatcactacttttatcatttgcacctttgtcatcttattaggttttagcgattttaggttcaatttttttttcgcaaattttagggtttaggcagagggtagatttctgggtttctcaaatttataagcttctggtttgataaatttcatccaggaattgggattgctttctttttgtaacaatgtcctaatctggttcaaaagtttattgtcaaaaaatttagaaacacagtgccccagtgaacttgccatcgcctataaacccaaaatttcaaaacccaaatccaaattagagataaatgatgtaaaaattagggaccacttagtaaaacccacaaagatgatattgctagtcgccacaggcccttcttgcaagaaatcacagaaggcaaacgtcgtttcttgcgagatgctgcttggcctaaacctccagtttatcatctattcctttggctaggcttttatttttatccaaagtcacgattgcattttcaccaagtgacctagattttgaaatcaagacttccaagccacgtaaatcgaagactccccaagaccctaacattaccttcgaggctgaacttatcgagttgagggtacaagccatcaaagtttacgtaggtaacatcttaaggacttatggcattgaccaaaagcgaaaatgtcaggttagatcagtagtcgctggtgagtttagttgttacccagcagaacgacttactcgcaaagcacccgagggtaccagtggcttggcgagtacaagtagctcgacatggataggcgcttggagccttgaacatatcagggttggagtaattattcccctgcgagattactataaggacttccttaaccatcttggaatcgccccattccagttggttcctatttcatacagaatccttgcaagtttgaaggttctgtacaaaattttattatgggagtgccccactcccctgcaaaatagtatatctctactcggtgaaggcagtccctgtgaggaagaatgcaacaggaggcttttattatcttgggactcacacaggctatcgtaagataattgttgggctgccaaacaagaccccttacaaagaggacttcttctggacaaccaacctctccccaatcaacacaatcaccttccgtataatatgtaagtgactatctacctcagactttgttttaaattattccatgtctttaattttagcctcactgacttgcaatcctattattttgacagcggtcccaaaaagaccaactcctactcccgagatggctgagcgacgtaggctattgttgggtcttcgatatggtctttgattagctgagttcctcttgaacgaggtcaacttgaggcccgtgggcctcctcgttgagaacgagtatacttgtgattattaatatcctaagtatgcgtcttggcagtaagctccaatcccaactgacgagagaactcaagattatgcggctcgggtgcactacctccagaacgcagtccctcaataaactgaaaaaggaacatcccgatgtaattaatgtggttggtcacccacagtgcttagggtcgagcgtactacataagtgtctttttgagataaccattataatttctacacctagaatcccctcctcatagattgcattgcacataggttcgatagttggtaacaaaaattccacgtccaaattagttgtactgactcctactatgggttagccaagcagtatgggaccatgctggataggtcaggacatttagattcgagctgggatttaaaaccaattaattcctatgacatattcaggatcacaggatgtagggattttagtgaatattatagtcctccctcttcatcttcttatgattatggtaaatcccttaggtgggatataatttcccaatttccccttttacttgtttttaaacaaattttaacacattgttctgtctcgtagaaatggatattgaagaccttctccattcctcgagcaagaagggaaataaaaggttaactacctcgaagacttcctctaatgtcactgtggagcctctcaaaaggcccaggttgacaactcccaataagaagcgagccacccagaccgttgacctcgaggcccctgagaaccaggttcagactcaccctccggcccttgctcatactgaagagcccatccccaaagccaatcaggttgcagcctcttcgagtcaagtgcctgagactctgcccatcgaggctgggagggttggctcagagtattctatgcaatacgctggtgcttattggcgtcattttcgatccttccttcccaatgactgggacttaatcaataatggccacctggatgagatgctcgagaggagtgttgcctttggcctctcggtaaacttctgtactcttctcattttatttccctttttagcaaccttcaaaaatacttatgcttttttatttatttgttttcagcaaactttcatctcctttgtcacccagcgccgaggtctagataggatgaagcaactggagattgagatccagaaggttattagtcaacacgaggccatccagggaatgggatgaggctcagacaaagatctcttgcttaaaaaaggaagacgaggaggtgaagagggccaataaagccgaaattgaaactgctcaaaaaggaggcgaaggacaagtctgagttatgctagaaactccaagaggaactcaatgcagcaaatgtagcgcttgaggcaaaagaggctgacaccaaggagcgatgcaatgccattgccatgcgctccatcaatcaagcctagatggcgaatccagaaatggaattgagtttcctgggataggccatggaggaagtccttgcttactacgagcaagataaaaaggcagaagaggaagttgaggtagcatggtaagttatagaaaaagaaccatcgaattctcctactatgtaggcttggtttttaactatttacttttttattttgtatttttaggaaaatggccataaggtcgagacaatagttttccctttgtggcacttttgtaaagataaatttgcaaagttggatgaccaactttgcttttattttatcttttattgaatgcctcgcacttttatatttgaacttaatatatttacttttttacatattcattcacaacttaaacaattatattttgatcaaatttaaagtactttaagcctttccaatgctcgtattttcatttgatattgtttaagtagttagtaatctactatgtgcgcgagcagttattgtctgctatgcttttgattggcgagcagtttattaattcttcttcacattaacagttataatctgttttaagcaaacttaaacatacttttaatgattcatttcgtgactcactttatacatttttgattgcttatatgaataattaggccttctattcatattttaggtttaaatattttctcaaggaatcttggtgtcttgtttaatacttccctacgaaatgcgagccgttagtattcagctttttcatgtagcttaatgttgtttttatgagttaaatctcatttacaactgctacttttgactttcctttctggcgagaatggtgttggactttgtgccctaaataaaactctatttcaatgtaatcctttctattcaattatcaataaagaaatagaattattttcattacttatttagtatgtcatttggttcatgtaatcattta

SEQ ID NO: 119834 - DNA, 2889 bp, Cannabis sativa
agagagagaattttacttacatgtcaattgcctcagttaaagctgaaatgacagaaaaataagatttgattaggaggaaagataaaaataattgttgtaaaaactaattggaaattgaaataaatatgagaccagagcaacagctgaggatcaacaattgggatgaaacctcctcaaccaggctacagtcaatgtggcatagctacttaaagacacatacgaaaaaaaccaaccatttttggatactaagatataatatttaatatagaggaggctaaaatagactcaagaagagtttatgttatattccatttttgtttcttatcatttcttcctaacattttttacatgaaccttttttaagttgtgctgtgccatactagaataaggagttccacctcaatggcccagtacagtaagacgagcttaagttatgtattgtgccttgtgcttccataccatgccatgttgaggctagaagggtgtatcctatagtaccaaaattggctaatttaattggtgggttttaattatgggttatggtgaagagagatcctgaacttcctatcaaaaatgatccttaaaacgatcttttgggttacaaatagtctcagaacattttagtatacccccaatggccctgaaactatctagtatataacaaataggaaaaacttggtgtgactaacatgcttagggcaaggatatatttagtcatcaactagatcatgaaatcatatatttttcttttgataaactacattggaaaaatgtattactaacagataaatccacaatagaaatctatacacataattcaagcgcctaattgctgtgtgatgccaaacgttctagctcacatgacatgcctacatcgctagtgtgttatgcttaatgttctagcacatcgtaaattctcatgccgcgataatgataaggacagaccatccttacgttaggagcaggcactcctgacagctcagaataatggattttgtgtgtgtttgtgtgggcagggggtggggtgttcaaagttattaaactgaagaaatatgaacagactaaaaattttaaacaccctaattaatcagccaatagatagggaaaagcaaacctgtcactgtagtactgaagctttcttggcaaatcccgcagatagcttcgccaatcaaattcttcatgtcactgcagccacataaatgccaagagtcaagaaaagaaaaaccccttaatgaatatctacaagcacggattctaatataaaagtttcctgcagtcatgaaccgcattttacacgggcatgttcaccacctcaagacaagaaaaagcatacatttgtgtttgtgaaagtggcgaagaaagatgtatagaacatcaaataatcacaagtagtcaagtacaactaactactaaaagtttattcaactaaaaaaacctactcaaatggtttccatgtagccataaggtcctattcctatgttcatggtttacaagtaatggctatcaaagatcaactcttacatgcggcattcaacgctggtgccatggttacagaaggggcagctgaaaacagtatcaagcttgtcattacgctttttaggtggaggctttgctctggacttcctcttgcccattgttcaactcactgaacaaagcaacacaatattgttagctacagcaagaaactaagaacaatattggaaaactttacaagagaaaaaaaaaaataatggaatacttgacaagaaaaaatagttttgcgctaaaatttatatactggatatttcttgcttttctattttcaattaaaaaaataggtataaaccaacaataaattgcaatttacaatcagatcaaactcttgaaattaaaattaggtgaaaacagattatcatctatatcaaagaaaattaaccgacttcctttgtgaaaggaaaaaaaaaaccctaaatacccaattgttcatttaaacgagaaataaaccacaacaaaatcaatgaacttccgtgaaaatcatgtagatttatgacatgaatttcttcctcctaatagcatagaagcatgcaagaggaacttagattttgattcttcaaaaatttccctcaaattcaagctatataatcagtaaacgtaaattgatcaatcacccttttcctccactatatagaggacatgaaggttagagaaaacaccaattccccttcctttctcggcaatcagacaagagataaagtataccaaaccctctttagtatttttgaggaagaaaatatttcgaaaaacaaaaacaaagaaaactgtatggagatcaagtgagaagtagcccaccttgaggatgactcgggcgaactggaaaattgaaaccctagctgagagagagatgagatagaggcaagcaagcctttgcagaatttaccaaaatatattctaggtagaaacctcccaacacaaaaatttcacaaccttatttgagttttttaatggcactcagataattttttgtttaaaaaaaaaaatcctctacttttataaacgttcaaaacaaattcaagacggctaattaaaccgaactaatccatccaattccaattcgattaaggatttttattttaggtttttaccttttattatatatttatattatttatatataaaggatatatatataaaattatgaaagggtgacgtggcaatgtactatttattttattttatttattttattttttaaaaaaaatgataactctacaatctatatatatatctaatctataatctacaaagaatatataaaggatctatatatctatcctatataaagtgtgtctatataacagaatttttggtttatgagatatttatgggtcattttttatttatattaaaaat

SEQ ID NO: 119835 - DNA, 2278 bp, Cannabis sativa
  modified_base (33)..(68): a, c, t, g, unknown or other
  modified_base (2226)..(2242): a, c, t, g, unknown or other
tgtttatttgatatcgttttagaagttcatatnnnnnnnnnnnnnnnnnnnnnnnnnnnnnnnnnnnnatcttggtaaaataattccaacatgagcttcaaataatatcgtctggatgaggtcgaggtttacaccttaaactcgagctcacatatcaatggaagaatttgtggaataaggaattacattatttaaaaaaaaaattcacaaataaattttaagaaaaaaatacattgaaaacttataccacaaatatggtgtacaatttttctaataaaaaactataaaattcccaactcattttttaccatataattaacaattggcattcatacataaaaattaattccatccattcacaatatattaacatatattaaatgcataaatacccaacacagtatttaatctatacaattatgaatatagctcttgatactaattgttactttttatggccatattagagttagaaaaggaaaagcaaacttgataataatagttttatccattatgaaccataagctcaagaatcttaacataatgtatatatattaaatctagtctaatgagtagagatacaatacctcttgtagcctattagtggatcttcgctatcttttagtataattacgaaaatctaatccaagaattttactgaagagttcacaccacaatctttcaatcctgcctcaacactcaagaatagagtggactattagattctataagatgagtggatttatgtattacattgtattctcagctcatgagacactgtaattgagatatggatgatcacaaactcacaccacactacactatgtgtggcgtgtgagaatgaggagagagagagtgtgtggtgtgtagagagagaatggaagtgaaaaatcaaacctatttttcactgcttgttacactctttttttgttatctctagttgtctgtctttgtttataataatacatatcctatatataatattataaacaaacttttttaattaatccttttaaaataaaagaaatatctaatatgatttaacttcataattcaaattcaaatataatatcttatatctgattaacaaaaatcagttagatctttttattttattattatctttttaattaaataaactattcaataatatatctaattaaataattaaaagataattaattaatataatttgaattattttaaccaataaaataatcaaacaaaattaacatgggtctttatatgtcaccctgcacgtgtggatttggctgacacgtgtggcccatattttaagatctaaaattaatttctcaattttaccataaatatgatttattatttatttttataataaataataatcgatcaattctcattaatttcttatttcacaagaattgaaatagatattattttttgtaaaataatatatatttctctctttaatattatttcaaaataatattaaatttaactaattaatataattttatctaataaaaataaatagttaaatactatttaattatataattcataattttcataattattcaaaaaaataaattctataaattactattttgctcttaagaatttatttctcatagaaattacttctcactcaaatttaatcatcaaataatatattcccctttgtagtggtttctagaggtgactcgggaccatagacctatattttgaatctccaagaaacacttaattattatcgatctcatcaataaaataatctggtttattaattctattattactccactataaatataaaaattgcaccctttgatattatgtaattatatttacagaattcttactcgagtccattgatataatcaatataaatagttcacccttctaattatctcttgactctttatgtaccattaatttaatgtgaacagttaatctataacttattatagatttaactgttaggactcccaaaattaacattataaagaactaatatttgatccgtgaggaaagcttagattccactattgtataacatgtttcagccactcatgttgttaagctcccaaaatagaaattataagaatcatctgagaaattttaacgagtgaatcaaagaactcaatgaacacaaataggagttcatgtatacctagtattcaggatgatgtactaatgatcatcattgtggtatgaataactctctctgttggaatttattttacnnnnnnnnnnnnnnnnntcacaagtatgtttattaacactctaaatatgaact

SEQ ID NO: 119836 - DNA, 980 bp, Cannabis sativa
  modified_base (40)..(58): a, c, t, g, unknown or other
tttatttacattgttttagatattcatatttaggatgttnnnnnnnnnnnnnnnnnnnaaatctagatcctggtaaaacaaatttcaacaaaagattctcttagggctcctgctaaaactacctacaaaaaaatcatttttgaactttccaactccatcccttttgaagaacatccatctcttgctaacacttccagccaaggcctttaagatgttgtcgactaattccttttccctagtattgtcaatacgactttagttaatacccccacactccatgccaccctacatctatctctttaggtaacacgacccgaactaccaacttacctgtagtctcgagccaagctgttacacaccctcttatttctcccattgcctccacttctatctttgtttcgactattgttactgctacctctaaggtaagggccatatgtttcttgagttgtctagagctctatcatttgtttcacccattccacaggccaaagtggctttaggtaccaaatcaggactaaaaggtctttcactagatagaactgtcagttgggttcttttgttagaagtatgttgaaaagagctcgatcttccaattctgattttattgtggtcccatttttatttgactctaatgaacaagcaggtgttgctcagcaaccctaccccaaaaaaatgagtattatcagttggaatgctcgcagattagggagttcccgagcattccaaaatctctctctcatgatcaagcaacatcaacctcaaattatttttgtgatggagactaagtggcatctaattcaagtattttgttcaaagctagactgtcttttgatagtgtttttgaggtccctagacatggatcaggaggtggtttattaattttttagaatgatggtgacaatgttaatattttatcttactatttatgtaatatagatgtactgtttctattaactcccatgtttattatcatcttt

SEQ ID NO: 119837 - DNA, 1201 bp, Cannabis sativa
ttatgtggcttgcttgtttcctccaatgttacatgtggctcctcctgcttggactccgccacctgaggactggatcaaaatcaattgtgatgcgagggtgggtggtaattctatgtgcatcgcaaccctggctcgaaatcactctgggaatatcctgtgggctgttgtttccaggctcggctttagggatccgttgatcggagaagcggctgcttgttgccttgctctcgactctacgaggttcaggggtcacaactttgtcttggtggagaatgattcagaaatggttatcaacgcgctaaaaggtctacaccagttatggaatattgataattatgtctatttttgtaatcaactctctaaaaactttttatcgtgtaatttttcgtttgtttcgcggtgttgtaattttgctacccataatgtggctagatgggctttcgattggagcatttcaggttttgtggatccttccttaatacatgtttctatcctttgtaatgaccgcgatgtctaatttatcctatctatataacgctttattttcaaaaaaaaaaactattttttttgcttgagctattttatatattttaggtgaatacattaaagggaaaacaagctttaggcgcgtcttgttttagcatcaattctttgttggaattgacactattaattttcctttaggcagtttcaataaatgagctaaaagttagctaaagttttacaaaattgtgcaaaaatgtccatctatcaaatgaagtagatggtaagctaaaataatgggtttctaggtttaaggagatgcacaaaattctttatggcttcaatagttataaggaggagacgtaattaatccaagctttaaagaattctgatggagaatgggtgacaaatccggggaaaatgtcaatccttttgctcagaaatttaatactacttattccatcaacccgtagaggggaacatcctcgcttgtggatcttttaggagttttgcccgatgatgaggatttataggtcatcaatgagagttttgaaatcattaaagccatgcttgctatgagaatagaaaaggctctcggatcggacggaatgccagttgctttccgtgttcatcattgggatatggtgggaaagaagttgtaaagtcctttttttggcaagttaggtgacaaaataatttttcctttttatggtaagat

SEQ ID NO: 119838 - DNA, 814 bp, Cannabis sativa
gcagcgctagttgcaatagggattactatgtagaatttcgtaaaaatacaaaaaaaaaaaatagtttgaagtgtaaaaataaaaaagcccctaataaaatttgattttgtaaaaaaatatatataattaaaaaaatacctcatttctataaatatgtatacgacgtttatatttgtttgatttgtttatttgatttattatttacaagtaaaatagaaatatattttggacaatgatgtagaagacagtttgtatggagtattgtttgagactacggtttttcacatatgatcatctcgtatctggctggcaccatgtgcaactatacatacgtatacatattattagttctaaattaaattaagatacttgcaatttgcaatgaactagtcaacaaaactattataatcattaactaatataacaaacttacttagcggacaattaattagcattttacttatcaaattataaatcattctcttctttcttagtagagaaaatacttccattcaagcaacaaaacaattattcttatttcttgcctctcttatttttattgttttgaaaaatatatatataataaaacaatataaattaaagaaaaaaatgatagaagagaattttcttagtattttattttaattggatgatcctttgtttacaaatatatgagttatagattaagaaattaaggagtgaaatagtaattacagataatagtaataataaaaaagatttggatatctatatatatatatataaatatacatatatatatagatattacccatgaatagttactaaacaaatt

SEQ ID NO: 119839 - DNA, 2141 bp, Cannabis sativa
ccaaattcaatgaatataaaatattcatttatcataaaatcaattatttatttatttccttaaatagaaaataattttcataaataaaatattctaatacatgatactagaaacagaaagttatcttaagtccattgaataatcttagcttagttttccttcttatccttgtgttcgaaatttttttggttgatccatgtgaatggttgaaccacagttctctttacttcaattactagttccatattaggactatccattgcttgtttaaactaataataaattgacgtatctagtttcatccaacggggtgggtttcctcgaaactttcccactacgacaaggtaatgttattttatttctagaaactttagtcgtattagtctcttcagttatcacaatcttttttggtttaacaaaagtaggtgggatcatcctctatagctgtagaggatgatggaacacttttggatttaaatcaaataatatctcctttatttcgctgctttgttttcagatatagtcatgttgttataaaagtagtgtttgtaaaaactaatactttcttgtcttgaagactatagaatagtccacctgatcattttagaatagctaacaaacatgcaaacaaacatacaaacaatagttagtgtttgtttttctgaaggaattgggtagagttgaatatagttgtaagaccttaatccatagggatgtcacatgtgtgcttttataaattagtttataatgataaactaacaatttaaataaaattgtgttttaattaaaattttgttaattattttaaaatataaaattcatggcattataaaattttaagtttggggatcccctttttaaacatttacaaaagatgccattacagtattacatcaaaatcatatagtcatcaaaacaccataacataaaatccagacaactcgacattgctagccagatgacctgagatgtatatttttcggggaagacctctgactcatggcttccccaacttgtcatgtcctttatttgcactataaaaaacccgtgagtcacaaagactcagcaagaaaggcaatagcataatatctcataacaacatacaaatataaccaattatactcatgtaatcacattcttaacacaaaagcaagaagctatataacacaatgtaaacattcattaacgtcaagtgtttgtctaataagacaaactattattgttactttataaaataaccattatattttgttgcccaatgagacaacctttatactgttgcctaatgagacaacctttataaaattgcctaaagagacaactaatgtcaatatcgtttcctaatgagacaactgatatataaaaaacctaacaacggtttcgaaatagagtaataactttttcttataaacggtggtaactatatcacatttgacatgctatgtggtataattgtacttttcttatctttaatctagattctggtgtgccaaccaacttgagtagaaattgcttgacgattcgggggccctatgtcattcatggtaaactgataagtgtttacccaaaatactgcttaatacccatataaaataatcaaggagttttcttgattaatggatgcatgcacctaaattactgtcggcgacagtgatatttaaaaagccattttcttgatccacaattaaatttcttgattctgtttttggaaacgctggtcggtcttccactcttacctccctcctttgagtatgatacacaggtaagttttatataatatatttttatatttatattcttattctgattatttaattttgtttttataaagagtttctcttgttttttgtttcgacgtgattatttttgtgttatcgtcaaagtttggttattaaaagctttgatatatgttgttacaaatctgtttgtcttttcttttgatctcatctttaagttcagagagttcagagagtcatcaccattagagttttccaaagagtagtaagtcggcaatatccgtcggtggcctgtggtggttgcggtaactttgaaagctgattggagtgatagtccgcttttcacgcattctccctttatttcgttccgtaactttgttagtattaattgtatttttttagcca

SEQ ID NO: 119840 - DNA, 772 bp, Cannabis sativa
tatggccacttaagctagcctcaagtggtttaaaataaagtaccattgaagatgctctaatattactctaaaatgacgctatataattgattagtaattttctataatctttattaaaataatataaataggatataataataaattgcacaaataagaattacaccttctaccaccatagtaccctgtacatttctcatactaattacatggtaccgacatcttatataagcctcgtttattttaggttctataatggtttttttttattattttagcttttatgattaaatttttttatcataagttgagaaaatgccttttttaaccttttgggagaaaggactttttgcttctcccaacaccaacttttaagaagctaattttaataaaataatttatataatttttaatttatttataattttttttaatgatacacaaacatttttaaaagaacttttccactaataacatatatttataccatatttatcaaaataataaaaataagtttaaagttttacttattttatacttttagcaataaataaaagtaaaaatttaactaaattgaattttatgtagttgaatttaaaattaaatcacgttacattaaaaatattaaattattaaatttaaaatctcattagataggatctcaattgatatctttaatcatttatgttaaatttgtgatgcaatattatatacttatttgtgtgtgaaatttaaatgtgtcaatatactttgggaaatttgaaattatatg

SEQ ID NO: 119841 - DNA, 1183 bp, Cannabis sativa
tttatatgtgtttatttacattattttagagattcatatttaggatgataaataatatacatggtagtaaatttagatctcggtaaaacatattccaacaagaaatgggtttgtgtatcggtaagaccgtgtgtagtaggaccatagacggttggggataactgggttccgaggagaaacaaggctggatcattagtctgagatgaaaaactaggagtggctattattggagttggtgcggaagggactctgaaggcttgtatataagcatcttcaaggttgattaaaccttgtacttttgccataaattcacttaacatttcagctcttttcctctgcgtttctccccacagtagggagcctacaaccaatgcaaattgaagggcgatcaacttcatgtactcattgacattagttgtgacgactgcctccatcattctctaaataaaagccttcaggctctcattatgttgctacttgacattggtgagtgaacctacttccatgtccatttcttgtgtagcaatgaattgtttgaagaaggccaactgtagatccttccaactattaattgatcccagagccaacccttccaccaatcttctgcagacttagtatgggtcaaggagaagcataaacatttggcatcatcgctaacacaagccacttgcatcatcttgttgtatttagcaaaatgcatttacgggtcagtcctccctttgtacagctcaatgtggggcatctaaaagttttctaggagtaaaaattctacgatccctctaataaagggttcctaatcctcgtcttccaaatccgataatgctccactttgtttcttgaccagcttagtcaacgcaacaatttgttcttccaacattttattgtcatttttggggagatcacatcccctcatcttatcactatgatgatttctaaggtcacccacacgtggcattgccttctcacttttgtacctctcgtacttagcatccaatcattgctgcaagtccgttgtggaccaactatcatcggagtgaccaacgagagttctcccatcctgattgacggagacactaggaggatgcccccgtcttcttggcttgggtactctagttgttggtcctctcagcacggttttgcctcgagcgtcaaaagggcatccaggctcaaaagcatcggtggc

SEQ ID NO: 119842 - DNA, 2984 bp, Cannabis sativa
aaactataattcaattattagagtttttttttttttttttggtgaacggttacaacaaaaccaaacaaagacaacaacacaaggccaaaggccaaacgaaccgcctagccagaaactagcaaaggcagaacagggaacaggggagacgaaaaacaacaggagcagaacaacaaacaaagaagctagaaaacaacacagaataaaaagaaaaacagccaaattaacttaaaacatgaccatctgcagtggacagctgcaggaaatcatcaaaagtggccaaatcaagaacaccaaatatgttgtgccgatttgcccaatgagccgccgagtgggccccacagttgcaggatctgcaaatccattggacttcccaaagattgaggccgcgagaaagagtgaaaaaacttgcaaccttatcttgaatgttgaattgcagcttgttaggttccatcggattgctgcggatggcattgacagcaccaagggagtccgattgaaacacaatgttcctgtaaccgaattgaatagccgcagcagcaccttcatggatcgcagcaacctcaccagacaaggggtcacaattggttgcacggaaggtaacaatattgagaatagcccccgaagcatctctgaatacagctgctcctgccgaatggtaccggccaatggcaacatccgagttgcatgtcaaccagccctcaggaggggggttccaacaagtttgctctacagctccgggagtacaagaagggacaagttcatgaagccgtaagttgatgagtttaatgatgacttcaattggggatgatctcccttcatgaatgatgctattacgctccttccaaatgctatcaaagatgatagcagcacctcccaagaattgattaagatcaaggttagctggtctgttatcagaatgttggaaccaatctagccactcctcccacgagctagctgaggtactagtggttcgcaagctccaaatacaaccgaaccaaactgccttcgcaaaattgcattcccaaaataggtgtagactactctcagttgaggaggagtagataggacatcgtaaatccggtaagggtatggacattccaagtctttccctggttggaaggcaattggatagaattcgccaccatagcattttgagtcgtttatgaattttagacccccaaaggagtctccattttttatctccttccaccccgctgccaatattctttagaagtttataagctgagctaacagagaagtttccactcggttcaggaagccaaagccaggaatcattggtcagtcctcttgggaggttgatattgagaattcttctggcatcttcttctctaaaccattgtctaaccatatcctccttccattggccatccgagatgaagttacttaccaaactcacgcctcccgtggactcaacacgaggagacggttggcgagtttctcccggaacccaggggtcgaaccaaatggatgtggagtttccattgccaattttcctgcaaattccccgttgaagatcctcgcgcatccgtaagattgctttccataggatagtatcggatgtcttagcctccatttgaaggaaattttggtttctcgtgtatttgtctctcataagctggcgccaaaggcaatcttcatccgttaagaatttccaagcccatttcataaggaaggctttattcatagtttccgtggtacgaaaccccaaccccccagcagtcttcggcttgcacagacgttcccaagcgagagtgtggagctttcttttttcctccgtatcgccccaccaaaagtccctcagaagtttatcaattttgttagctgtggaaatgggaataacatccgaagaagcaacataattcgataaacttgatccaacagatttgattagacaagtcttccccgcacttgataaaagtttaactttccatccctgaatccttttgaggacccgatccactaggtgttgagtgtcttccgatctcttgactgatctaaacaggggaagtcccaggtaagaggccctactgttcatacgcttcatccctaaagttttcgcaattacttgggcttttctacttgaaactccccttgagaagaacactgaggactttgggtagctaactgattgcccagagaattgacagtaggagtttaagcactctagcagtgttcttgcctctcggactgaagcctcaccaaaaagaatgatatcatccgcaaacatcaaatgagtgactggagtactgttacgagccagcttgaaccctttgagaagtccatggttttctttacttaaaaggaggcgggagagtgcctcggcagccacaatataaagagacggagagagcgggtctccttgtcttagacccctctcgggatggaacttgcccaccgtcgatccgttaagaagaagcttgatttcagccaccgatatacaagctttgacccagttagtgaaagtattactaaatccgagttggagaagcacagaggtgacgaagtcccaatccagtttatcataggccttctctaaatctaacttgataagcatgaagccccgcttacctctcttcttacccattgagtggacaatttctcgagcaatcatggtgttctctgcgatgtgtctaccctttacaaacgccgcttggttgggagatacgattctcggaagaaggtatcgcatccttgaggctaggatcttcgaaattatcttatacgccacattgcaaagggcaatagggcgatagtcattgacagtggagggtgaatccttcttcgggaccagcaccaaggaagtatcattaatgaagctaggcaattccaagtgagtgaagaagtgaattaccatctcaatgaggtcatccttaaccgtgtcccagtggtgtatatagaagcttggcggtagacagtcaggccccggggccttgtctttacccatgtcatttatggctgccata

SEQ ID NO: 119843 - DNA, 552 bp, Cannabis sativa
tggatcggatgcccacccctaacacgaagtgtcatattactattattacaatttaatatggggtcacaaataatttaatttaatataatatagaaaaccactaactactgtaccacattggtaatttggtatgatgttagacacccttttcaataacaatgatcatacataaaagccttcctctcatgagctttattaattttttacaacgatcttcataccctttgttttagtgcaccatacaatttttaaatattttctaatttttatatgtaccaccaaattttgtatactctttacaattataattagaaatgaaaatagtattctgtataacatagtttgcaaaaagggcatgagcaagaataggcccatatatatcttattgatgcaatctatagcggctataggcataagtaggaaagactaagcccatgtgttggaagccctatccactataggatacatatatcacatgtaatgaataatatttgttgagaaaaatattgaaaaaatactattttatactatgtattttataaaagttattaa

SEQ ID NO: 119844 - DNA, 1510 bp, Cannabis sativa
tgtagatcatcaatagaggatcattgattatttggattgaaataatagataatttataccatatctatacttggtatagagcgttctatataatcatgagcgtatttccaaatctatagtagagtcaggaagaattaataagatagagaatttacattctagaactacttattgggagcttgattatataagcccatggtccccacactagttgagataatattgtcttgtagactcagttaattaattttaattaatcaattaaaattataaataagactatgtcttgtttatgaattttcactaagcaagagcttatttgagaagagaagagattttagggtttgttaattaattatgagactttgaaaggattaattaataaataatttaaatagaaattttattgataattaattataatttttaaatagataaaattgacatttatagagatataattaaaatatggcatttgagaaaagaaatataagttttaataaagtggtagaattgaaatccaatgggcccacttagggatttcggccatagggtttaaattaaagccattttatctttctttttttattctatatttaaattctaaactaaccctaatagccatcatataaataaaaaaattataaactcttatttttcataaattgataacttgattacctaataacctagttttcactttgtcataaaaaataagagagcttcttctaattttcaaaatcctaagcttctttttctcttgattttctcccctatagtgagatagtacttgcccacacatttcaagtcaatactcaaaatagtgcgcaagactgtgtagtgttcttgtcacctgaaggagaaacaaggttcaaatcttgatcatactctgtgacagaaatgattaagggttagagatctgaacgaaaagagtcactatattctgttgccaccaatgtaagattttttgtaactttatatgtgtttattttttttttttttaggaaattaatatgtaggatgttaaattatagtcttataattaaagatttatgttagtaaatctagatcttgataaaatatttctaacagagtacatatcagaacatgaatttttgggattaaaaaatatgattggaaaaacttgatttctcacactctctctctcacgcctcactcttactttctctcctagtctcacacatcactctctcttatgagttgagaatacactgtaatcagaaaagtttattcatcttttaaatctataagtcctctcttatctttagtcttaaggctgatctaggaggtctagtatgaattcttcatcaagcccataaatttttggattgaatgatcaaataattatacaaaaagatactaggattccctgataggaataaagaggtaaaatccttctaagtagttagatttaatttatgttatattgtgctgagatccagggtttaaggtgttagacatttatttgtatagactaaaacatacatga

SEQ ID NO: 119845 - DNA, 1061 bp, Cannabis sativa
  modified_base (57)..(67): a, c, t, g, unknown or other
  modified_base (1005)..(1021): a, c, t, g, unknown or other
tgctgaaccgctcttccgatctaaaccgtaaaaatgtaaaaaaaacattctttgaannnnnnnnnnnaaatattttacaaaaaaatggtgcattatgtaattattccaaaaatataactaaagtagttttttaatttaaaagttctttttattggggtaattctcataaaaattacaaaattaaattttcaaaattatttgaagaaagagaccattaggttttatgcgataagagtgcatacaattacttaaactagttaaaagtgcttgggatgacaacttggaatcttctatgtggcgtgccttttggaaactcgaaattcccttgccctttttataggtccgcctgtaagtcttaaaaacagtgtggaattatataagtgtggtgaatcttgataatgtagtttgttttgttttctctgttggctttttagtttttaccctgtttttcctttgttttgctttagcttctcccacttgcctctggtctagttctttagttttgtctgtcaatggctgttttgctggtttaagagcaatttcatgggtgattcatgtctagtttttctttctaaagtcgtacctagtacgtactacattttctatttccactttgataaggtagagcttctatctaggaccaaacaaattgtattgtaattaattaagaagttttaattaaatagagttttaatgtaacaacaataacaataactaatctttaatgttatatcataataaaattatttgagtaaatataatatttatacatgtattacaagttggaataaaattattaattgtacataaataaatttataaactatatgtatatattttatttagatataattattcttacgtggaagtctttttttaatgggagacttagaaaaatttataactatttataatttagaaattattcttaatttataactggcttaaattaagattttttttttcataacaaaaggttattttaagggtaaatagcggcataannnnnnnnnnnnnnnnntttgtaagcggcataaatccaatgtttatttttagcggca

SEQ ID NO: 119846 - DNA, 1033 bp, Cannabis sativa
gagaagatgattcgacatggcccttaatccatgtcctactttcaagttttccggatggttgtgagacagcatctaataagagtttctttgtaatttgttagttttaattaaatagtttgcatctgtattgtcctaccgtctcttggttcttccctgtgataccattcatctgtttcagattaaagatttccactattgggaatgatcaaggataatatctttgctcaaatagtattttggaccctgtgttttgttcaaaataaaccatatattttctaaaatggtaaaaataagactctgaacttaattttgacaattttttttttaatataattaacttgaagacaattcctaatacgaacagatataaaaaatgtaaattttattttgacaaaaaattaattcaaagttctatttgtaccattttagaaaatacaaggtttattttgtcatttaacaaaatagagggtctaattggtagtttttacaaaacataaggtggaaaataatatttaccttttatttatttattccataagataccaatttcaacctttggcctagtgtttacctaaatacaacaatctattattttagttcattgaaggaatgtcaatggaaaacaatgacaatggtaaaaatggttcatggattaggttgtacaccgagttagttttcgaacaactttggatcattggttatataaaaatggtttatgaagacaagaatgtggtaaattgttattaaaaattgatcaattccaaatagtttatataactgcagttctcacctggatagcaatggccgtcctcagacgaaatagcggcaaagagtacctaattcgtaacaaatttgagaaattctccacaacattaagggggtgtatttgaatctacaatggaaggaaaactgagaggggtgtgttaggccttgggattagtatggtgggctagcatacattaaataaaagggtaattgaatccttgtattgagggtagtgttttggagagaatagaatagtatatatagaata

SEQ ID NO: 119847 - DNA, 814 bp, Cannabis sativa
attttaaaacttaaatatatacatatatcatatcggggcaggttcggggcgggtatctattcccccgtcccgccctgtttcttaatcggatatgaatcttcaaacccatacccgcccccacccctaaacttcaactcccgtacccgccccattacccacgggtacccgaacccgcgggtataattgtcatccttaacacctctctcactctctctaaccctctttgtaattttatttaaaattttgtaaaaaaaaatttaattttggaagtaactggagaagaatatttgtattgtggaatcaagctgtggaaaagaccttgtgaggtagtttttcatctcaatcttttttgtttttagccttgaatttattgtttaagtgttgataattcttcaataatatgatatgaggaaattttgttgaattggagcttttatgttatttttttttctaggttagcatgaaatctgttgttagggaattttttttaattgaagttttggctgttgaatttgtgatttgagcatgggattgtgcttgatttctcattgaaatgtcatcctttgtgagattttgagcctacctttgtgtaagttgtgcatgtacattatgtggaatgttaaacttgtttatttttagtggtgacccttgtatgccattttggtaacagatataagttggtgttggatttggggtaaaatttgagttttgtgttgtgatatttttcacacgcaagtgcacgtatcgtttacgagtaatagactcactgagagtgaggtcgatcccacagggattgtagttaagtacgttaaaa

SEQ ID NO: 119848 - DNA, 558 bp, Cannabis sativa
actaccctcctcaagggtagttataatactaaagagaataacattccaagactaaaaactcggaacagtaatttgttaggtggtgtataatataatgcaaataaaaaactaactaaaataaaaaaataaaaataaactcaccgcttacaataatctcaaatcaaaccatatgtcaaattagaggtgacaaaatggtttaacacatgtaaggagtgaggaaattaggtgttatattggattctcaaacactaaacccatctcaatagacggtatatatttttatgttaaattttgttaaaaaaataaatattatttttaatctaatttttcacaattatgttccaataaaaaaagtataaattaactcaaaatgtcaatatattatttatttctttacctttaaaaagtttagggtgattctacaatgcacacctttaaaagggatgtattgaacacatttgacttgtttcagcatccagaaaaattttttagtctaatttttttcatcttcatgtacgttatagctatttaagataacttacaaaattttgagaaatt

SEQ ID NO: 119849 - DNA, 1130 bp, Cannabis sativa
agttaatctaaaattaattaaaataattaattttcaactttaatttatttttcaaaaaaaattcaaaattatctgcatttaaataattaatgaaattttattttttgttattttcaactaaaatacatagttaaaataatttatctaaatatcttatttttaacttgacaaaatacgatatccaaaatttaatttttaaaaataaagaatcttaaagaataagagctaaaagtcaaagttaaaatggtattaacatttctaatttttaaatgaacgtctcttaaaaaaaatagtattaatgtttacattttctttaaagaataaagattaaatgtcaaaattaaaatggtattaactgttactgaaaacatacatatctgaatatataatttaaacttttgtataaatagttttaatattttgacaaaacctcgttcgaaataatttttttaaaattatatatattagtcaaaatacatcatttaatttagttacctatccgaatttttaaattgaggaatgagacggtgaagtgacaatttaaaaatattttaaagtatcttatatttttttctaattttttaatcactttctaaaaattatattaaatttaaaattaatacagttgtatcacttaattatcattaaataaaatacaatcgcaagcaaaacatagtatgtttactaattaaaaatatattatatatgtgacgttaaaaaaataaaaataaaaagttgctcgtaaaatgagagaaagagaatatgtgaaataacttcactacttttttttgttataataacttgtgcttcattagataaaacagtgaatacaaagccaacaagttataaggaaggtagatgaccattccaaactagttcattatctaatcataatcctaacttggcaactttatgagccaactcatttgactctctacaaacatgaacaatagttagattatgactgaacaataataagtttttgatacaaattaaaatgtcatacaagggactactattccaattacaagatgtaagtttatcaacaatagttttacagtcaattctgagaacatccgcagggagatgttgttggaatttattttgccaggatcttagatctactcaca

SEQ ID NO: 119850 - DNA, 1029 bp, Cannabis sativa
ttttcgtgttattttttagaaaaccgtaaaaatgtaaaaaaaaacattctttaaatgtaaaaatataaatattttacaaaaaacggtgccttatataattattccatcaaaatatataatagaaattaaaatcattccattaaaatgatatgctaatattttaaaatacaatcaaactaaaatgataaaataaaaattatttcattttaattccatttcattatctttaaccaaacaccatcttgatattaatagctaaactgcttctctggttggatgaagatgtttcggttggaagataatattccatctccaatttactccctttgtaaattatggtattcatcagtggtttatacctaaaacaaacttggaattcataagtgagaaacaacatggtgcatttttcttttctggctggaattaataccaaaaaggcaaaaagtattctcaaatgtatatatattaatatatgatggtgtgtcatacatataatacgatatataatgtgagtagtgtggagcaatacccataagccataacatttttcgtatttattaatcttttcttatataaaaaaatcatacataattattgagaaatgttaaaaaggcaggatcatatcactactgttgaaattaagtattaaatggtccaattaattgtaataatatttaggatatattactaaccaataatagggtgtcacctttaaagtattgaacactgctgtaaaagacattgtgtctaatagaaatgctcatatttaatttaattgattaaattaaggtttatttgtaccgcatgtccttaaactatatatgttttggcaagttagttcctaaacattattttttggcaaactgattccaaactatataagttttgacaagttggttctcaaattttatcttttgacaaattggcccacaaacttttattttcttagaaacataaaatcctcactctttaataattgtactttatttatttatttatctatttattttaaatagttttatattaata

SEQ ID NO: 119851 - DNA, 3766 bp, Cannabis sativa
  modified_base (119)..(124): a, c, t, g, unknown or other
  modified_base (2202)..(2233): a, c, t, g, unknown or other
  modified_base (3033)..(3044): a, c, t, g, unknown or other
atcctagatcgattccaacacacctaagagaggtagaatttacaatgtcaaagatgatgtggatatgaaaacttcatttaaaaatctaactaggagagttgaagctatgtcattaagtnnnnnnatgaatacttctatacataggaataaagtttgttccttatgctatagttcaagtcatagtgcctagtcatgtccatcattacctatataccaagattcattctctaaagaagtaaacactcttcaaacttatgagaaatcatctgatagcccatattctcaatcctacaatccaaataggagtaattatccaaatttttcatcgagacagaaccaggctccaatgaaccaagggcacctgtacaacacgcccaatcagagtcatgcccaacctaatatgccatatcctcaacaacaaagaaaactatcgttagaggataccctacaatagttcatgcaaaccacccaacaagctttacacacaacttctcaattcctgttaaagctttaaactcaaatgggtcagcttgctactgccatagctgaaagggaaaactttcctgacaacccattcccaatccaaagagtcagtacgaggtaagtacatctagacctactgaagaagctaaatcaatttctatcctgaggtcgggaaaaattattaaaaaacctaattacgtacctcaacctgatactgaaatgaacaaagactcattgaaagaaaatgaaaagagtcagtctgaaagttcatattccaaagactcggttgaacaatcaagtcaaactttgtcgttcattccaaaagttccattcccacaaatattgatcccgatcaaaagaggtagtcagtatggtgacatcttaaaggtatccaagaaagtaagtatacatatctctttcttagatggcattaagcaaatacttgcctactctaaattcgtgaaagatttgtgtaccgtaaaaagaaacaccaatattctgaaaatgcatttttaacggaacaagtcatctctataattcaatataaaagtcttgttaaacacaaagatctagggtgtcccacaattccatgtattattggtgatcatgtgattaataaagctttacttgatttaggagctagtttttatttgttgccttattttgtttataagcaacttggtctaaggaaactgaagcaaacatctatgacacttcagttagctgatcgttccttgaaaattcctagaggtgtcatagaagatgttttgataaaggtagataaattttatttttctgttgatttcattgttcttgatactcattttgttgaagacataagttctcaaattcccatcatttgggtagaccatttttagccacatcaaatgcaatcatcgactatcgtaatggtgttcttaaattattatttagaaatatgactattgagttgaatatttttaatgttgttaataaatttgttgaatgtgaggatgtatatgaggtaagttttatttaattccgtcacacatgatttcatgctgaataaatatagttcttttgaaaattgtccaggtcattttggtatgaattttgaaaattcttttgatagtgtaaattccttgttagagtctacaccattaataaacacgaaagagtggaacactaaagttgaatcaattgaaccttttctctagttagaatcacagtcactccttgaaccaccaaagttagatctaaaggttttacctgaagatctaaaatatgcattcctaggagagtcagaaactgtaatatcctgataagcctaatagcaaataattagggtttattatgggttaatcaggtaataagtgggattatgatcttactaatctagttcaacataaattttaaattcgctatatataagtgagtaaataagtgtaatttataaactacagagatttatatagcatgtgtgaatgtaatatgagttatatgtgaaataaaaataattttcaggttcggtgaacctagatacccgattggaggccaaaaatatcacaatagttttagttagaaatattgatggaattattgggataagttgattttagaaatactgggatattttaaagtactcgaagttggccaaatatcctaaaagtaaagatttcttagtggctaaaaaataataagaaaactattaatattaaagtttttattaatattatattnnnnnnnnnnnnnnnnnnnnnnnnnnnnnnnnattattattattattattacaacactatttttatatacatatatataaaacttatcgtttcaaaataaaactttattatatatatatatattataagttatatcactaaacataaatgaaaacaaaacgaacgaacccttattttcccctttcgacgaaaccctctcctttttatatttattttcttcgatattcaatccaaaatctagcgatctaagctccagtagtagtgggatagcgaattctcagagcgggaaatcgagtttagaattttttaaagcttaggtctgagctttgatggtgttttccgtttaaggactctataatttttgttatttaaggattactgtatatatgatatatatgtgtcctgtgaagtttggaatgatttggataggttttgggggtgtttcggtgagtgcgaaatttgacatttttgccgaaaaacggtctgccgttttgtcaacatggcctgccgtttatggaaattctagtgagatctagaattgtatttttgtcataccttttcactcgggtgtctattttggacgttctatataccgtttcgaagcatgcaacgagctctaccatacgctgtatgttgtagagacaaaatataagttttattttagtgtatttataccgcggggtttggtagaaaatcctaaattatcttatgtgaacattaagcagtgttttaggataaacacatattggtttaccgttgttgtgacataaggccgagatcatcggagatagttcttcgcttgggttggccgaaatgtatgaacctggattannnnnnnnnnnngtatattgtactacatagtatgttgtattgtaatacaattaatattgttatataatgaaaagattgattggttaagcaatgataatgtgatgatactatggatataatatatgggctcacttgattaggtgatgcgatatacttggagaagtaccaagcgtaggtaccgcgtcagtgacatatgatgagtactgagcgtaggtacgggctcacctgattaggtgatacaattttcctggcaatattttgggcgtaggtacgagcgtcagttacatatgatgaatactgagcataggtatgggctcacctgattaggtgatgcgattctcttaggaacgtgtagatacgacgtctgtgatataaaaattgccaagttatggcatagaatgaaactgttgtagggtgtcctcctagcgatgtgtagatacgggcatcagtgatatatgataagtatcaggcataggtacaagctcgtctaattaggcgatgtgatatatttatgccaggttgtagcacgggctcacctaattaggcgatacaattatatgatatatgtgtgtaaatttttggcacaggctcacctaattaggtgatgtagttatgtgttaaatggtaccaagctatcgcatgagcttacttgattaggcaatgcaatacaggattatcagattaaagcatcgacttgtttaattaggcaatgtgatataatgaagatggttact

SEQ ID NO: 119852 - DNA, 1231 bp, Cannabis sativa
aaacagttttttagttatgatgtcaaacatgcactaacccactcaactaatttacagtttttatctaaagaaaactattttacagtttttttttaatgagagaaatattttattgtcataaattaattaatattgtcagtcattttgaacaaagagtatataggtggagaaataaatttcaaccgaacataattttcatccaatttgaaaacatattgagccaaaccgtaactatattgacacaacgtttgacatgagtaacaacaactctagagaaaaaaataaaagacttaaaatatctacaattaaatcttaaaaaaaaaaaaagaaagtacagaaagatgtttttttaaagcatttgaaaccatcaaagcgtccgcctctatttgtttaatcggcaattacaattggaggatgcaaatcaaactatggaagatggcctttgtctctacttcgtgtgatgcaaaatttccaacaataagcttcgaaagagtagccacaacacaaccagttgcatccctgactactattgtggacattgtattgagtcatatataaaaacgtaagttgctccacttatcacaaattggttgtaagatggaaccacatgattctcaacacagacaatagcaccaactccagttatattcttaattagcatccaaagcagcatcgacgttcaatatatttattcccagaactggcagctgccatggaacttgcactagtgttagtggcagtcatggattttgaaatggtgctggtggtgagaggtttggagtggcactaacagcaggataaaatttaactatgacattctagaaattctccaaataagttactacaaagtttgtaagttgattagttggtttagcaacacctccatgaataacccggtttctcttagtccaaataggccaaagcatgcaaatgatcttctccatttctgactttgtgtaaatagttgagaggtgaataagatagtcacctttgctcatagaacatgattgattccagtcaaaaatctgacaagcaacacccctaacagatcgagcatacctacaaccaaacatagcatgcccgacggactcccaagctcaatgacaaatggagtaagcatgatgacaagtcaatgctgaacaactcccaaatcaggatgaggttattgttcctgaagaacaaattcaacaccctcaagaacaagagtcattaaggaggtccacaagagaga

SEQ ID NO: 119853 - DNA, 1481 bp, Cannabis sativa
  modified_base (330)..(331): a, c, t, g, unknown or other
gatggttggaaggctgaccttggcttagagaagtcaaggtgccgcacgggtgttccgctgcctgaaaaggtgagcccgtgacaacgcgcattgaagtgtcactaaatagttttagagttactcaacgtgggtcactaaaacctatttttctagtagtgataatacgatttttctaatgtgttttctttttttcttattattccaattttttatacttataaaaatacttatagcttataataagaatagtcaaaccaaaagtcatcaaaatttaatttcatttaagaataaaaacaaaaaaattaattatatatttattttagtttcacnnatgttacacatcaattctttcatagatgaaactcatacatagctaaaataataccaacttaaaagaggaaaagttttgacctatgacattctaattgacatgcatgtagatttaatctacactggtacatcacatgtttcatagtttactaaagggcatatatttgtatttttatttttagaaaaaaagctcttaactaaagagatttataagtgtttaaatagataataataatgatttgatcacaattttaaaggcttatacgtttgcatttgcacccatccaaaaatctaattatatatagttctttttttatatcaagtagtcatatgtctccttctctagttacattgtcaatatagcaaatgttaacgcacattttcgttaaccaataataagcctttttcataataaatttaacatagaaattataagaaataaataaggaataaaaagtataataataatatcagatactttaacgtggttttgcagttaaatctgcatactccacgagtctatcttgttgaagatgtttctgagtatttaatacaatatacaattgatcgtatttttttatttctctcaaagattcttcgtccctttttctgtgcgatctgcctttatttataggaatagaagttggcagttatttacatttaaattcaaaatatataaccgtttgatgaaacgtggttaattcttaactgcagaactacctattatctacaacataatttggttattgagatataatcattcttcggaccgattagcctaacgtattttaagaaagttaaacaattgttttgatccaaaggtagaacatgaaaaagaagcaaagatatgttggaacaattaagttttcactttttcaacaaaattaaaaggaaatttacaaaaattgatgaaaacagggtattagaatatatatatataaataaactatttatgtataattataattaattattatgatttgttgttcgtttttctttttgggtttcgttcaatttggttgagtgtcacgaatttggttaaaattagagaaaccttaaatttgtttagttgcttattttatctttattctcattttttcactactagaaaaaccccctttagagaggcggtttttaagccctttcagcgt

SEQ ID NO: 119854 - DNA, 2294 bp, Cannabis sativa
  modified_base (26)..(31): a, c, t, g, unknown or other
caatattaggttgttaaatcaacatnnnnnngagtagatctaagttcctggtaaagtattttttcaacatactccatacatccgatactggtaaactttaccaataccctggaaaggatacaacacttatccaaggtgtaagtataccttatcactaattatcatgtgagtctaaatcgagtgaactagcaaatcatgggaattaaacttttgaacatataatcatgattatatcccactgtgctgacgacactataatcatgaactaatatatatacacacatatatttacatatgttctggacttaatagattttatacattaaacataatcatgaaataaagcatgtgaacatgcaacataaaagcataaaagcgatttctgaaaagcgatttctgatctttctgatcttttattaattagtaaatctaattatatttaaatgggttttatttagggcacaaaactcaacaggaacaccgccattatccataactaaattgcaagaatttttagttgttgacatcccttctatttacaatgtgctgatgggtcatccgaccttaatgggaatgggggcaataagctcaattaagcatttgtcactaaaattccccattcactctggggtaggaactattagaggttacaaagtgttagctcgggagtgctatagagtaaaatcaaaaaatagaagggccactcatcagttaatgatgattttgacagaagaaaatgagaaagaaatagaagaccttgaccctaggatcgatgaagagaacaacttactcaagctaatcgaggagttggaggaggtgaatttagatccaaataatcccactgtgttaaaattgggcagtgttatggagaagaactaaaatagcaactaattacctttttgaaggcaaaccaagattagttcgcttggagccattcaaacatgatcaggataaacacgaatgttatatgccatcacctcaacattaatccaaaccatccttcaaacgtcaaaaatgacgacctcaagatctcgagagacaaatagcactaaaagaagaggttgataagatattgaccaataacttcatatgagaagcattttaccccttgtggatatctaatctagtagttatcccaaagccaaacagaacatggagatttccactaccaaggattgaccaattggtcgatgcgacaggagaacatgaattaatgactttcatggatgcatattctggatataacctgtcaagatgcatattctagatcaagaacatacgagttttgtaacaaatatgggacttcattgtttaaagtcatgtccttcaggttgaagaatgttggagcaaaataccaatgtctcgtgaatggtatgtttgaaaaccagatagggcaaaacttggagttctacgtcgatgatatattggtaaagtctgtcaaaagcgagaaccatacaaatgttcttttggggtatctttggggaaattcctaggttttattattaatgtaagaggaattgaggccaacctcgataaaataaaagtgttgctcgagatgccttcaccaataaaatcaaaaaaagttcaagcattaactggaagaatggttgcactcaatagattcatcttgaagtcaactgataaatgcctcccattttttaacatcttgtgaggtaataaaaaatttgagaggaatgaggagtgtgagaaggaattcaaagaaataaagaaacatatttctacacacccaattttcgccaaaccaattactagagaaacattgttcctttatttggccatctcagaaagtgccataagcgcaacatgaaagcgagaagaaggtaggaatcaacaacctatctactatgtaagtaaaacattactggggcagaatcaagatacccaccgttcaaaaaacttgcactctgcttgatacatacatctaaaaaactgtgaccttatttttaaacacaccctattaaagtccttagagatcagccattgcaacgagtattgtcaaatcccaatgcatcgagaagattgattaaatggtcgattgaattaggatagtttaaaattacttacaaccgagaaactcaatcaaaggttaggctttagctaagtttttgataaaagaaactaactcaggagaagactctcgaacatgaaataatatggaaaaatggaaaatgtttgttgatggagcttcaaatgagaatgggtcgagggcaagagtaatagtggtgttgccaaaaaacttcaaataatgaggcagaatatgtagccttgttagt

SEQ ID NO: 119855 - DNA, 1572 bp, Cannabis sativa
  modified_base (44)..(45): a, c, t, g, unknown or other
aattatttaaatagctataaatatttttcataattaatcataannaactgctaatttctaaattaaacaaagcgggctttacacactcaatgacatcttctaggaaaaacaaagggtacaaggttcaccaatgacaaagtatcatcttcgtcacgattgtaaagacacacaaagagtcctaagttgcacaattaactataacggactcattatctacccttatatagagtttccaatagaaaccacccataatgcaacatttgtatatgcctccaaggtcgctataacactgtaaatgtggtccaaagagaaaaactggctgcttcttggagccttgaccttggctagcaagggttccacgtcctagaggctggctagatcccaagacctagcttaaaggtttgcaaggaaccctagttccaggcattcgccagccagcctaggggcacagtccccatggctggccagaccccatgaaagccacccattgccgtccaggcttcaaataaagcctccttggccggccagcatgtgcatggatcaaaacatgtgatttttcaataactcaaacatgttctttgtgttcttcgcgactcaaagagccatgaatcacaacaaaggtcaaattgagttctttttcatatataaatcactcattattcattctaaggctaccatacaaatcaaaatactgaatggattacaatctaatgtaagaatcaaatcatattccaaataagaaataatgttcatgcattcatggcaaaatcattcatattaagtaaaagagagggaaaagaaagcttacccgcaactagagtccgatgaagacaaagattagaagcttagatcgttgaaataatgcaaaaatctcaaggagattgaagcctagaggtttggtcacgtagagagaaggagcattttcaagagccaaattctagtgagagaaagtaaaagtgaaaaatgtaagtgagaaaatggtttcccccaaaactcacttatgtacatgtgggccccctttttctcacatacttcaccaactcatcataaaggctcagaaaggagttatttctctattgcaataagatcaaacaatcaagataaattgcttcgacgcacgcactactatttattcagcaaaactaactgtagtcttgacaacattaatcttgttggtaaagtccctatccgtacggacgtctgcatggggacttagggggcaaatgttatcccaattttttttcctcatgatgtgacatgcttatgttgatagatgctatgccacgtggtagtatagctcactaaaaggaaggccaaatcagcatctgagcaaacaaagacactggtactcaaacgaggatcaaatgacagtccaacccactcttaagagctagttcgccacccctagcccataatttatggtaagccaggccaggaaaaaacatcagatccaaccaacctggccaaccaaggattgcactgtaggtcccacaagactctcctacacatgcacaacatgaatgggctgcgaatcgggccctaaaagcccaacagacagactgagaagtattt

SEQ ID NO: 119856 - DNA, 658 bp, Cannabis sativa
aaaaatagagcatcacagtacattattatgtaagctttaagtaaaacatggtagtaatttttgtacactgtaaattctagcaaaattgtgacaaaagaagctagaggctggataaaataaaatattttcatcattgttaccaaaaacaacatgtgtaagataccaataaatatataatgtatatgcactcacccagtatacagtgaaaggtgtagggaaaaaaaattagcaaaacaaataaatcgcactaaaacaacaaaatagaaaagtaaaatattaaagaacccaccctttgaagaacaacaaaaagagattgagagctggagagagaactcaagaaatgaacaataacagtgacatattttgagtattactgctagtccttaaatcggtagtacaaatataaggagtgacaaaaataacttaatatcagaacaagaaatgatcatttagggaaattttatgacttttttattttcaatgctaaagcacacaaaatttataataaaaataacaagaaatcaaatctgtaattgatcttttataccccttcaatacttttaaatttcttttttgaataagataacccataaaaaagagaaataacaaataaatctacctaacattcacatatatacccatcaaagcataaaactta

SEQ ID NO: 119857 - DNA, 5215 bp, Cannabis sativa
  modified_base (47)..(58): a, c, t, g, unknown or other
  modified_base (1430)..(1431): a, c, t, g, unknown or other
cccttatgtgtttatttcattgatttagagaattcatatttaggatnnnnnnnnnnnnacttgttagtaaatctagatcctactaaaatattcccaacagtttcgttatcagatactatcttcactggaattccaaacctgcagacaatgttttggacaaaaaagtcgaggactttcttgcaggttatggaaattaaaggttcagcctcggtccacttagtgaagaaatcgatggccaccactgtgtacatggctcctccttgccctgtgagaagtgccccaatcaggtcaatgccccatatagaaaatgggtaaggggaggccatcattcttagttttgttggttgtatgcgaggtatatgcgagaatctatgagtcttatcacactttttgacaaatttatgggtgtccttgttgatggttggcaagtaatattcctgtctaataatctttattgatagactttgccaacccggatgatccccacaaaagccttcatgaatctcttagatgatctcatttggttctgcgggaagaacacattgaaggagagggatgaatagccttttctatgcaattttccatccactatcgtgtagtgaggcactgaatacaggagtgttcatgcctcgttcttttcagttggaagttgtcagccgagtagatagttaattatggagtcatccaagtaggcgagctatctatcatctcgacatcttcctttttgtatatactcggctcgtttagcatttccaccggaaccaagtttagttcatctaagtcattctacgaggccagttttgctaaggcatcagtgttagagttttgttctattgggatttgctcgattttgaaataatggaacttttctatgttctaccaaacttttgcttgatacttagccattttcaggcccttagcctagtattccccgagaaccagatttactataagttgtgaatcactatcacatatgagattttttaccttcaatgcttcagctatcctcaaaccagcaataagggcttcatactcagcctcgttgtttgatgcatcgaaatggaatatcaaagggtaatgaaaattaaaaccttttggtgaaattaatatcacccctgcacccgagccgtgctcgttggatgcaccatccacgaataacctccaagtattcacgtcttgctaaacaagcattttcctcttgagttattccttctattaggaaatctgccaaagctttgcccttgatggatgttcgttggtgataagttatgtcaaactacccaagttttattaaccattttatcaatcttccaaaagcgtttggttttgataaaacttctcccaagggttgatcagttaacacttaaattgggtgtgcttggaagtatggtcataacttccgagatgcgtggattaggcataaggcaagnntttcaagagggggatatctcgattctacccttagtaaccttttgctgacatagtaaacaggttgctggtggtttccctcttctcacactatttctgcactaatcgcattttttgagacaactaaatagaggagtaatgtctctcaagttactggtttcacaaaaattggaggtgtcaataaatgccttttaatgctcttaaaggcctcctcgtattcctctgtccattcgaatttcttgttgccttgcaatacattgaaaaatggtagacacttatcaattgacttcgaaatgaatctgttaagtgcaacatccaacctattaaggcttggacttgctaggctaggtgggtggtggcatatctatcaaagccttgattttctcaggctttgcttcaatgcccctcgcgttaattatgaatccaaggaactttcctgaggaaactctaaaggaacactttttcaagttaagcttcatattgtacttctttaatctttcaaagcactctgcgaggtctgtagtatgacttccacccattactgatttcaccaacatatcatcgacataaacatccatgttatgcccaatttaatttgcaaacatttcattcactagtcattgacatgttgcccaagcattcttgaacttaaatggcatgaccttataacaataaagtctcatgttggttacgaagcttgtatgttactaatctgggacatgcatttttatctagttatattcagagtatgaatccatgaatgacgtaagctcgtgctcaacagttgcatccaccaactcgtcaatccttggcagtagaaagcaatcattttggcacgccttattcagatcagagaaatcaatacaagttctccaagttccattgcgttttgggacgagaataggattggctatcaacgagggataaaacacctcacgtataaagtcattgaccaataacttatccacttcctatttgagtgccccttgtctctcggaatccaagggcctcctcttctgtctctttgctgggtagtttggatcgacatttaagtgatggcagatagtcttaggttcaaaccctatcatatctccatggctcctggcgaactgatcttggttcgcctttaaaaaacttattagttgcttttcaattattcatccaagttcttcccaatgtagacacactttgcggggtttcctggatctagaacagcctcttcgagctcctcgattggttttaataaatttctttgatcttgaatccaaggatcaagatcttcatccttattctcgccttcttcagtcaagactgccattagctggtgaccagcttttttgtgatgcaactctatgtgatagcattcgcgagccaacatttgatcaccttgcactactcccacacccattagtgtttgaaacttcagggataagtgcttaatcgaactaactgccgcttgtccgattaatgtcggttgacctagcagtatattgtaagctcacgacaggtcgacaaccaaaaagtcttgcattattgtggtggataaaggtgcttcgccaaacgttaatggaagctcgattattgcttggctggcgacactgtcacctgtaaatccgcaaagatttaccatgcaaggtcttaatttagctttttcaagccccatattcttcagtggttccctataaaggatgttcaataaacttccgttgtccaccagcaccctttttactctcttattggcgagctggatgttgattactaatggctcgacgtgaggatatcgcacgtccttttcatcttcctctgaaaatataattggaggttcttcagtctttactttattggaaggttcggcattaaaggcagactgcttaatcttcacttccttcacgtacctcttttgggtactattgctctctcctgcaatatgtggccctcccgagataaccatggtatcctctcctacaataggaggaggttgtaatccttggttgcctgggttattgggtggattgggctatttatgtccattgccctgtcttttcacatatttcttaaattggcctcgcgcaatgagactctctatctcatccttcaactgatgacactcgtctgtcctatgcccgatgtctttgtgatacttgcaatattttgttggatcacttttatgcctcacgtgtctcatgggctcagttctactaaatgcaaccttgtgctcatgcgtgagatagatgttttcccgagtttcattatgcttggtataaacggtgtagatgggcacgtacttgtcatgcttcttttgcttctttttgtgtttagctaaccccttagagtcgtctttcctatttgaaccagaggctcctgggttatcagctttggtcaagacggtactagtcgagacgttgctgggtttgtttcccgagcaactttttaacaagttcatctctttttgagcttcttcctttcgaactaacacatgagccctttcgttgaactcggtcatgtttttcactagacgaccctataaatcatcccatagtttgcctctagcattggagagattagtagtgatccctacccgaagagcagtaagctgagtactgtcatccaaatttctctctctcacagtgaaatttaagtatgccttaagcatctcactatgctgttgttttatgttggtgagtgaggacgcttcaggtcgcctatcccttgcggcttggaactactttttgaactccttagaaaactattcccatgaaatgattgaattataagtaaacttatttaaccagatgcttgctactccaactagtgaagtaggaaacaaagtacagcgtagattgtttgtaacattgctgccttgcattatagtattgaagttatttaaatgcgagattggatcggtggtcccatcgtatgacgagacgtgagggtttttgaatccctgggggaatggattattcatgaagtctggatggaatagctcgagttcctcatctgagtcacatccagactgctttccttgttccttgacttgatacctcctgaacttttcctccaactcatctagtcgtaattggataggatctcttgctttggagttattggcaaagatcaggtttttttaggttcaagtgatcacgtagattcagttggttataattgctagcaaacctcgtccgacccacggactttgtccttactcatgggtcttgtcctgctcatggaccttgtcattgagtaaccttcagttttagtcgtgcctttgctttctcgatcattgttgcgacgagtactttctcctcctcacgtttatcgattacgagttcttgtgtgccttttcacgtctcgtccttctcccttgggtatggtttgttgtgtgccttttgctgggatttgtacgtgccccttcaatgttggtttgagaaggacattcgtgatgcctcgttggtgaccttcgtgtcccaggttgagtcccaagatttccctcattctgatgagggatttcctatgtctttgttttgggtcgccttctgttctcatttctatgagaaggcttggcctgatcattggttgttcattttcaaggagaccctcagtttccccaagttgttcctccagagggttctaagggttctcctgagttgtctcttgtctcctggttcattaaccaagaggtctgcctcgtggtcttctcactctaggatcaggttcattttgtgcattattctcctatgccaccctggttgcgggttcttcacgttccaactcagcattctgtcggttt

SEQ ID NO: 119858 - DNA, 1515 bp, Cannabis sativa
  modified_base (1122)..(1128): a, c, t, g, unknown or other
ttttactattttagaaaatatagagtccattttgtcatttaacaaaatacagagtctaatctgtaacttttgcaaaacacagagtctaaaatggtatttaccctttgtttaattggattcgcttttgaggttctggcaattcttttttgacttcttcataaaatggaggtattttaattatcattgttattattattattttttttttttgaagcaaataagaagaatttattcccgagatggaaaaacaaccggaccatgtctggacctttgtcacaatcttatagatgacattacacaaggcaatcttaaatcctttatagaagtaggacttctatttttaggaataagaaccagatttgtgttgttaaaacctaagggagagaaccagtaacaaagaacttctgtacctcaagcacaatatcatgcccaacaaacccaacttttttttttttttgataaaaacttagactaactagcaaccttgtcagggtacatctagaccaaagcactctgaatttcttcagcactaactggattccaggtaatgtgattgctggaacagcgacttgtggagtttaagtcagagcaacgactggtggagtggatgagatccgagatccaataagtaatcaaatatttcagatcaaaagtgattcttcagatcagagctccgactcgatttgaataaatagatttttttgccatgcataatttcctaccttagacaaacccaaccccataataaaactcccttaacctacacacgaccaccccaccctattgaaccactagcctaacggtcaccccaaaacaacaaagcaccaccactgccctagccccaaacccacgaactcgcaacatccccacccactcccacaaccacacccactctcaagagttaaagataaatcatcaactgagaacaataaagatattggttgaagatcaccacaaaagagccactaaaagttgttgtcaaaagaaagagacgccactaaaaagaaacataaagacttaacaaacagaaagaatgttcgtcatagaagcgtttattgcaaaatattactttaatggtaccctatctgtcataaataaagaataatttgcggtataaatacnnnnnnntaactctcagttgcaaataaatacataaatttaattttttgcggtaataatatctaagttataattcttgaacttctgttagtacctggttcttaagtgttaagtaaataaccttgcaattcttaattggttcaaattattaaatttttattatttttttttttaaaattaatttaaatatactaagaagaaaatgacatatgtataatgacttgaaatttaacgataagatacatacatagttctagaattataactcaggtattattactactaaaaattaaaggataagttgaaatatacctattttttttcagcagttaaccaaaaatagccttattttaaattcaattgaaatgtatcccttttataagtctattaccgatt

SEQ ID NO: 119859 - DNA, 1628 bp, Cannabis sativa
ccaataacaatattgacacatagggtggtgctaggcaccactaatgccctttaacattatatgatacatgagcattgctattaggcatcagtggtgcctagcacctttgcgacatgtcgcgttgcgattggctaaggtatagcattggtccaatcaaatagttacataataaataaacatatacatatgtatatttaacagaaattttggaaatggctgcctcacatcgctatggctgtggtttgagattgagagagagaagaaagaagaatcaaatgtaggtttgagagtgaaaacagaaaaatcgtaaaaaaagaatcgcaaggatggcatttgtttttttgtgagatattatttgaaaataatttatttaaaagttaatcaagaatattctgtaatatagtgaaatattctattaaagttaacagaaaaattaaaaaataacttaaaacaataattatgttacatagttacctttatagaatagatatatatatagtggaggaagtgcacaagcacgtaactcctgttcaaatatttttaaattataatgatatatattacatatatagtgtgaaataagctctttaaaactaaaattattaattatcatatctaaatgtaaatttatatgattttttctattattatttactaataattaaagtttacaaaaaataaaataaaaataataatcaataaaaatttataaagaaataacaacacacacaaaaaaataatattatatttatatatactcatataatcttttacactattatataattactaataaacgaataaaaaaaaaagaaaatttttaaaacataagcaaaaaaaccactattaaaaaaaatgtggaaaagatataaaaaaaatatattttaaaagagaaatagagtaaaaagatgagaatttttattttttgaaaaagggaaaaatgatgttaaaaaaataagaaaataataaaacattaataattagtaagaaacacacaaattcaaacatgataaaaaaaaatacaaattatttagataattttattcaatttgaaaaaatacaaaagagcaagaattataaaaaaaatattacctcaacggcagtaacaagtaacaaaagaacttacaaaattaagtataaccaaacaaaaaaaataaaattccaattaaagtgaataaggatatatacatattaagaatatctgtaatggagagctaaaattaagtgtgatgcatatgcatattttaactcatcttcacaaaagtgaactccaataatagtgtataaagtgctctaaatttagaacatgctaaagttgtgccaaatttgacacaaaatagcacaaatcaaattgtgcaccacaataaatattacttttttatttactcgtttgccactaaataatgtaattaattattttttaaattttatataaagttgtgccaaatttgatacaaaatagcatgaatcaaaatgtacaccacaataaatattacttttatttactcgtttgccacttaataatgtaattaatcatttcttaaattttatatatttaatataatttttatatactttcaataaaaatttaatattttgtcactactacaaaaacaccctttagaggc

SEQ ID NO: 119860 - DNA, 747 bp, Cannabis sativa
taattattttgaaatgtttcattttgtaaatccattggcaagatgctatgacacaaatatgtatgattttttatttttaatcttcatattttttttttttggtatctgtgttttctgcattaatttcattcttatctatcaatcatctatttattgtgctattttaaattatattatggttcaataatacttaattacttataatattaaaatagagttatattttactttaatacaattacttaattggaattttatttgtacttaaattttataaagacgttcaattatattattttttatataaaaaatatttttaatttatattatttttttttctttttaaatttcttctttttcacattcttaaaaactatatttataaaataagataatatagcatattaattttatcatgaaatcaaaacatttatatagatgttatattataataaaaagtattattaggaagatgacagaatatataattatacagataaaatttgtatttggatattgtggattataactacaaacaatgtgagtaattaaattattcaaaatgtacaataactagctatattgagaaataaaaatattcaataactataaaagtgttgttaaaataaaaattacaaaagtgataaggtacctaagtataaatatttagattataaagttttcatataaactaagaaaactatctttcttttttcaataatagtaaaaaaaaaagagtaatttgcg

SEQ ID NO: 119861 - DNA, 1539 bp, Cannabis sativa
ttcgaatcaggtgggtgttttcacaccctttagcttccctttttataaaatgggttaaaaaaagggaagctaaaggcccatattgtagtagtgtacctaagttatgtttttgaaacttctctaagtacctagtcattattcacatagttttcttatttgtataattaaattaatttttaaataaaaaataaaaatttaatgacctgaaccaatcaagaactgccacgtgcctattgatttgacacttaacgagtactaaatacatacgaaagttctaaaaatataactttattattaccgtaaaaaactaaaaattaattatttatctacaaccaaaaattaatttatatataccgatgaattttaatgctaaataatgcaaatttaaaaaattactatttcacacaaaattataaaatttctaattaagtttccaacaataattcaccaagattggacaggtatattgaaattataactaatatattaagtcaagtttgtgaaatctcgttaaagcatctccaatggtagcattctttgaagatgttatatatctatacatcattcaaatatgtaatattttatttcattttttttccacatcatttttagtacctttacttctaaaaatactccaataatataataccttttaaaaataatataattatgatcttgcacattatatgtatatattttttattaaactattatatatatattgcacctttaattttttattgtatagcatcaataccatagtgtggcatcaatacaaatttcaagaataatattcttttatctctaaaggtatagcatccctctaatttatgaccaattttctttaattaaataatatatgaatctgaaagtattatttcacactatatattctttttaattatctttttaacagtatctagttcattaaaattagaatctttagagcatttctaacaacttctctattatatcatttaaagtatattattaaaactctacttttttattttacaatacacttttacattataccatacattatattctttatattttctctatatcattaaattaatattatttttattttctacactattaaaataatattttttgaacacatacaatatacataaataaaatattatttatatatattattaaaataagtttagaaaatttattattcgttagagcaaattgtattagtttgagtgcatctctattatacatatatttatgtatgatataaaaaaagctgatggaggtcctttttttttttatcatatttaactaatttttttttttaaagaataatctttattataaagagactgttgtgagtgcatccccaatggttagcatcttttaaaaatttacacatcatttaaaaatataatattttattttatctctcttccacaccattttttacactcttagagcatctccaatgacacattaaatttggtgttacactatcactaaatttggtgtcaaaaagtattttcactccaaccacaacactaaaattta

SEQ ID NO: 119862 - DNA, 1063 bp, Cannabis sativa
tagaatcatatgtgtaacaattgcaaatgttaaaaaggtttcactgcaaataactctaaatttttcttattgatttgagcaaataatagatttaaaattgagaaagttctcatataaaggctatctagtagtacttaagaggagaaaaactacagatgaatacagcttagtatgtaagagttgtcatttcctaccgttgcacataagaaaaatggaattaaaccattggcaacatcggttgatatcgcctcacttagtgcagcgggagagatggcgtaattagtagaagaatctgttcttagaagcctgcaattctctggatgaatacccccaatctgtattttaaaccataatagtcacatttaatttaaacaagcattatcaacacaaacacctctctaagtttcaaagacttaaaaagttcagcctagaaagagtgctgcatagattaaacaaacacttccaccaaacatgttcaaggaaaatagacaaatttccatatcagaagaacatgtagcaatatgcttagctaagacattggaaatcttaaacacatgagattgatatagaagatacctgacaagccttttgcaaagctgaatgagtctgatcagaagcataaacaacaagtttcccaagagcatttttaccaaacttgcccaaaaacttatcgcgagcagccaatagtacaactagaacagcttcacttgctgtgccctgaatgactccaccaccttgtcctgtataaaaaaggaaattccaatcaaaatttcatgaactaatcacacttcctcagaaaactaaactcagctataaacaagttctagatattgatcaatctaaacaaactaaggctgcgtttggtttggttagaagtaatgaaatggaaaggaattaagcttgatttcattcttttgttcggttgcattgtaaaatactcgaatatcattctaacagtcggtaggaataggaatgaaatataacgaaataaaataaaaaaatgcatcaaaagaattgataaaagaaaaattataactttttttttttttgtaaataccatttt

SEQ ID NO: 119863 - DNA, 1128 bp, Cannabis sativa
caaagttcaggagaaaaaaattcttaattagccttattataattattaaattagaaggttttttaatatgttatatcgtgatttttgagttgtcgtgcttttcgaacttgtcgcctgtcatgttttttgggctagtctattcatgtttatgtgtcgtatattttgtgtttctcgtgtcgtgcttaaggatatatttttcgtgtcgtatcatgccaattcgtagcaacgtgcctagcgtgcccaagtccgtattttttgtgcctattcgtgctcgtgcttgtttcgtgctatatgaaaaagctcgctcgtactttcaacactaatttaccccatctgtctctgaaattgacacgatcgaactcaatgttcttctttgatccaaaaactctcgtggtcttcatcatcatcatccacaggcatagcactcaagatccgcttatggatgaatttcagtgtgtacaaagtgattctatagccatttgcttgtgaaaaaaaaaagatgaagggtttctcttgatcttgggctgatattctgataaaggtaccaggaccaccatcactcgctgttttctgcagctcattttctttaatttgctgctacagaatattatgaatacgatcataagttcaatacaataatatatctcgctgtggatggatgatgcttcaaggtgtaaagaagttttctgctaggaaaggaaggagaaagtcctcgaaaatatgatgtaaaaactaaaaactcatcataatctttacctacgttttctttatagaacttatcaagatatctagcctttactttaatggctattaattagtattatttgatcatctctgtataaatacggtgtattgctattttttagaatattttgctaaaatttaactttatggtgatataaaatgtgtgctaaatttggctcaagctaaaaattgtgccaaatttaacaaaaaacgatagcatgtgacaaattttaactcacaataaatactatatatttttttaattatatctttttcacttattaatacaattcattaactttgaataagatatatttatgagttaaaaaaaaaaagaataaaatatatttataagatattatttaaaagggtaaatactatttt

SEQ ID NO: 119864 - DNA, 2259 bp, Cannabis sativa
caaacataaaactgccatatttttcataaaaagttttaaaaacccatatcatgtgtaatttcctcttgtgagattgggtgtaattttctctatgtataagcactaacaaaaatctagatggagattatttagaatcattaggaattaatacctataaaatgcaacatatatatactatctctgtgtcctataaaatgcaacatatatatacttataaaatgcaaattattatccttttacttacatcatgaataacactaagacagtaaataattttattgaaaaagtaaacaccacattattagtttatcattccagtttattggcattacttcgttgacagttcataagtgataggaataaacttgaagaatattttttctttgaagggttgtaacaaaagtctcactcatgtccaaatcttcatatttcattccattagaaagcatccaatcaaaatgatgtagcaacaatgcaagacaaagctcaacattgaagaacaatacaaaattacattgtacagagaatatttcatgaattttttacctggatttacatcagtccaagaggtgaaaatcatagctctcttcggaggacgacaacgacattttacagtcacttaagccattttcttcccttcttctcttcttcgtccttttcgtctttctcttttgctgaacttcgtctccttcctctttctcttcttcttcgtctcctgatcttcctcccctctttctcttgtttttcatgtgctctttctcttcttcttcgtcttcttcttcatctactctttctcttcgtctttgtctcctttctatgttaattttgttttccaaatgtctattgcaaatattagggttttgtttatattttaaagtttttatttttattttaattactcattttaatttttattttagaaaatatggccacgtagataattttttagtgacctatcattgccacgtaggtaaaattaggacttaacttggctggacagacgacaccttaaaaatgtaaacggaatagtactttagagagttttcccactaaaatatgaggttggataattttttgcaagtgaattgatagttgggagagttttgccaccaattactctattttctatgtaaaggtaaaaatatatttctaacccgtaacaaaatgtatactaaaagataaataatttttttcttcacgtgtaattaattgataaaatgtatataaacttgtaaattttttatcacagtttatatgtgttagtaatatttaggctaattaggatttttaatccctaaactttgacatgtaccaaatcatgtccctaacttttcaggctgttaaaaaattcccctgaactattgaaattattagatttaaggacttctgtcaaattttattcaattttactaatatgatgattgtccatatactaaacactctcctttaaactttgatatctattaaatcatgccctcaatctttcaaaagtacaaaattgtgctctttaaattttcatccacatcagattttgtttagtaaaagtagaaaaaaatccttaaatctaacattctcaataattcgagaggaatgtttaacgatttgaaaagttcaagaagcattattttgtacatatcaaaattcagggtgtaaaaatttaaattaacctaatatttattttgttttgaaaatatttttgcattatttttctgaagaaaagagagacacctgtcttttacagttctggatagacaaggaacaatcaatcccattaattacataattttttaaaggaataaattttccttgtacgacgaataagaatgattggtgtgacttggcaagaagaatgaggtgcttcacttgttgttcttctccctcttcaatatcccttttcccttcttcctattctctctctttattttccaatccaagcttccctgcttctgcttctggtatagtatttctctctctctctctctctctctctctctctctctcgttacaatctaggtcctagtttgtatataattcatcttttatttggataaagtttaaatccttgtgactgatcatttatctatatatgctccatttttaaatttttgacatttaggattactaatctatatttgtatttatgtaaagttttgggctttctgtttttgtttcgaagtgacaaagaaaaagtatccagttttacgtgcccaatatctcgattacaagagtactgagccaaaattaatcgattcgatggag

SEQ ID NO: 119865 - DNA, 703 bp, Cannabis sativa
agctcctatttgattaacgaaaatctgcgttaacaatagttaataaaaatattctacaaatttaaaaaataattaatattgtaaaaaataagattcaaacagtacattacatgcgtgttttattatatgcatgtgaaataggttgtttgaactcatctttttatattgtaaattattttaaatttcttcaaaatttagtaggatgttctaagtaacctatataatatacaccatcatataaacaaaattaaaattataactattcaggtattaaaaacacaatagtgatgcaatgatacacctatattttagggtgtatcgtaaaaccatccaaaagtatatatatttgaaaaaaaattatagtacatctaaaaggtcgtttttatatatctcttatctattttggtgttcaggagatcattttagtcattgtttcatacataattatgtatgttgtagttttttatgaatattagtaaattttttaaaaaattctaaataatttacagtgctgaaataaaagttcaagcagtttttaccacgcttataagaaaaaaaaaagtcgcgagtgcaacaaaatatctaagaccatctccaatgcaaggtctaaatatttagggtgcataaatcgatccaatccaatgagaactgaccgatccaattacaactgactgccaatcattgaatatctaattgtgatcgg

SEQ ID NO: 119866 - DNA, 2733 bp, Cannabis sativa
  modified_base (2666)..(2684): a, c, t, g, unknown or other
acaattctttcgagttaattctgtgaagggcgtagaaatcttagcaaacctttccacaaatcttctgtagtatcctgctaatcccaggaaacttctaaccttggtagtagacttaggttgaggccaatcccaaaccgccttaatcttcaccgggtccaccaaaataccatctttgttcaccacatgccctaagaagcttacttagggcagccataactcacatttcttaaacttagcatagagttcatgctcctgaagacgttgtaacaccatctaaagatgtttgtcttgtgcttcttctgaattagagaagatcaaaatgtcatcaatgaagacaattacaaaatcatctagaaagtattttaacactcggttcatcagatccataaatgccaccagagcattagttaatccaaagtacatcaccaggaattcatagtgcccataccgggtacaaaaagatgtcttgggaatgtcctcctcttgaatcctcaactggtgataaccagattgaagatcgatctttgagaagatggtcttccctgtagttgatcaaacagattgtctatccttagcaaaggatacttgttcttcactgttaacgtattcaactcttggtagtaaatacacatccttagtgttctgtccttcttctttacaaataaatccggtactcctcaaggcaaggtacttggcctagtaaactgcaaatccaacataccttgtaactgaacctttaattcttttaatgttataggtgtcatcagatacaaagccttagatataggttctgcccccggtatcaattcgatctcaaagtcaatctcttactttggtggtcactctagtagctcctctagaaagacatccaaaaactctcgtaccaatagaacatgttcaggtcctattggtacttccctcgtggtatccaccaactagctaaatagccaacacatccatcccataataaatctcttgccttaagcgtcgagattattggaattcaggatccttgaacccttcccataaaaacaaatgggtcctcaccttcagattcaaaagttaccatctttctcttataataaatggttgcgctatactttgctaactagtccattcccagtataacatcaaaatcttctaaatataattcaattaaatctactgacagttctctaccttctacatgcacgggaagggacctaacccacctactggagataacaaattctcttgtaggcagtaaggtaccaaaaccacccggtaaaacatcactaggcttgtttagttttccaatcactttactcgacacataggaatgtgtagcaccagaatcttaaagtagtcaacataataccatcaatagaaatttgacttgacacggtagaaggaccagcactagcttctacttgagtcggagcaaatacctgagcaagaactagagtatcatctttcttttgttctaatctttgcaactatggataacttctcttcagatggcctactaccccacactgaagtaggcttgagcttaacatttaccctgatggcatctcttgcaccttgggcacttaggataggttctctagttttcattatcacctcggtgaaaaccctgattactttggaaattcttattaggacccgtagctggtggtcattaggcctcttcttacaattattagggttatcactcctaccaaaactaacattgggcgattgtttccatgaatctcttctcatattattcctctttcggatttgatcttctgctccctcaacagctagggctaactcaaccacctgagcataagttcaaacaaccctcagttgcttagcagcaacaattatatcctaagaaatatgctcttccaacccttaaatgaacttggcctttagcagcctcagtggccacttcattagaggcaaactttgccaaccagccaaatttggtggcatactctgtcactgtcatactgccctgagttagccatatgaactcttcagccttagcagcacggatagattcgttgtaatactttttgtagaacaaggtccaaaaggcatcgcatatcatggtattcagatcatgacctttacacacaatttcccaccaaatgcaggcatcttctcgcatcatgaaaataacacacccaacctgatcattaccctcaactcgtataaaattaaagatggtcgatatcatactcatccactactctagcttaagtgggttagcaccaccttcaaacactggtgcattctacttcctgaattgctcatataatagctccaaatgatttctcacatcctgtagcactaccaaaggtgccgaaggatcaggattaggatcaggagcaggccgagcttgctgctttctcaattctctaatctgattaccttgctgtcggatggtctcttgcattacagcacacatttgttcacatcctagaaagctcgcgattaatcctaccgaatcacctcgggtgcataatctaatacacttgcgaccataaatttttgacatttagaatcctccaaaccaaaaccaatactaataagcatttccatacgtacacatacataacacctattgcctataacctatcatgcttttctaatagctcatgccttcaggtaagcagatgttgggaatattttaccannnnnnnnnnnnnnnnnnnagtatgttgaattaacatcctaaacatgaatatctctaaaataataaaa

SEQ ID NO: 119867 - DNA, 1508 bp, Cannabis sativa
cgatcttacttatcactttattacttgtttgactgcgtatacttgcgtatataattttcacaacaagttttttcatttatagtacatgctatattatgcaagttgttatttattcagatcacacttagacttagaagtctcgcttacacctgctactttcatttttactttaagaaaagttccaaagtattcgactttatgttgtttaggaccagcttataatcgaactcctttctttttgcaattttttttttttatttttttctaggtattaacaattaagcctagttttattaacatatacctctaggtaaaatctagtttttgtatatttatatgcccctcaagtaattttaaagagactaagactttatgattacttgaaatatgcaattttattaaaataaagaactttttacaaagataaacttaatacaatagaatatgctattggtaatatggccttagatgttcgctactccaatagtttcttattagcgagccattgagccatgctaacttataaactcatgttccaacgacaacttcaatgatatacggaccttcccaattcgggttaaatactcatgttgttggatctcgtgtattgtcaagcacatatcttaacgccaaatcacctactttaaatctttttcaaactattttgttaaaatatattgtgatgcggtgttgataagcaacatttgtgacttgtgactcagtgcgtgcttttcttcgagtagatctaaggacatattgagaagttcttggttttgttttttatcatagaattcacgcttgtgtgttacgatgtccactttcactaacaacattgcttccaagccaaataccagtgaaaatggagtatgtaccattgctattttttttgttgttctgtgggcccagagcacctgtggtactcgtcaacccatcttcctttagttttgtctaacttcttttttacaatgtccttcaaggttttattaacaacctcaacttgtccattggactgtgatcttgatagttttaataattttattctttttatagaactcagtgaataaatctctatcaaactgaataccgttatcgaacactattttaatggaaattctgaacctgcaaataatgttcttaattacaaaatcaagaatttttttgcatgtgatggacaccaaaagtttgacttttgtccactttttaaagaagtcgattgcgactatagcatattttgcaccacctctccttgttggtaaggatccaatcgggtcaattccccatattgaagataggcatggtgaggtcatcattcttagagttcgtttggcacagcttttagaaaagttaaaagctgctttttgaaaaagctgtgataaaaatgtgtttgataatcagtcaaaaaatagtttttttaagaatttttggagatgctacagctaaaagctaaagctgctccaacccaacttttaagaaaagctattttaattgaaagactataataaattttt

SEQ ID NO: 119868 - DNA, 1805 bp, Cannabis sativa
aaagaggcagctaaccgacttatttacaagagcagggtgtcgtgagacaacatagttgtttgaattatgtggaagccaaggatcattaagaatggagacattttccccgttagctattgtcctttgagcacaggcgcggataagatctttagcttcaagaatactacgccaaatgaaactagaattgtcttctaatacagcagaaaacagattaccagtagcataatatttagccttataaagcctactaaccaaagaatcagcattaaccaacaaacaccaatactacttccccaaatgattaactactattaaacttcaccaaacttatcaaataataaaaatttaatgtcaaattacaattttcaatttgatcacttccttcttttattattattattattattattattattattatttctcgtttgggccacattacaatatctcttaacttttccctttaagtaattagataatagtgcatgcatatatagaaagcaaagtccaagcatctcactctctctcacgagtcaggtcttcacggctttttatatattagctcattagtttatttattattattattataatttctgtgtctccaaaaatggcagaagaagaagagcaacagagtgtgcagagagagaagttattgaagaaggaatattactaccctgattgccctggttgtaaggttgatcagtacaaagcttcacagagagcctttccttttcgtgatgttttcaatatttggatcattgtcgttactagttgtgagtctctctctttctttctcctatcttctttttctttttctttctcatcttattgcctttcattaattttcccttaacattcacccctattaattttttcttaatttctttattcacttttgaagttttctttttcttttttaatttcgaattaccatctttcataaaataaaatatatataaaaaaaaaaatcaaagtacgttttctaattaaactagtattttttttaatattaattattactaaataagaaagaaagttgatttaacttaaaattaaaggtaagcattttcttttccattcgttattcagcgtttgattccatttccaaatcagtactttttaatatacacatgcattaaaattatttcttattcatagatatgtttctacgtcattaattttatttttcgttttgatcagctctgccaatatcatccctttttcctttcctctatttcatggtgagtttccaattagtataattgtccatttatatttcaatttatcattatacatttgttattttgtattttattatatatacattgtataattccaacatggtaaatagaagaaagcaaatatgattctataaaaagctatactgatcaatccatgaaaaaactatactatttctatgactttttttgtttcatttgtaaatagcttcatatataataattataataaaaaatggttgtatttttataacaataaggtacagttaaaattgtaaacatgaatggttcaaataataataaaaaataattgtagatatgaaatttaaaatgcacatcacaattcatttcacatggcacaacacaacgttctgaaaagattacattcagctgtgggcattttatacctcagccataagattccctgtgtcgatagaaaacgtgggaccatatatagattgggaaatttgacattttatgcttaaaaatgtgtaatggtgttaaattataccatcatcctaagaatttggtaactatgccaatcttttaatggtaaccccaaaa

SEQ ID NO: 119869 - DNA, 1778 bp, Cannabis sativa
  modified_base (1353)..(1354): a, c, t, g, unknown or other
  modified_base (1613)..(1620): a, c, t, g, unknown or other
cgatctcgggacatctggggtttttattttgtagtcgctgtgcgacctgtcttttgtatttggaatattttgtaaaaagtttaacaatggaatcccgacaattgtaaatatttatataaagtttataaggtttcatagttaattttaaaagttttaatttgacacaatttttaagaaaattctttgatttgcaaagatagcacatcgattgaaaaatcactgtagcgtgccttagtattagggcgttacacttggcgttcacctctgccttggttccatcaaaaccttttcttctgtctcgaattgccagatatcggggtagtcttccttttttgattagtggtagaatcaacactattcctaccatatccagaagttggaagagtgagggttccaccaaaacttggaatctgtcgaggctctagaagaaattttactgcaccttcggctcgcggagccttgtcaaacaactcggcataagtcagtgtttcattggtagtaattaccagatcatgtttaatcttttcattaagacctgccagatacttctctttcttactaaagtcttcgacactatacccaaagctagcttggctggacgatcgaacttcgttgtatactccgttactgacatgccttttccttgaactagatcagtgaactcttttcgctttgcactgcgtactgcttcgtgataatactaagcattgagcagttcttgaaactcctcccaggtcatggtagtgatgtctctggtgagggacactaattcccaccacacgagcgtgtcctcttggaactaaaatgtggcgcaagtcactcggccatttccgatgattcccatgaaattaagaattctttctataatagtgagccactactcagccttcataacatctgggcctcccaagaagattggaagcgcgtgcttgagaaatctctcatgctgtggctccatacagttgccagcaacaagttgttcttctggcatcgcttgaaccatagcagtcggtgctttactatggaggaacaataggaagaccatgctgcctcagccttagaatctcttcgtcttgctggagaatttgagcttgcatttctacaaacctttgctcccaattcggaagagcttgaggtggattttcatgtctagcaccctgaaaccttccacgaccattgctgggcccacggggatttggaggattttaacctccccaaccgcctctagtctcgaccatgttaccttgacccctcatatttcgctgggcgtccatttaatacgacttagcctgcgaacccataagtcaggtaggtcagaaaatgatcacatatatgttggaatatattttaccnngatctagatttattaacaagtatgtttttaacatcctaaacatgaacttataaaaccatataaagtaaacatgtaaaaggtatgagaaacattacattggtgacagcggaattaaatgactccttctgctgagatctctaacccttgtatccattatgttgcagagtatcaccaagatctgagcccgaaactccttctttgtgtttggattcttcacagtcttacacactatgattggggacttacttgatatgtgtgnnnnnnnnctcaatcactaaggcttgaaattttttgtgaagagaggctatagtatttcgaaatagaagaagaagaaggaaggaagatgtctcatgaacctagagagaaaactaggtttttagcttaagaggcattaattggttaatgagaccatagccttcctttt

SEQ ID NO: 119870 - DNA, 1768 bp, Cannabis sativa
cactcgcacacactccctccactcacacacactctcccacatgcacacacgactcacatgtgagccccccactcacacacactccctccactcgcacatactctctcccatagctcacatgtgcacccctcgtgggttcacacatgagcccccatgcactgacactcccccgaacatgacgtctatccctacgtatagcctctccttctttcacccccagggtcgaacgaagctccatcacttgcataaaaattccacggctcacccaaatgccccccagctcacccaaacaacccatgggttctcacaacacccaatggggtcacacaatagccagggggccgcacaacagtccaccagctcacatgggagccgtcagctcgcatactaagctgtcacaatttggcagtgttagtattttagccataacattctcgatatatatatatatatcaaaattggacgattcaagatgcacttgaaagataagaaagagatcttcgaatcttatgtttttggtaagatcaaattctgaacatatcattacgaaaatcatccaataattgtaacctagtaagttggtcttactaactctactcgtgagttgttacagggttgacctctgagttgcacggatgtaccccaagacttgtaagcatgaatttccaagatcagtgatgcttaggctatatgcattgactcattcattctatgactggctcttacagtttatgtctctcgactgccggggatgattgttgactaatctcaaaaatagttgatttttggggttaacacttgccccctaatctacaagaattcttttaagtgttcctgtagactgaattagttgagggatcttccttgccgaggcatgagagaccttcttagttttctctgagacagtgccccctttgtatgggaggcttcccttggttaaacttaacttcgcgccaataagtcaagcaacaattttacttggccttggctaaatgactctaaaggtggctctttcatccaataacttttgtaactggtgttcatcgagtgactctagggaccattctttggccaaacccttcataattggcattggccacgcggctctaaggtcactctttggccaagccatctttgtaatcggcgttggccgagcgacaccggggtcactctttggccaagacatcttcataactggcattggccgagcaactctgggggtcactctttggccaagccatcttcgtaatcggcattggctgagcgaatctggggtcactctttgtcgaagcattcttcgtaatcagcgttcaccgagcaactttgggggtcactccttggccaagccattttttgctacggtaggcacacatatactttgggggtgttttggctctttgagcagtctccctctaatggtaaatccatccttttccttggataagagggagcttataacacttgaacgcgctaccctcttgattgaaaaatgtttgcttactcctgagaggcatccttcttatttcaccgttatgccatgagtgtctttcaagacctcttacgggtaagtaatttttgttgggagaagtaggagcatttctcttatcgatcaatggtagctattccttgtcaatttgaaaaaatatacccctttctctttttttggtgcccccaagtgtccaacgtcatccatcttgactcggaggcccacctgagtgccttctttgatttattgcagcacactaaaagtgtaatgccctgaccctca

SEQ ID NO: 119871 - DNA, 2502 bp, Cannabis sativa
ccagcctatataatcaaacttccaataggtagaactagaatttaccaagtaaatactctaacttattaattctcccttgcgccactattgattcacaattacactcttaattatatagaaccattttcaatcattgggtatctaaactccgcgctcaacaatcttttgcttacataatatactagaagttgtaccttttcttcttctcgcactaaagtggcacttatggcatgatctgacactaccagatacaaaaacaatggctctccctgaattggtttggacaatattggagctttggtcaaatattctttaagtttttggaaggcatcttcacactcaactgtccattcaaacttgttatttccacggagaacattaaagaatggaatgcatttgtctgttgatttaaaaacaaatctactaagtgatgtaattcttccagttaaactttgaacatctttgtgattctgtggtgaaggcatatctagaagagctttaatcttctttggattcgcttcgattcctctggtactgacaataaaacccaaaaaatttcatgagaaaactataaacgtgcacttcttcgggttcagtttcattctatatttttggatgatagagaaagcttcctctaaatcttcattgtggctcatggatgtctttgactttaccaacatatcctcgacgtatacttccatatttttccctggaacatctttgaacctttgagcatcttgttgacaaggcattgataaagggctctagtattttttaacccaaatggtatgaccatgtagaaataaatgcctttatcagtttagaagatagtgtgttcctggttaatcatgtgcattttgatcaaattatagccagtgtgtgaatccataaatcttagaagttcataacctaaaagcatcaaccattttatctatcacaaaagtgggaagcagccttttgggcaagccttatttagatatatgaattatgcacaatctccaagttctattaagcattaggaccaacattggattactggatataaagctttttggagaaactctatattagtcagcttgtctacttccatcttcactacttccgctcaaactagatctaatggtcttctcttctgacaaactagttccactgcatgatttgtgtttggagcccgacgaatcacgtgaaggctaattccagtcatgtcagaatgactccaggctagcacatcactgtctttttactgttgatgaggatgatcttttctctaccagccggaggtagattctttcccactttaacgactttgatgggatcttcgtcattgatgtatactttttcaatctgctccatttgttcaattattctttccacgcctacacgtggatctacatcttcttcctgaaccacccccaatgctggtttggtggatgttccaggttcttcatggtttctttctcgaaccatcaaaatagttttggtcgagacattataacagcttcttgtatttttttttatttcctttgattgttctaatgcttttagtatcacttgagaacttcaaacataagtgatgaacagacgttacaactctaaagtcaactaagataggtcatcttaggatgacattgtaggctgttgagcaatccactaccaaaaaattacaatattgaaaactgacaccgtgttgcttctaggaacaactccgttcaatgtaactgaaagttgtatttttctcattggttggagtgtgtctccattgaagccttggagctaaatcgaataagatgttaggtttgtttctaccagacctatggctttaaaagtttctttgaagagaatgttgactaagcttcagttatttacgggaaatctagacattctcttgtttgcaatttgggctgctatctctaatggatcgttatgtggaaaacttacatgctcagcattgtcctctacgaatgttactggaaaattcatcatttgaggacgctatgtaggtgattgtactagattactgttaggctatttttagcctatattttggatcaactttatgtttgcttttcgttgttttaggacagaattatgcttgttttctatgttttcaggttcttcggagcaatggaggcctcgggttgcaaaaagtgcaataaaagatgagcggagccaagaaaaacgccaattttaggcttaatgcacttttggccgcggccataactcgaagacagaggacacaatttttgaagcccaagtcgccgcggcgagatacaccctcgccgcgaccataaagtcagaacagaagtacggttttcagaagcttatctggtcgcggcgaggaacattgtggccgcggcgagagtccgtacggtcaggggcaaatttgtctgacgagccctaaaaatcagatataaatagaaaactgcgattggaaatcaggggaagcgatttggaaccctaaaacacagcagaaagcgacaagaagagcagagaaaatcaaag

SEQ ID NO: 119872 - DNA, 1372 bp, Cannabis sativa
taactaattctccatgcttgtaattgttggctatataatgccaattactattaccgatcataataagattgctctttgttatcaatcttgtctttcattatctttctctctcttttactctcttttcctctttctcttcgtttctggtttctctgttctacttgttctctgttcttgagtgttcatcaatggcgaagagattcaacaccatcacatatgtttattgatatatttttctatttttttttcttagtttttttttatttatttgtagtgggtgaggagctttagctggactatggcagtgaagagctcaagcggtgactaaggtatatattttctttttatttatttttttatagataattatattcttcatatatacccattatacacctatgtttattttttagtttcagtatatatatatatatatatatatatgtcttttattacttaattacatatttttgtttgtttatgatttgttttgtttttaattttggccgtgggtgtttttaggggtggtgtggtgatgttggttgtggatttaattttagtagtgggtctctcttggcagtgggtttctctttattggtatgttgagaaactattaaaatttaatttgtaaatgctgttaaatttgaatgtgtactgttcatgtatagtacatgtatattagtgttagcccaaattttagtagatattaaataaaaaagagatcacaaattaattttaaatttcatttttaacttaataagaaagtttaaatgttaaatattgaattttaactggagatcatgactatcttggaattagagacggtattgggaatgctatgcattcaaacacaattttcctcttcttattccctcttagcaaagaatcttgtatgtgtattttttatgaagggatacactaatatatattttactaagaataaaagtgttttggtactttatatcaattatttggtctccctttccatgcaatagatgccacaaatgcagcaacagatgctacagatgcaccagatgcatttgatgcagcagattgtacatatttagtatgtgtcacatttgcaccaaatgccttctatgcagcaaacaccacatatgcagtagatgcatttgatgccatcggtgtctcatatgcagcagtcatcaccaatgacatcagtgcagcaaattccacacatacagcagtcgtactacccacaaatgtcagaagtgtcgcagcaaccttactatccacaaatatcgtatatattccaatacaacagtctggagagaatggcgatgatgatgatgatgaggacgaggagtatttacaaggcaccgtttgactgatatacttaagaaattcatatccg

SEQ ID NO: 119873 - DNA, 4035 bp, Cannabis sativa
  modified_base (1407)..(1409): a, c, t, g, unknown or other
  modified_base (3974)..(3997): a, c, t, g, unknown or other
gctcttccgatctttagtcacaattttttcacttttaatcaaaagttttaatgtgacttaaagtaagatttttttgtagtgactaacgtaatttttaaagttaagatcatttcgcatgtcaaccctattatctaaatgagtttacttttcatacacacgtggacagggctatttcattaattataaagagaatactaaaagtagaaattaaacgggaattaatattttagaggttttttcaccacatactgaaattttcaacttttttactattttattgtgggacaaattttttttcaaaaatactatgtactatgttaagtattcactgttgttccacaattggttttttagttgtttgttgttttaattgttctattttgttgttttacagttttttttgtaaaaagacagtatttttgtaaaaaaaaattgtgtgacagtaaaattataaacttttttctcaaaattcagtattattgtaaaaatcctaatattttaagtgttcataaatttacgacatttttttaatttatttgggctatggacattttacaatatttattttttttatgttttattttgccacatttttgtaatatctttttgtattcccaaataatccagaattcttttgccttcgagtgatgctagaattcaatttcctttgacattctgccatcgcttgaacaggctcttcctctccaaaccatctgccattggcatagtcagagatttgagggagccaaatcctgagtgactcatgcaacgaatcgattcgactcactaagtaactcaatttggctatcgaatcacaacagaaaagattcaacacttttttcgaattaaggcaatttaaataagaaaatggtggatctggcgaacacgccacttggccaaatgctattggacaagatcaatcctactatgatggactcggcacgccgctcgtcgaagaagcttgtcttaagaatggcatcaacttcgttcaaatgcttagtcccttttggagcttcaacaacatcaacagtaaagccttttcttttgttaatgtgtatatttgtatttgtgtatgtacacatatgcatttttatggtttggaagaagaaatttgatggtttgacttcgatttattgtagtacctgtatagacagctagtaatcaatcttataggttttagaaatcaaggcacaataattttatgctttaaatattgagcaaatgaatttggacgtatgtactacatgtattaatttccccattgttaacctcaaatttggccaaccgacagtggagtcgtatttaatactgatgcttgccatgtgttacacaataagaataataaagtaaaatagacactagatattatagaagtttagcctcctgagttagcgggtaatgacctannncccttttggttgtattgataccagagataatatcacttagatcacaatagtagtgggatctaaagaggctctcctaagattacaatgtgagaaccaaagttagaaaatctcaagtgagagacagagagagccttaggcatgcagaaaagagagggagagggagagttaaggtttcacacttagagcttaagaggttttagggcgctagagacttagtccatcagggttagactaatgctctttatatagtagatcttacatgaagattagccactaatatcccttaaaaataggaagataaagccttatttacataatgaaataataaataataaacaggataattatccctcgaaaataaggaagttgctaatatttttctcctatttttgtgggttgttaaggtcaaaactaccacttagcttaatgtccacagatgaaggctacacaccaaaggcttgctaggaaaaggctggccggccatgttcctgctagggtctagctggccatgttcctgccagggtctggatggccatgtgcctgctagggtctgcaaattgcacatcaagtgcctgccagcctagaggctatacatcgagtgcctgccaaccctaacaagtgttggtcagcctttgtaggtgatggccaacctttgtaggtgatggccaacttttttaggtgatggccaacctttgtaggggatgaccagcctttgtaggtattggctagcctttgaaagtgatggccaccttttgtagatgatggccagcctttgtacaactttctttgcaaaggtcaagcttccttgttcgaacgagccctctcttggtctaataatcaccttttaggaatctaacttgtgctcaaactctggctggccacacaagctcttcctggccgacttatgtactccctttgcctggctagacatgcttgtgcagcttcttgacagcttgctaagctgctcttgcttgttacttgaaagttctgtgatgccttgtaaatagacttggtcttgttgttgataatgttgtattccacgtgtcctcagtcttggattatgttgacatgccatgtcaggtacacaaattttgaaataacattttcttcccaagtccctattcaaacatctggtcggatagggaattcctcattctcatctttcttgtagtagcctttgttgagcaaccttgtcaagccaagtattggctttttgcatggcatgtttttagatattctctctccataaattcctcatcttcaattgtttgaaatctcttctttgaaccttccattcataagtttcaagcttttagaaactttttgattctcacattagattgtaatctttttggtattttgatctgcatgatagttttagaatgcataatgtatgatttcttgatgaataagatttgattttggccttcgttgtgtttcttgactctttgagtcatgaagaacaagtttgagttttgaaaaacacacaatttgatccaaaactaaccttggccggccctagggggtcttatttgagacctggctgaccttaggatttaatcatgggagttagccaactctatggtttcaccctaagaagctagctacttcatgcccaagtttggtgatcctgggcagttcttggctgagtcatgagaccttggccgaccctctcaaagcttgggaaccctgggtgatctatgccttggttccatggaagtggctagttttatgtccttttttgacctcaacaagaatcttgtcatggccttgtaggcatatacaaccttagtatcataccgggtttccttagaaactctatatgaaaatcaatggtgagtctattatagtcgaatgctcaacttaagactcaacatttgtccaagttattactcttgagactgtactttgctgatacttagccttgtacaatgaaattatctggaaagtacccttgggtaatgttgcccagagttttgtctatggctaggaccctggaaggaacaatgctttttggcttggaacgtactaccaagtacatggttccttaggaactttgtccagtttttctctggctatacaattcttacagggcgttggccttatgcatttgaatcgattttttattcatattcggtcttaaggctttcatgttcttgcttttggcctataggagctctatttttgaacactattattgtttagccttaaagccttttattatggacatatgatcatcctggctatcttcttattgccttgacatgtaagtatctgaatttacttttctttatgtgaagcttaagtgtacatgcacttgacttagaggcaggtttactagcttatgctaagcgttaaaatttctctgcataagttattcgtgctagtttgatgcattgccagccagctttggcaagtgttggctagcctttataggtgatggccaacctttgtaggtgatgaccaacctttgtacaactttctcagcaaagatcaagcttccttagtcgaatggacacttttgttggaattattttaccaagatcttagatttactaacaagtnnnnnnnnnnnnnnnnnnnnnnnnaacttctaaaacgatattaaataaacacatataaagta

SEQ ID NO: 119874 - DNA, 756 bp, Cannabis sativa
  modified_base (686)..(693): a, c, t, g, unknown or other
  modified_base (722)..(727): a, c, t, g, unknown or other
agtattaaactagtttataaaatcacacacgtggcgtccctatagattagggcgttacgcacattgttcgcgacgccatttgattttattttttgaataaaacaaattgcaatagatgtttgtcttgatgagatgtttctggacatcttgcgacaccatttggcaacataagttctagattgataagctataggacttttggttgtttgttgttgtttttcacgatatattgcaatattatttgcaacgtctcacaatgtttgttgttcatttttatcagttttacacatcataacaagtagcaacaaatgacgatacgttttgcaacttctgacaacattttcgatcataacatgtcgtcatgagacatcgttaattttatcgctagatatcgcaaagttctattgaacatgaaagttgcttattattatcctaatttttgttctcatgacatagcatgcttatgtggacaaaattagtgccacgtggtagtacaactcagtaaaaggaaggacaagtcagcacctgcacaaacaaataccgcggcaatcaaacgagaatcaagtgatagaccagctcacttttaggaactgggcgaccctatggctggccaaccttaggactgtaccatggtcggccagcttgacctccacgttagaaattttttaccatgatctagatttacnnnnnnnnatgttgaattaacatcctaaatataaatnnnnnnaaataatgaaataaacacataagatttta

SEQ ID NO: 119875 - DNA, 1444 bp, Cannabis sativa
  modified_base (27)..(31): a, c, t, g, unknown or other
aaaatagattacattgaaatggagttnnnnntagggcataaaacctaacaataccttactacaacaaggtttcaaatagtcccacaatgatcattccttattcataagatagtaatccaacaatttccttgccattcttatttatgtagatgatataatagttgctacaaacaatactacaacgttaaacaacttcatatccactttagatgcacaattcaaacttaaaggcctcggcagcctccatttcttccttggacttgaaattgctcgatgccccaaaggcatatctgtcacacaacgaccattcactctctaacttctcaaaaactcaggttgcctcgcatctaaacctgcatcaacacctatggaacccaatacaaaactcagcaacaatgatggacaacttttgccaaatccaactcaatatagaagtttaattagcaaacttctctatctcaccatcacaagacctgatattagctttactgtaaacaaactcagtcaattccttcaatctctaagggaacctcacatgaatgctgcaactcgaatcctacactaccttaaaagcacccctggccaaggtctattcttctatgccaattgccctgccattcacttccaggcctttgctgatgctgattggggagcctgccttgacactcgaagatcaatttcaggatattgtgtcttccttggtcgatctcttatctcctggaaatcaaagaagcaacccacagtgtcccgctcattagctgaggtagagtacagagccatggcaaatgcaacttgtgaacttacttggctccacaatattatcaaagatttcaacattcaaccacaacttccctcaactcttttctgtgaaaatttggctgctatacacattgcagaaaacccagttcatcacgaaagaacaaaacacgtgaaaatcgactgctacattgtcagagaaaaagtctcaaatggcagcatcaaaatgaaccatgtctcttccaaaaccaacttagtcgatgtattaacaaaacccctgtttccaattcacttcaatgaaattgtatccaagatgggtattaaaaatttctatactccatcttgaaggggcctattaaagtttgttatgttagttatttggaatatttagttagttggttggtttaggttgtgtagttcaactctcttgttctggtactctgctgcctatatatagtgcagcctcattcatttgtatcattcaatttcaatacacagaaataaagcactttcatttttctctgttctaatatcatttgaatttaatttgattagatacaactctatctaatctatatattttattatattctcatttctaatggcatatatttattcctctgtttactcctctcctacacaacattattaatgtgttaattttaaaatagttttttttttaaaaaaa

SEQ ID NO: 119876 - DNA, 1074 bp, Cannabis sativa
aaaaaaaacaaaagaataaaaattattaaaaaaactaactattttctgcacaaccccaacaccggatgcgactatatttgcaagctcaatttttaaaaatcagaagaaaaagaccacactaactcttatcttttctaaaaccgtgactaaaaacttcaaaaactaaataaaaaaatgaaaagaagatgaagaagaagaactgaagaagaaaaaaaataaaaaacatatatattaatggagaaagataaagagaacttgaggaaggaaagagcgaaaaaagaagatgaagaagatgatgaataggaagagagaataatgggaaagtgggattaaagtgaaatgaaagtgtattaatatttagggtatcagatttttcatcatcaattttaattaaagaaaaattaacaaaaaaaatctgtaaaagtcaaatcacaaatttatattatctaaaatataatacaattttttttttttttttttaaaaaaaaagttgtcactaatgtgataatacaaagtcacatcatgcatttatcaaacttagaaaataataaaaattgtttaatagatgctcaatacactacacgacagtatacaacaataaaaaaaaacagtatgaaataaaatattactgtgtaacaataaaaaaaaaaagaaaatagaaaaaaatagtacgggtgtaaatttcccttattaaaattaggagagaaaaatttaatgtgtgtttcacaccataaattcatcaacttcattcaatatcataaaacattaaggtagtgtttggttgaaaggaatatgaatgagaatgagaataaaaataagaatcgaatgaaataaaatttaaaatgcaccaaaaattgataaaaaaatatgataaatgtattttgatgttacattagaatgatctttctttaattcatttcaaaatagaataatcattctaccaaaatgatgaaaatgacattccattggaataatattctaatacttcacgtctactatacagtatttagaatctgaataaattaatggagaaatgtaacagaataaatgaaaaataattagaatcaatatttg

SEQ ID NO: 119877 - DNA, 2813 bp, Cannabis sativa
  modified_base (2757)..(2759): a, c, t, g, unknown or other
agttcatgtaatcaatggactaaatttgtacaaattaagggagggtataaattttgatatggcttgtattatcaaggccaaaaagtgaaatttccctagtaaattgacaacactgtctctactttaataagaaaaaactatacaataagggtaaaatagtccttttaagtaattttaataagtattgtataggagtagtgtaatcactatttattaggggtgttcatcaaaccgttcacaccattccgcataaaaaataaggtttaaaattctttgcgatgcggttgcggtttgtatttttgtcaaaccgcgcggtgcagtgcagtttgaagttttgaatttaataatcgccggttcaaactgcactgcattatatgttacaaaaatattaatttttacaatatgattttttttttcagatatgaacaactcatatgtttacaaagctcaagttatacaactaaatttaaggaaacatctatataattattctcatcattttttattcttctcgtattgttcacatatgtatatgttatgatgtcaaaaatttaataagattttttttatattattgaaacttttttgaaattaattataagcttttattataatatttgataatggatagtgcaaactacctaaattgcattgtattgtactgtattttcgcggtgtattttttcgtgattttaagattttgcggtgtggttggggtttgaaaaattataaaaactgtatatgcggtttgatttgaaaaagtggccaaaatccaactatccgcactgcaaacacccttacttttcatacaagttatgtaatagtcattacaatggaatgatattacaagagtttaaaggcaaactaaaaattagaattgtaatcatgattctattacaatattaattacaataaatcaaacatgtcattaattatcaatctggaccacccacaccccgcacacgcacctgtagtctttactttgatttttagaattcaattcttaggaaagtaaaaatacaaaaattaattaaataatttttttaaatattaaaaaaattagaacattaatttttaatttttaaatgtcaaaatttggttttaaattgggaatgttaaaaggacactcatggtgcctagtacccttatgaaatgtcatatgactcaatttaatattaggtcctatttattttaatttaaagtcccatttagggcagctttttgaaaagctaaaatagctttgtggacaaggttaataaccgcctgcaagagtggagttcaaaacttctctctcaagcttgtagggctacatagatttgtagtgtcgtgcaatccatttcggtctatagtatgtcaactttttttcttgccaagaccatatgtgattttattgataaagccactagaaagttttggtgggttgatactgataataagaacgtgtatctcgctttgacttgctgggactccttatgcaagccaaagacatgtggtggtttgggtttttggaaatttgtagatttcaattgcccttgctatccaaacttgggtgggtgattacgtccgagtctcaatctctttggtgcaaagtgttccgtaagaaatatttgcatcacaagagttcttggaatgtctctcctcctcagaaaagctcttttatttcaaagaaatttttgctgttcgagacttcaatcgccaggaatatcgagaatattggtggttttagatttgaccaaaatgcctttaggtggcaaggttgcttcttggtaaagtaagggaaaaaataatcttttgccttgggtggacttttgtcttttagtgacttagaagactaaattaagtttatgaaaatataattttttttatgttatattgtattaataaaacaattaagttattttatttcattttaatcaaaatattagaatttagatacaaaacactctcactcttcaagcttctctctctcgacccttcttgaaaccagcagaaaaatcaagcttgattacttaattcttggtattctagcagaatttgtaggattcaatccaaggtaaactcccatgctcccttctctttgatttcttaattttcaagctaggttctaggcatgatttttggagttagggttctacagtattaaaagatggttgattatgctttcagaggttgttttgaggttatttgatctggtttagaactgatttgagtgttgttattttgtttgagcaaagtttggactttggagctcaaacttttctctctcttggtgattttcaattatggggtttttattcagttcttttgcatggtttatgttccttgaggcttgaataggtactttggaaggtttggtttgatttggggtcgaattgggttgattagaagtgtttttgtggttcttgtactgaaccggtcgactggttcagtttggacctgtaggaaccggtctaccagttcatcccctgatagaccccacagaatcagttttcctgttgggaaccagtctgtcggtttgggcattttagggcaccctagattttcttatttttatgatatttagagtattgccatgttatgcatcgataggaaaacttttagttttgattttaagtccccgaaaagtgatttagtgtgtcactcactggtttcacgaatattgtgacttaggggcctgtaaatcgtcgagcagcagttccacttaggttgattggtacacttgaattcggaaacgagataagattagtataatgatannnatatgtgattacatgtttagcgtgcatgtttataaagcctgttagattacattg

SEQ ID NO: 119878 - DNA, 1071 bp, Cannabis sativa
tgttgttttcgtgttattttttaaaaaaccgtaaaaatgtaaaaaacattcttcgaacgtaaaaatttcattattttacaaaaaatggggccttatgtaattattccaaaaaacacttgggcccttgggctagatgggccctaggcacaggcctagcccacctatgtccaaagctgggcctagcttcaaccacctggttttgaagatcccacagctcctcatcttgtttgcaagcttcacaaagctcttatgggctaaagcaagcaccaagagcatggtttgaaaggttgcaacatattgttagactaaacttagctttctatcatcaaaggcagatcactcaatgttcatccaacatacaccacactccacaatcatcatcttagtctatgctgatgatatcttgatcactagaagtgatcaatctgccattgcctctcttatatcctagctgcaccaagaattctctctctctcaaagatttaggaatgttgaactatatcctaggcatagaagtcttgtacactgatcaaggaatgctgctcactcaaaccaaatatattagggatcttctctgcaaggaaaaaatacaggaagctaattctaattcaactctcccatgaccagtagacaaagagtctctgcttatggcagtgatcccattgaagatgttccactttacaggtcaatagtaggggctttacagtatctgactatcacaaggcctaaggttgcttttagtgtgaacaaagtcactactgggaaattagattttaatgacacacattgagtacgtaactataaaactatatagtgacactttaacgcgcgtcactaatgagggtgactagaaagacagtttttagtgacacttgatcgtacacgtgtcactgaacccttttacattcattttctgcacgtcactataggcgtatagagtcgggttttgtcagactgtaaaggtaacagccacacacatgaagtgtcactatatcctttttttttttcttttttctttatttttttcttaatatttttagagatatagtgacacacaaaaagtgccactat

SEQ ID NO: 119879 - DNA, 1943 bp, Cannabis sativa
gtttcataaatcaagagaaaagatactttaggggttcgggttgtattcactatactaaagagaggaggttttggtggtggggtattgaatgggtggggtatgtcaaattatatattaactattcaaattaaatttgtttatttgtttatttatttattttgaatagaaatgcaatttcatccatttaaattattcaaaagaacatcacgtaaactattcgaaatcgtaaaatctaaataggttgcaatcagcatttaaccacgaagttttagctaaatagtaagcaatataattggcaaatcgtttgacaaaaactaaaaagatattattcaaactagaaaaaatttgtgcacactctgaaatgcataactcaaaaaaagtcatatctaacgaacttcggattagcttggattgtgaccaaattgttcgaatctaccaccacatcaggccatcctatttatttcaactaactcagcacctcattaaccctgatagcttcagtaagaacaggatcaaccacccccatctgacttattgtcttagccataataatttgactagaagagttatcggccacccaactatacccatgctaattctgattgctaaagatagctgcatcgacattaattttgattgtattacaacccgatacaatctagtgctcgtacccttcgccatcttgtaagaaaaacaaagaggaaccaaaatttttatcttgagcacaactccattgatcaaaactacccttagccatacctctttaacagtcttattcttaccattccacacattgtcattgcgcgtagaccataatgccgaacaaagcataacagctctatgtttcatctcagaatctcaacattgaaatctatcatgaagctcgaaaaatagttttcaccaatctctatctccgaaaacccaccatctgccagcaagcaaaagcaaacgaacaccccacaagataatgagaaaactctccaactcacaagcaccttgaacacaacaatgagggaagaggaacatgtttcacatctaattggacacgggtaggaagacaattggaagcagccctccaaaccaaattcttaactttaggaggcactctcaaatctcataactctttccaaaaaacgtaattatcaattccaactaactcacatttaagcttttgaagaagttggtacgtaatcttgaccaaatatacactagaactatcaccatttcattgtcaaatattgtcaaacattgagaggaacaaaaaaaaaaatgcccaaaataaactaattaaattagccaattaataattgataaaataagtaccacattacaatatactgtttattgaggttaatactaaataagcttgctctccaattcatattttgtcttaattattctataaaagtctctcaacaataaacataatttaaaattaataaagtttcttgataattatataacttgtatatatactaataacctaaaatataacaaatgaaattatttgtatacataattaaagtgagataatatttatatataatctataatttataataacaataactataatgaaagtattaataattttagttcttccacgttaatttataaaaatattctttcactatattgaattattacttttaagataaacattaattattaatatgtttttcttaaattttgcaatttatataaatttactacttcaaaaattttatgtattatttattttataaaattaattaagtattttatgtattaattatttctcacttataaaaaaaatccaaaatattctatttctatatttatatataatatatattggcctagtctatttctatttatttttttcaaaaaaaaaaagtctcagcccctaaataaaaaataaaaaggaataaaagtataattatttaaagaataattaaattacc

SEQ ID NO: 119880 - DNA, 708 bp, Cannabis sativa
  modified_base (39)..(39): a, c, t, g, unknown or other
ttatcccattttaatggttgtgctttttttttttttttntttttaacaatgaacaaaattttattgaaaaaaatcaggtacatcgaaaagtaaagaaggaaaatcctccatccaaactagcttactatccaccttaagtgcgtgcacagctaattcatgagtagtcatattggccgaccgtagactagaaatatcatctaaaagagaactaaagtcattacaaaaagaagattttttaggaaaaggatatatcacagctagacaatcagactaacataaaatacaacatttaattaaaataatttgcttaaaaaatttcatattttttattattaacattaatagtcaataataatttttttaaaataaaaataaaattttcattaattatgaaaatcttccttacaacagaatataattcagaagacatatcactttcttagaataacacaacttgaagagtaataagagtcacgtgtcaaacaatgagtggactttattaacacgcaattcaacaaaacaaactgaaaccttacaaagattaagcaattacattttacaatcataaactaaaaaaccaaatttataaaacatatgcaaattgttgttaattgttagaatttggggataagatgaatgaggttccatctcaaaatcaattggcaatggaaggagtagtccattcatcttatatattacaatttattt

SEQ ID NO: 119881 - DNA, 1760 bp, Cannabis sativa
  modified_base (63)..(68): a, c, t, g, unknown or other
  modified_base (1002)..(1006): a, c, t, g, unknown or other
ttttagttagaagtaacattttgttgtgactaaatatcacttttagtcacaaaaaaattatgnnnnnnctaaaaaattatcactaaaagttgcagttttttgtagtggaggaaagattcaattatggaggaaatgtaaataagatggctccttttcaaaactgtgttagtaaatgtggtttagaagatgttaagtacaataggaacttcttttcttggttgcaataagcaagatggccaataaagaaattatgcaaatctagatcaagtttttgctaattcttcttggttacccatttttaacactgttgaagttaccctttttttttttggaactttgatcatagccttatctatttatccagaaatttagggagcccaaaagcgttttaggtactttaatttttagaagaatttagagggcttttcaaacctgttggaaaataagaactttggagagaatacttgaatggaagaagctatatattttatatctcaccttgtgtgatttgtgacttggtacaaaatgatagaattatgtctctatttataggactctatatatggactaatctagaaatattattaaatgactagcttctacattgttatacataatttcctctactaacacaagtgaaagataattctaaaaaattcaagagtacttaagcaaacaagaaaactctagacactttagtaattgtaagaatagtctaaaaattttggtaccaacaagaaaattctaaaaattaactatcactacaaaatactgctatttttagtgataattttttagtcacaacataattttttgtgactaaatgtgacttttagtaacaacaaaatgttacttgtgactaaaacatatagtatttagttacaagttgtcactagtttagttttagtcacaacagttttgtgactaaaaatacatttactcacaacaaattgtaatttttgtgactaatacctttagtcacagaccttttagtcacaacannnnnataataatttataattagtcataacttttttacttttcgtcacaaattttattgtgactaaaagtaagattttttgtagtgtatattaaatcaagtttaatatctaagataataattacaaacaaccaacacgaatgcaaaataatcacaaaaacatttaagcataaaaatatttgcaacttatcgaattacagtatatttatttgcagaacctacttcactacggataaatatctaagatattcaaactcttctaagtaaatattattaaaattttaataattaccttttacaatacgaagcaaactaactttgcacgcttcaatcaataccaaatacactatacatatgataaaaattaaaatttaatacttacatattattataattatatatatatatatatatattaattaagagaatacgacacttaatttatattaataagaagtaataacatacacataaataaacacatactaaacacacaacttatgcactaaaatctcaactcagttattggttacaaaagttgattacatctaaaataaatatgattggtcatagcaaactaacatgtgatatgaatgaagaaaaacagatagcagctaaaatgttttaatacagcatagttacgattctaatattgtaaacttaggtggcgtttggcacgtttactaaactgtaattggaatcagaataatcaatggaagaaatcaatcaggttaaaatataaaataatcggaaacaatat

SEQ ID NO: 119882 - DNA, 2540 bp, Cannabis sativa
agggcataaaacctaacacataccaagggttgcaggcacatagaaaggctggcaggcacataaaaaggttggtaggtacatacctaggttggtaggcacatgtctaggctggcaaacacatacttaggctagcaggaacatacttggccgaccatagaaggtcataggctggccaggctctaaaaatagggttggccgaccaactggtgcagacaactccaaataagctaacgaattgtgggataggcccaacaacccacaaaaatagggatattccctcgagatattagtcctacattctagggatttaactatcttttttttgtaaattaaataatagataaaaagatgttaatatccctattttaaattacatgtttgaatgaggatcttttgtgagccttacactatataaaggacattaaatcactctctcaaggctaagtcattccacaagcagtaaagggtctctacaagtcctctctcatgctccatgaagcttctcacacgtggagaaccatatttctctaagtctcaagcatcacctctctccctttaagtatcatatgccaccaaggcttcctaggctctaaacctctcctttcttcataagttcttcatagtaactcattagttcttgatctataacacattgttctcataattgtaatactgaaaagagccatagctaaaaatcataaggtcttaacatgtgatctggatggtattatttcaagagtgaatacaataaaaagaggagtaggtcattacccgctaatcaaggaggtcgaacctctataaactgatgtgtcaactttattatttgcttttacaatttacacgtggtgattgttagtcataaataaggctttcctatcagttgaccaaattaagagtcaacactaactaaagcaaagatacaaaaatactaaaatattcaaatacattgatatgaatcaattaaccatagtaatttgaaataagcatatgcataaaaaaaattagaatttagaagttgtggctcttaaggggcacgtctttttggagtgaccagactttccacataacccacaccttttaatccattttttgccatctccaactgatgggattctattagtttttcttctaccacgcttgattgggacatttggaggaaaaatcttcagaagtaattcaacttcattgatatcccaattttctcgttgaggcactgaataaattgtatcactataatccaatgcctaagtttctaacttataataattagagcacaaatcatgtacttctattccagcttgttcatatgctgttaatgcatgcacacaagaaagtttatcaaggtcaaaaatacgacaagagcattgtctttgaaccaaatcaactatggcattattgtctttaccagtaaccttatatgtctttctttataagctccacatgtagtgcaattttgcgtttgttctctccacagtctaaaagataagttgcaagacattcatcccctcataaaataagtggcaacatgctttctccaagtgttacgagtaagtaacttatttttaattcgatgtcattttgattggcttcaatcttcttatacaatttatccaataacatctcaaatgtagtgctcgaatcatcgacagttataggtataacttccttatattttggcgaccacttatatgacccatgttcatccttccacttcccattgtacttaatatagttactattcaagtcattactatatgaaaaatagatggttgatattaactgtgggctaaatttgaaagaatgctatatcttgagccaaatttgggtttccttaagtggattttggctctaggttaattttaagcccaagtcttctattttaagctcatttcatctcaaccaaaccctaagtgaaggctatataaagaaggagataagagctttgttagataaatgatttcaagtaattcaaccttagaaaaagttctcttcttctctcaaagtgttccaaaagtgagttgagtatcacttttcgagttaaaaaaggagatccatgatcaacattttttactactctgtgacagaaaaagagttagagtatgaatggaagaattcatattgtttttgctacaaccaatgaaaggtttcttgaactcttacatgttaatttattgttttagaatttttatatttaatattagattatagattaataatcaaacacacatattagtgaattaagatcctagtaaataagttccaactctttctaaaagtagttggtataataaactttatttaaatcttttagttactcatcgttaagaaaaaaaactaaaaaaatgctttgattctaaagagttttttctcttttgacaaaaaacatatgattttcatattgtaaaacagtaggtaccactcgagccaaaatatagaattttttctttgataataataataataataataataattaagagagaaatgcatatatatatatactagttagaagttatgtgccgaggcacgtaaatattagt

SEQ ID NO: 119883 - DNA, 1233 bp, Cannabis sativa
tttgtctggtgtcaggtggtcctcaattgtaggagtgtggtccccagatacaggagtgtcgtccccggttgaaggagtgtggttgtagaatacccttagtcaggtcctcagaccttgtagatgcgttgtccccgctactcatacccctataatttcagagtttgtagaaggcgttattgcatgccttgtcctttgattcctccttcaatgtcattcttgtcgatatacattaaaatttcacattcactcctcttcacacaaacaacatacttaacactttgtaacgctttcacgctaacgggcttgcatgcacacacatgcacgcatggttgtaagtatgctcacagacgcacacacaagcgcgcatgcatgcgagcccttgtctcacagccctccgcagcagcattgcactcgctcacgtgcacacatttgcatgcgagcccccattgtgccgtcttatagccttgcatcattgcacgtacacacacattcacgctcccatgtgagcgagcttccatctcattgtcttccagcctcgcatgcgagcctttcacacggacgttaccatagctcgtacggatgctccgccacggctcgaattgatggttcaccacggctcacttggaggctctaccacatgcttaaaggctccacgactcacacaaattttctcggctaaccgaaatgctccctggcttgtccaacagctcatgggctcgcacaatatctcatgggctcacacaatatctcatgggcttgcacaccgaattgtcccaattgagcagtcttagtattttgggcataactctcttgatatatgtgagaattggatgattcaaaatgcattggaaagataagactaatattatattatcgtgtgctacaagtattgagtacttgcccactcatttcaatgaaatactcaggatactgtggaaaattttgtctttcgtattcgagatttactaggtttgaattcttgataatactctgctctccgaaaggaacaaggattagagaattcgaacagaaggagtcattattttctgctacaattttgtaagttttagttaaacttctatgtaatttaactgaattatttcaaggttccatatttaggatgttagattagtaataatcaacatgattatttgataaagttaaaattctggtaaaatatgtttactacaaaaaactgctacctttagtgacaactttttagccacaacataa

SEQ ID NO: 119884 - DNA, 2577 bp, Cannabis sativa
cttaaattgtagtattttaatctttacttacttttactttcttctccacaaaattggacatagactaaatatgacttttgtgaaattgatgatcaaatttttatgttattaatttaattatttcttttcttgtgtgatatgtatgtttttatattttgagcatagctataaatatatgcgtgttgtcagagaaatttagacaacactaaatttgtgagaatactcgaagaaaattagaatacctaattgtagatgtgggagcactcacttagaatagtgagtactcaaactattggctactaaatcgacaaaatgaaagcaaaaataaaaagaaaacaagataattatagtgtaatcaaagctcagtttgcttatccactatcgcaataattttagtttggtttatttgattcggatcacttctttatatagaaagtaagtgtcctttaagattacataattgatcggtttagaatcgtttttacaataaattacagtattgaattaaaataaatgcttaaagaataaatgaagaacagtttaatctattcttatattaagtgcagcaacgtatgccgcttgataagctgtgagttgtgtgttcatattccaacacatgagcttgtaggctctatggtgcagtgctcgcaagatggccttcaggccaatcattcggatgtatgcgttcatattagacattccatctattgacaacgtgggatcatgcgagttcctaacgagctatcgaacacattagtcatttggactaaacttatgtaaagaaatgatctttactagtcgcaggagaagtttacttggtcatcgcatgtactcggtatatgtgcgactagtattaaatcttatcagtcttgcttattcttttgactatgctatacatagtatgcgactaccctatctcggtcacatcttctcgcaagttcacatcaagcaaggctaactatattagagttatctactaacacgttatccttttcatcgggaactgggtccacgtgttaatttcatacgaggttgtactcgtacttctaggcaaaaaattcgcacgaattttgaatatacaactgtaattatttctttattttcccaagataccacatcattagactcttcggggtttgtgcagacgtatttcatgatgtctgttggattaagtgacttttgatttctaatggtcgtgtgtccaaatcccaacaaatggcgttaattcgtatatacacctctaagatatgaattgacctcacttcatttccttcccattcttagtctttattgaaatttttctctctaaaattccaacagaaattttttcaaaagatttgaatcttcttttgctagaggttgtttcgaagttcaagggatttttcaaagtgataatcgagttcaaaaggacaagcgtttggatcaaaggttggtattttttttaactttttctgtttaatgtgttttatttgaataatcgtgtactttctgggtatttaggggtagaagttgcataaaaattgaagtgtaggttatgggcaatgaaattttaagaaggaataaggccaaagaggagattttttctggaaaatttctatccgtgatttgaatactcgcacctcctttgcatgaacttcaaatatttgaacttttcactataatactttgattattcgcgtatctaggtcaaaccatgatcttggactaacagagtttgaagtggttgggtgtttcacagtgatttaatgttcatatacctatataaaccttaagacactgtgaaatatgaaaccacttttagctcaagtgttagtttcgttgtttttgttgaatttgaattttttattcatgtgaggacactcctcttttaaatggcactcataacacgttgaatttgaattttggatcttatttttgtaaaagttatcaattagacttttttttttgttaagtgacaaatcaggccttgtatttttttaaaatagtaaaaaatagtaccttaagttcaatttttgtcatttttttaacataaccaatatgaaactagttcctagcacgaacaaatataaaaaaatttaatcaatgtagtcataatatctcccgatcacactattattaattttattttgataaaaattggagctcaagctattatttgtattgctttaaaaactacagggttcaaattgttatttaataaaataaccaatttaattaataatttttataaaatacatgatccaaaatagtataaatctttcattaattaagcattgatgagaagaaaccatattattatttaaaaaaaataataaattagagtattacttttttgttggtctttcaaatggttaaaggttacaagtttcctaaattcaccaatgaatgaaacataacaattttggaaattttttcttttaaaaaaataaaaatagaatgttacccatagttgcattaataagtagatctttacttaaaaatcgaatacatacaccacaaatatattttgggataattacatgaggcactattttttatacaaaaaaaattacattttcacatttttacgatttttca

SEQ ID NO: 119885 - DNA, 1705 bp, Cannabis sativa
tttgtaattataatactttttgagatttaaaaaagtaaaagtagttttgtaaaaatgtttaataaattgataagcattaaaaatgtaaaaaagtaattaaatttagtacctcgtgtaaaaatctcaaaaaaaaatgtgcaacttttgatcatctatatcataaattctacattgatcataagtaagatcttccacatacattcactcaatgttccatctagcatcattaaagaatttgtagaatgttatgaccaaagagtagtaattagttggaaagctataaaagagttggttgttttatcatctatatcataaatatcaatcaaactattttgatttacatagatattatctacttacatattgtttcatcttccatcttaataaccttaaaaggtttccaaacacacaactttcttagaataaaaattacaaagaaaatacattataagaaagagaaaattgatgaaagtatagtggtggtgtgagtatatgttggtgggtatgttctttcaaaaattaattattttaatattttataaaaaattttggtataaataaggtagttgagatgataaattttagaagaagtacattaccaaccacaagattcgttttttttttttgaaacgttaggggttagtctcatgagagaattaaaaaaaataaatggatgtatatattttatatcaattaaatatttataaagttaataaaaaattaaaaaaatgaaacaattaaggagagaataaataaaactaattaaagagattttagagctttttgtcatcgtcttatatttctcctttatatatatagatatataaataaatattgatcctatatatattgattttcaaaagttagagatgcaaataaaaaaaaataataaaaataataagatgtttaggatcttagttaataattaaaaaaattaaaataaaatggccttaatttaaaaattcaccaaagactgaaaaaataaaataataatattgaacttttaaaagagaaaaaaaaaaaaagagtagcatatattctaattatattgtagtccctagagttgaagtttcgaacgattcataaagatatctaaacttgatttctcgataacatatttgtgttcaagaaccttaaccattttccaactctcttccaatttcttgacatcattttcttctagccaatcaaaacacacaccatgatctaaaaaattatcttcaagtgattcagacaatagaataacaatatcatactcatcggacaaaaacacttcatcatcctcatcattatcattatcgcttcgatctgagccactaattgttacttgtttatttttatcatcatgattgcgatcgcagtcatgatcatcatgaccccaaattatgttggagagctcaaacaccttctcatcgtgctaatgagtaggaggatataagcgataacttgatcggttggcattaaactttttcttgaggcgacgaaatttttcagataattgtctcttggtttggtttggaatagaggccatgagggaatctcgaatgaaaagaaagaaatcattactagcggcgttgttgttgttgttttgctgttgtttagatttggagtacttaatgaatgtttagttttgtgccctaaataagactcattttaatataatcagatttacgaactaataaagatcagaaatcacattttatgt

SEQ ID NO: 119886 - DNA, 1292 bp, Cannabis sativa
  modified_base (443)..(444): a, c, t, g, unknown or other
tacaaagacttagcagttcttcccaagtaatttgatccacgtgtcccttcctgattggtccacgtacattgggcgattttaggagcaacatatataattatactattaaaattaatatatcatttatcttatatttgtatttcatatattctgtaatatattatctgttaattacttgcttttaaggcataaatcctatcatgatcgtgttataattatacgaaaagagaagcatgaattccttaagcgatttaaggctaagtaaatagaagctcttaatgagttctatactccaagtagagtgaagtaacaagctacaagaatactcttgataaactcatcttagtgaatgtaggagtgggccgcttcctactaaattttgggcaaaatttttagagcgttcactatactagaatagacgtgtgtgtgtgtgtgtgtgtgtnngtgtgtgtgtgtgtgtgtgtaatagatggagtcccacatgggatatgagcccttatttacaagagtatataaggtgcaattatggcatgggatatagccccaagggggacccaattatgtgcaaatgaatgaggacacacaattaacccaccacatgcgtgcgccgtccaactgatccaagctggatggtgtagtgtgacactttattttttacaaaaaaaattatttaataaaataattaatttatattctatttcattactttatttaatttgagaaatttgtttaagtaaaattgaatacttatttgtatcaattttatgggacgcgttcagcaacaactccacgattcaaaaaacattcttcttcccattatattctcattccatttcacgattgaattaacgagagaaacgcatctttttcataccgaaaaaaaacataattttcactattaaaaaaatctgtgatatcaaattttgagggtatattcaacgattctctactatgcagtggtgatccgatgcagtatataactgtgttgttttatcttggagacgaccagcatttttcaactgcttgcacattcttgaacagtatcgcaaacgtcttaaatagagcgacctaatttgcgactgaacccaaaaatttcattcgataatatcattcatcttttattttcagaaacagtatatacaacacgaattatagcacaaattgtttccttttaaacaataattcccaaaacagcaacccaatcctaaatgagagagttccttgcttagtgatttcacaatctccttcattgttcttcaccattcgaaccatagtgatgagtgtcatgccca

SEQ ID NO: 119887 - DNA, 984 bp, Cannabis sativa
taatccagtctcaaaatattattgttttgacatattcttttcattctctaagggaccatttaataaaatacccagaattaattataaataaaaacaacaattgaatcactttaggaaccaaataaataatagcccagatgaaagaagaaagaatctcacttggtgagattaaagatgcaagcttgaaactgcaagcgggtcaaagctgtatgaagttgagagagaaaatttaagtgcaatatttaaatagtgattttatatggaaggaagaggaagaaataacgtgcagtgcagtacaacacatatactctggcttgttacacctcccaacttatatagtttgtattattgttttgtttttcttttttagataatacaagtatttgttaggacacaataatcaactgctatggtttaggacaaagactgaaaatgggatcttttaaacaccaccaccattcggctgagttgcttggagtgtgtatttattcttttcggacttataagacttggccaacgtggccctttttagtggctgtgtatggtctatgctcttgcttgtcttcatagatttactgtttcttattgattggttgagacatttttgtttttctttcagtttttttttttgaacaattgtttttttctttctttgtttctaaaatgtttagatattttcattctgctggagttttcaagctttctaagacactaatttttatagcaatcaataatgagagcaactgtttctttcattttattaaggagggattacattgttatttctaatttgtcaaaaaaagaaaaaaataattgtttttccaatttcaagtttaaggtccttagatagaaggtcttttttttaggatatttgttaggttgcagtaggtaggttttacaatctacttttttgtttatttatttatttaatatatgacaatctacttatgttgtttagttttgataaaagaagggtaaatggcg

SEQ ID NO: 119888 - DNA, 598 bp, Cannabis sativa
  modified_base (566)..(573): a, c, t, g, unknown or other
ctaaggctcattaacgccccaactacgtaaaaatccttctctaattttcttacagctctataaacttataatattttattggttgccgaaaacctcggtcaacagttagaaacattaggcacaaaacttaaatttaatttaaaaattaaataaaaataagaataattaatatttttctccctaacataatttaatttatttctttataaataaaaaataaaaatatttataaacattagtctaaaaaatatcttattaaatattttaattaaaaaattcatttatttaaattatataattaatttgagtaaaaattaaatttttaccagttagtaatctgttatagaagattataaaaaattataactattatagttatatttttaatgtaaccatattcatttaatggttatatgatgagaagatagtttcaagtctcaattgatgtatataagaaataaaatcactcaattattgataaatgaattttaaattcactttagagtcaatttacgtgccgtttggtaacactttttcaatcagttttttgtttttaaaattaaaannnnnnnnatatttttcaaaaacatgttttata

SEQ ID NO: 119889 - DNA, 599 bp, Cannabis sativa
aaatacaaaaacgaaacatgaattaaggttgaaagggtgaatattagtgtttaaggattagtattggcattagtctttctctctttaaattaaatcatattttgctattttacccttgtacaaacacattgaataaatcaattttttaagtaattggttaaaatactatttacttaattatacgatcccatttcgaaaaaaaaattacatctttcaaaaacattgttttctcttttaataaattattgctggtaaatgattaacttaattttttttcttcaaaaaaaaatccaagactcttttatcttgtaccagaatgtgtgagattttaatggtattacaaatcacacacaccttaaacctcaccatttcaaaatcctcattttcaataattaaatatctagaaaataataatttaggaagatttatatatatcttctcaccatatttgctacatttaatatattattttttaagggataactacataagatactattttttataaaaaagattatatttttacatttgaagaatttttttttttttttttcaatttttacagtttttcataaaaacaccataaaaataaaaagaaa

SEQ ID NO: 119890 - DNA, 503 bp, Cannabis sativa
ttcaattggtaacttttgcaaaatacaggatccaaaatggtatttacccatatatataatattttataacagtttttgatattttaaataattttaatttttttatgacagtacacattatagttatctaaaacataacccacaggtgatgtggagtgagataagtgggacccataaacaagcccagataagtttggcattctctcgtgagatcaaaatcgaaatgatatggactcaagcgtaccttggtcccatataaaataggttgggacaaagattatacactagaagagaatgttccatcaaagatggttctgctaggtgcttttatcatcgaagatattcttttcgtccaagacaactaagaggcccccaattaggcatttctaacataagtagtgtagaaaaaaatatataaaaaaattaaaagaagagtgttatgggatttgaacccatgaccttaaatatgccatccacctcaaccaattaagctataaatattt

SEQ ID NO: 119891 - DNA, 570 bp, Cannabis sativa
attattattattagtgttattattattattattatttggctagctatcaattaaaggttttctatcttttctattggggtgaaaagtgtcaaatttttatttgcttccactaacataattctgaactatactagatttatgacgtctactatataatactttcaataaaaagttatttaatttactaaaaatttacgaaaaagaaatagaccaaagaaaaaaaaatgaattaattgataaagtagttgtcaattaatgggattgaagaaattgaattttgtgtttattaaggtcttagttggaatgaacagagatttaattttaattattgtaactgtatcaacatcatgtcatcaatagaataacatacatttactcgaatttatatatatactaggtaaatattacataaaatatacccacgtatacttagttataaatttttatttcaatttatgtattttaataattagaaaaatatcaaatataatttaattagaaatatttgcaccaataactattattattaaattatttaagaatttacccttacctattttaatactcaca

SEQ ID NO: 119892 - DNA, 939 bp, Cannabis sativa
  modified_base (56)..(59): a, c, t, g, unknown or other
ttcatcagtttgtggttggtccattcatgtcttccacaaatatatatatatatatnnnntatatatatatgtatgtttatatagatagtttaaaagagctgagatctataactagaattagatgatcattgtttatgtaatcttggtttgagagaggctaaaaaaaacagtgattgatgactgttaagtattaaaggggaaaaaaactgattaatatataattaaccaagaaaaacaaaagtacgtacaaacataaacttaacataaattaatataattaatcatcgctataaagataaatcaaaagtttttcctattttttttttttaattttttgaaaaggaaaaaaaaagtaaaaagaaaacaaaaggtacagctagaaagaacaacgaagcattttttttttgtggaagggccatcaatgatcaccatttacaaaacatatactgagagattatatataattaattatcttattataattaattaattaattaattaattaataagaatatttagtgtcaggagacgtataataataaaacaagcctctcttctgtctggatgtctttattaaaataataatatttgcataataatcgactattgcttcaaaaagtagaaatgttatatatatctatatattttgcgtggaggatattcatatatttatataattaatttatttaagtttaattaagattttcaccctctaattttgatatgtaaaaaattatgttttttgagttttaaggtctttaaaaatgcctcatgaactgttgagagtgttagatttaaagacttttgttcaattttaacaaaaaaagtctggatgaaagttcagggggcatgatttagtacatgtaaaagttagagaagcatgatttgataaatatcaaagtctgaggaacatgataacaatctcaataattcagagaa

SEQ ID NO: 119893 - DNA, 4405 bp, Cannabis sativa
ttagggactattaccgccaattttcgaggttgaggattaatcggtatcaaccctaaatttttggggacttttgccccaattatcccttttaaaaatttatagtatgttgattttgtgttttggtcttcaatttttttcttttttttatagctaaataatattttaatcaataacaaattcagagtctgttagaaatttataagtaaatactaatatttagctgtcatattactattgataaaattaagtatcgagccccacacaatttaatataataactatttttcaaaataacaaacaatgaatataagtaaagaatttattctcgattcaaccatggaccattattagttaagtttttttaaaaagagctcttttgttgtatttttatttattctaaacaaaagaaacattacatattagcatgttctacttgaaagagtgaatatgagtggacaaaaatactcttgatcaatataaaataccagcaaactagtataagttcaacaaactaaataagaagtagaatagaagtaaaatataaatcctaaattattatactattattactaaaattttgatttttgttattttttttaaatatatatatatatttaaaatatagaagtatagaaataattaatgcataaaatataaattaataattactatttattaaaggatatttttgtaaattaatatgaacagactaaaattattgacatttttattataactattgatgattaagttgttacatgattattagtgaatataattatcaataggaagtgtttaaaaattaaaaatatcacatcaaaataatgtgatttatattgaactacaaaaattttaatggaaaaataaaataaatgttaaaaaagtaatttaatatgtaaaagcccaaaagttattgactcttttatatataagtatagatataatattatatataaactcttttagttaattctttttaaaaaatatatatctaatgtgatttacattcgtaatttaaatttaaatataaatattttttttaactgattaacaattataagttaaatcctttttattgtattattattttttaaattaaataaattatccaataatatatttaattcaataattaaaagataattaattaattttgttttctagttttttacagattgacgtggcaataggatcaaataatgtgatttatattgaactacaaaaattttaatggaaaaataaaataaaggttaaaaaagtaatttaatatgtaaaagcccaaaagttattgactcttttatatatatagatataatattatatataaacccttttaattaattcttttaaaaaaatatatatcaaatttgatttacattcgtaatttaaatttaaatataaatattttttttaactgattaacaaaaattagttaaatcctttttattgtattattatctttttaattaaataaattattcaataatatatttaattcaataattaaaagatagttaattaattttgttttctaattttttgcaccttgacgtggcaataggatcaaatgacacgcgtcccatatttctgatacctgggcggaggaaaatatccttagcagcccgaacatgattagttagcatctataatagtcggttatctgagcagggttgtggagaagatatctgaccaagtagaagaatgtttgtgccgagcaacttacaagagatagcaacttcagagcataatctcgttgtatccaaacacgaagacgatccctataattgtgggattgagtcagaggaaaattgaaacctgttctagttttctatttcatatattgtaattataaaaacattgtaatttcctatgttgtgcattgtaagcgaaagagaaatcatccctcatgcattaagcccttataaatagtgacctaatctcactatgaaaaggatcgaaagacttgctttagagagatattctagagagaaaagagtgatctaagagagaaacacactcagagatcagttataagagctttcaagaggaataacactctattctttctcttaagtcaatacaatacaagaggagtaggctattaccacacttacagggtcaaacttttttaaaatatggtgctcatttcacattattgttcttgctttcttttaattatattacttaattaatttattatttgactcactgtcgttggctagaagcaaggtcaatattttggtgttttcaataagagcaaaaacacaagttctttgtcttaagttttgacaggtaaacaggatggttgtacaaacctgtagaggccatgctgatcagggtgacctgatggtggcagatcccaacgtgcaaactcctcaaaacacgagaggaccaccagggacaaaccccaagcaggtgaatacacagcctcctcatgtatgccatggagtgactttccctctggatgggatcacaccaactgtacaagagattggaaacaccagttcggcaactgatcaatccactcccatcacagaagtcccgtctaccactaatactcaaaggccaattagagacgacactaaaatccagaacctctgagcagcccttggactcaggcaaggtcatactaacgctttgcatcatgatcaaaaggatctctgagcagccataaacctagcattcaatgaacaaagacgtcaatttatagaatggagggacaaggagatggaagttctgaggtctcaatagacaaccattgatgatcgtactaggcagtccaccgtactaataaggagggcctaccaagtcaccaattaacaaccgactactgcatccagtattcccctaggtagatcagacgtacaaactcacagtggtcagccgtccaatctaaggccacaggtccaacctgtgggccaaacggtagacggccaaatcttgccagaccgtcctttgggaggagttatacacaccaacttcactcctgctgaaattttaggccaacctatcggccaaacaagtcagacaccaaggccacgtagtacctcagtgtttgataggttgggtgtcgcatatgacctcaagaccgacctaaatcgcagaaaaggcttggacaaacaatacgttccaccaactgtccaaccaggtatccgtgcccaagatccagttcaaggagatcccaatgtggcacaggtcggtcaacaaatcgaacaagttcatccatttgtgcaagcacaattggatcaacttaaaaatatgatacaaggcctgactagcccaaaactcactgatctcaaactcgaccgggcacgcggatcacccttctcccctgagattgaagtccttgagttacccccaaagtttaaaatgccatcttggaaaatgtatacaggaaaagaagatcatttatcacatctgaactattttgagatgtagatggacatgcaagggttaagaggtggcgtacggtgatgaatttttcctgccacactcgcagaggctgcctagcaatggtacttcaaattgcctccaagaaggtttaactcgtggaatgccttctcatcagagttccatgcatagttttcctcctctcgtcaacttcccttacacctggaagacctggtcgaagtaaagcaaatgccaagagaatccctcagagcttatattagccggtttatgaccgaagctataaaagttaaagggctgactatagaaggaagattggctgtaatattggggggcattgagccactcagagagttgtggaagggaattaaaaggctgactatggggtcaatggctaaatttctagatcgagcagatggatttgttaagctcaaagaaacttttcagtgtgtggatactgtttaacaaaagaaaaacctgcaacgtgccacttcggtagggacgtctgccaagaatccacaataacatagcagctcaaatttaaatgggaagaggtctaacaatggcaacatgcagggtaatggaaagaaagacaaattcattggaaatgctgagttgcaccccagggaaaatgcctcaaaatttactgccttctcagtcctaaaaaacgacctagagacaatttatacgacaacttagtctatggtgtcgtacaaaaaaccatctcccatgaaaaaagatgtaagcaagagagatacatccaagttttgtcgttttcatgcagactacggccatgacacaaacgaatgtaataatttgaagcaagaaattcaaaaagaataacccgcatttacagaagtatgtcagggccgaccaaaatcaaagggtcggccaagtagacaataattagaaccaattgatgcccccaccaatggatggcatttacaggtcattgttgggggtccactgttggaaattgttttaccaggatcttaga

SEQ ID NO: 119894 - DNA, 2044 bp, Cannabis sativa
gttgcatcaatacactctttaagagggtgtattgtaaaattttcctaagttttattatctaattttttttatgcatctctctaatgttagtggcaaatttaatgttgtaactcatagattaactaaatataccctttagataaaggataaatttttttgaatagaaaagacccatcctcctttattgcaattttttttttcaaaccaagtaaagaaatcgtgacgaaaaaaaaatgtgcaaactaaaacataatttgcataaatcataataggcaagatattgaagaaaatgattttcacaatcatatatataatgtattaagatagcataacttgatccaacatcaattgatttttatagaagaaatttagaaattgtttagagtttagggttcagggtttagggtttagagagagtcaattcctatgagagattttttattctttacattgtatatattctctatttaatatttaaatactacatataatttttttatgaatgagaagttgtattagctcaaaaacagtttgtatacacctaaatagcacccattaagggcctaaataatcaactatacatttacaatgctatagctatttagttacatttatttacagagttgtaaaccaccaactatcttcatttgaaacttttttaggccgaaaaagctcaattctgagtttgactctcgatttgagctctttgatgatgttgacagaattctattcttttttggtcccaaaatattcatttctcatcagccaaatattgtagacaaggctagctacagcagcaatatagaccatcttcctgaatttacttaatttggctctcccaagccatttgatgattgtaggaagtgatgtgtgaatggtcctccatcccaaccaatcttttatctcttgcaaacttcttttgttcatcgagcattcaaagaataaatgctcagtcgattcattgttatcacagcagaaaaggcatccatgttcaactacaattttcatcttgtacaacctatctctggttttcagcttctagtgcattgcaagccacagtataaaactgtgttttggtgcatttaacctactccatatctgtctactccattgcacctttggtcgagttgaaatcagcaatttataaccctgtgccacagtatattgctattgcagaacagttcctccttgcaatgtttccttgaactgatctttgagcctaactaagcatttctaataccagctgcattggcttgaagcattataggcccaccagttagcatcatgtaaatacacactgttgatccacttcatccatagactatcttctttattggcaatgacccatatatatttccccatagtagctctattccatgtagcagtgttcctgaaaccaatgccaccagctgactttggctggcaaataaaatcccaagctattgctcctggcccttgatactcagctttaccattccataaaaaattcttgtatgttattcactacttttttgggccatatcaaaacttggcaccaataggcatgtatagccatcaagactaagttgataagaacaactctaccagcaaatgaaaggtttctagaactttacattttgattctagtaatacacacttctaaagtctccattgtagaaaagtagcacatcattagaaaaggccaagtggtttagtttggttgctggacatctagcatgaaagtaaaaatcaggtttgtcaccaattctccccattatttgagatagatattctatacgcaacacaaataataaaagagacattggatctccctgtctgaggcccctgtttgaatactatatatttttaatacgagaaagaattttttttatgtggttttgtagttcaaatttatatactacacgagtttatcttatttttgatgttctttggttacaaatacaattcaacagaattttctctaagataaaaaattggtcatcccttttacaatgtgatcactgctatttataggagtaggatatcagttttttttttttttttt

SEQ ID NO: 119895 - DNA, 675 bp, Cannabis sativa
ccagtcatgttggaatgactccaggctagcacatcttgattttctctaaccgtattaattacatcttctcttacagcccaaaaggagatttttttcccaccctgatagttctagtggggtcttctttacagatgctcacttcctctatgttctccattggctcctaatttctttctaatccaacccttggatctaactcatcctcatatccctccaagacagcatccatttccatcgggacttccagttcaagcatctcgagcacttcttccccgaccatgaacatagtgcgagttgatacattatagcagtttcttgcgctctgctgatctcctttaatggtgctgatacatccattatcacatgggaatttcatacacaagtgtcgaatggaagttgctgcaccgaagttcactagagtcggccagcccaatatggcgttataagttgtagggcaatgaaacaccacaaaggttaagtgtttgaatgcactagcgtcattatctcccttgaaggttatcaacaattggattttacccatgggaattagggcatcgccattaaagccttgcaattggacagggcatggagttaaatttgcttcaattagtctaatcacttggaatgcaaacttgaacaaaatattaacagaacttatattgtcgattaggaccc

SEQ ID NO: 119896 - DNA, 636 bp, Cannabis sativa
aaattttcatccacgtcagactttctttaataaaattggacaaaagtccttaaatccaacaatctcaatagttcgaggggaatttgttacacttgaaaaagttcagggggcgaaaatctaaattaacctttttataatcttcaatggtataacatccctatattttgcaacctatactttccacctcattaaacattcttcaaatattaccattggagatgctcttataccctacagatctgaccaaacttaactccaatccttagattagttcagtacttcaatccaatagctacagtacaaccatggtaacaatccatgttttgccataagagcctctcgaatggtaacaatttagagaatgcttgctgaggtggacatatgatgtgccaaaatattgagatgctatactatttgagagaaaatgatgctattctagaaatttgtatggatgttatgcagtagcattgatgctactcatttttttaataaaaaattgaagctaaaaagttattgtagctaaaaattaggatatatatatattaaataatagactaattaggatttttgcccatgaactatgacatgtaccaaatcatgccccctaaactttaaaggtcgttaaaaatgccccct

SEQ ID NO: 119897 - DNA, 1852 bp, Cannabis sativa
ttttttttttttttttttcttatgccatgagttacatgtatagttacaactaggtgaatgttacgtggccgagccacgtaaatgttaattttatttaagttttagtatttgctttctttttagattttggttaaaaaattttgaatgattaattgaaccatttgttttataaaagtaaactattttataaaattctaatggctgtattcttggataataaagaattcattataatggggtctttaggaagcccaaaaacatgagtaacataccttaacaacaaagataagacttatgtactttatactgtccaaagtcaccttaaaacaaagttacaggactctgatatttcttaatggttgtatttaacattaaaattgtaagagaaatttcatttgtagttaagcccttgagaagtaataatacactccaaaaatacaggactataacttagatagctagaatactcttttctcaagtctagggggaagagttgtgggcctagacaaaattataagaggaatttcataaaacaaagaacaacttgtttcaaaaaaattatgaaacccactcatgctggtaggaggagaaaaaggggtacatcttcagagccaactatggttgggccacgttgctgtcttttacattggtcatcgtcatcacaggcagacctcactttggtcacatctccatttgaaaactcggttccatcgtgtccctcacagatcgtcaacttcgcctgtaaattgaacatgcagcaacaggtaactaaacattgcaggagccatttctcaatccatacattctcacctagacacataaactaattttagtatgcgtatatatgtgtaaatattcttttatgtgcactcaataaactaattttagcatatatctatatatacatatatatatatatatgtgtgcatatatttttttatgtgcacccaattgaaacaatacgacatctaataatcctgctttctacagtactcttaaatcaaactcaaacagaacaaaatcgtggcctgacctgtgaccaggccacccaacctactcctcatgatgttgcttctataatgatagaattatacaaaattaagcataattaaaaagagtagtattaattagtaagcaatggcaaggcttacatttgtttgagaaagctcgtcgaatttaagaagaatgtaattagtcattcttgatgttggtgggataaaatttgccctgttttgttccactaattttctcaaatccacactacacatttaaaagcatgaataaataaacaaatacacaaattagacatacataattcacgaaacattttgaaaaaactactacacagaacagagctactacacaacaataagccaattccagaaacgaaacctagttgagaaaaaataagttctaacgggaagttatcttcatccacaatgccaatatcatcatctccgacctccgagtgatctagttgaaatataacaaagatacaaaacactaattactacttaggcattctattttgcctaatatatgttatagttttggaggtctattatagtattccaattacattaattgtatcaagacaagaggctgtcatcatattgcctttcactgaaggaatcaacaacaatatctaagttaatcaaccaatttcatgaacaagaggatgtttctcattgaataaataattcaactacatttatattagatctaaaaaatttcctaaaaatgtttgaaaggattaagttcaaagttcaatgtaaagcctgcttagttaatttggaaattagcagttgtttatgtttaaattatgaaattatttatagctatttaactaatt

SEQ ID NO: 119898 - DNA, 1783 bp, Cannabis sativa
gcttcattgtgaatgtgagaggagttgaagctaatctagagaaaacaaaggtcttaatcgagataccttcacctacaacgccaaaagaagttcaggctttaacaggaaggatggcagcactcaatagattcatctcgaagtcaactgataagtgtctcccatttttcaatgatttgcgaggcaatcagaaatttgaatggaatgaagagtgcaaaaaagcatttaaagggataaagaggcatctgtcaacacctccagttttggccaaaccaataactagggagagtctatacctttatgttgcaatcttagaacatgccattagtgcagcattagtgcgagaagaaggtaaaaaccaacaacctatttactatgtcagtaaaaggttactgggggcagagtcgagatacccacctctaaaaaaactcgcactatgcctaattcatgcatctcgcaaattgcggcaatattttcaggaacatcctattaaagtcttaacaaatcaaccattgcgacaagtattatcaaaacctgatgcttcaggaagatcaataaaatggtcgattgaattaggacaatttgaagtaacttatcaccccaaggatttcaatcaaagggaaagatttggctgacttttttatagaaggagtaaacttaaaagaagaccctggtatagaatgcgaagcaaaaacatggaaattgtttgttgatggggcttcaaatgagatggtcgggggcaggagtaataatgatgtcgccagaaaaatttaaattccactatgcactaaggttttagtttaatacttcaaataacgaggtagagtatgaggccttattagcaggattgagaatagtcgagacactaaaagtcaaaagcattacatgctttattcacttgctgctgatagtgaattaagtattgggagaataccaaggaaaaggcgtgaaaatggccaaatacttagagaaagtttggaagaacttggagaagttttattattttaaaatagaacaaattctatgagagcaaaactctaattcagatgccctagctaaattggcatctcaatttgacctcgataagttaaacttggtatcggtggaggtcttagacaagccacacatctgtgaagaggaagatgtcgacatgatagatactttgccaacatggatgacaccaatcgtcaagtatctattaagtggagtacttcctacagacaaaaccgaggcacgcaaactcttatattcgatcccacgctacacgatggtcgaaggaaaattatataggagaggttattccatgcctcttttgcgatgtgtgttactaagcagaagcttatgaaataatcaaagaaattcatgaaggtttttgtgaggatcacgcaggttggtagagcttatctaaaaagttaatccgtcaaggatactattggccaactatcaataaagacacacacgagtatgtcaagagatgtaacaaatgccataggttttcacgtataccttgagtaccaccaaccgagctgaggatgatgacctcgccatacccatttgcaatatggggaattgacctaattggggctttacctacagggcgaggtggagcaaagtatgcagttgtggcaatcgacttcttcaaaaaatggacagaagtcaaacccctggtttccatcacgtgcaagaaggttcttgattttgtcatcaagaacatcatatgtaggttcaacattccaatcaagatagtatccaataatggaactcagtttgatggtaatttattcac

SEQ ID NO: 119899 - DNA, 847 bp, Cannabis sativa
  modified_base (59)..(71): a, c, t, g, unknown or other
aatatggtaaccaaattaaacactccagccgaaatatacaataaataataaaatatttnnnnnnnnnnnnnatgccaaaaatggaattaacacagttatagattaatgttagtggttattaggttcgtaagtctgttacaatccacttgtcttagcaatctactgtatacaaatgcaaccattacatgttgctatgaatcaatgaatcacaatctttctctctctttctgtactttacttctttttttttctgtttctatttttttcacacaagcattcatcaatggcaaacctatgcaacactaattcggtattagagctctaatcaacctttggtggtaattatggctaatcttgggactcagatagggaacagatcacaagggaacatcactggtctcaactgtgagatggaagagcaatgaatccaacgaagactcactggtccacttcactcacaacttggtgatggggatctcaaatttgtggtcgcctcggggagacaaagagaaaatgaagcgaagacgatgaggcagagagaaataaattcaaaccttcaagttttggagccattgaactggtcactagagtcggaagagggtaaggttctaccatatgggttagaaatcacatgtgagggttcgtgtggctggaggaagaagatgaagtggtggtggaggtggtggtgtggctggaggtagaagatgaagtgggtctgggtgtggtatggctaaaggtagaagtcaatagaaaaaaaaaataattttaaaatatagagtaatttgcggcataaatacctaagtttaactttcagttgcaaattaatacttaagtttaatttttggcg

SEQ ID NO: 119900 - DNA, 1885 bp, Cannabis sativa
gtggactaaggcccattaatgccccaaccacgtaaaaatctcgtgcattaacttcttacaactttcctaaatattattattatattggttgctgaaaacctcgatcaacactgagatgtatagctgaaaccaaaataagcactgcaattcatgaaatacatgaaggtttatggggagatcatatatctagaccaagtttttccaaaaagatcatccaacaaggatatttttggccaattatgaagaaggattgtattgactgcgcctaaaaatgtgaacagtgccaacgttattcaaaggttccaagagctctaccaacagaaatagccttgatgaatagtccatggccttctgatgtttgaggaattgatctagtaggctctcttcaaactggaaaaggaggagtcaaattcaccattatctctgttgattacttaaccaaatgggttgaggcagaacctatgaacacagtcacctccaagaaggctttggacttcgttatcaaaaacatagtatgttgttacgaacttccacacaaaattgtgtccgacaacggaagataatttgatagtgatcaattcactaatttttgtgtcaagcacagaattataaagagtttttcagctgtgaccagaccacatgcaaatagacaagtggaagttgttaacaagattttaaagaccatgttgaagaaaaagtttcaggcatgcaaagctcattggtaggaagagcttccaagagttctttgggcataccagaccatagaaaggactttgacggatgcgaagtaataatcctagtagagaacattgtactttctcatagaagagagacttatgatcccacctggaatcatgctttacttcaagaatcattagatttgattgaagaactccaggagcaatcacaagtccaactcaaaatgtaccaaggaaaaattgccctgcacttcaacttaaaagtcaaaagctagaagtttaaagttggcgaccttgtcttgagaagagtgttttcgacatcttaggagtcgggagtgggggttcttagaactaactagaaagggccatatgaaatacaacataaggtgtgtgatgaaatgtttcaactcaaaagacttgatggatctgaagttccacgagcatgaaatgtagatgacgtacgtcgatagtattagtaattggaggtggccagatccttttatttttctgcatttttttcctttacttttttccatgtacgcctttgggcaggaaatatttatataaaaacagaggatgtttcaaagtagatttaaagtcttgtaattttttgttgtattgtaacaattttaagtgaccaagagtccaaactctcagatcacttgggggtagcatatattagttatctctataaattacaacatgtggatcaacattaatcagtatgggagtagaaagcatcgcttgaaattggagcctcaaggaaccaaaagtaagttgctagattaccatacctaagatcaataaatttgctaagtcaatccaggttgaccaatcacaaagaagtttaggcttaaaaaatagtcaatctagggtgaccaatcactaagaatttcaggcttcaaaaaggaaaataaagctgaaacccaagagatttaggaccttggaaccaaacctcaaggtaggggtgagcaacagtcgttttggtcggttttttacacacaaaaaatccaaaatttggtttttggtttttatggttctaatcccaaaaccgaccgtccattataaaaatataaaaaactgaatgttttaattcacggtttggttggtttaaacctaccaaactgaactctatttttttttttaaaaaaataagttttaaaattttttataattatttgaaaact

SEQ ID NO: 119901 - DNA, 1568 bp, Cannabis sativa
aatatttatttttctcaaagtataaccgtttatcaattaatacatgttaaaaatgtttgactaaccttgtttatgcataatttacatatttaatattatttcttatttaataatttttatattaatacacattatttttattaaatatacataaaccttgtaactcccaccattaatattaccattttttttaaaaaaaattatttatttattatttttttttattatcctttcgaattggcccaaattacaaagcaatgagaatatctattagtattttttttgaacagatacaatatttattattaaagggaactactttaatacaataattttgttattatattcaaaaaaaataggacctaatgtattaaaaaactaccataatatcatatctatctatatctatatctatatataaatataaagaaatgttctaaagaggtttaggtggcactttctatgctttttattctaattttactcattttttaagctttcacaattttttttctttgaaaaatacatatttttattaattgtgtgtaacagtcttttttctttattattaaattaattgtgtaacagtcaaaaacttttcatttgcattgtaaaattataaaacaccttttatatatttacctaattaattatatcattacaattagaaacttacataataatacatacactataaaaaatcatcattctttcactctatatgagtctttacgaagcttcctttcccaatttttgttttttaaaaagtaccatctacatttgaagctctcttttcttcatcaccactgtcccttcctaggcacctccatgtgagcatttttttcttagaattttatcaaatatacatgattcattcccaaaagtttaacacacacatatatttacatatgtatacaatgtaagtcttttttttagagaaaatattaactaatgattttattggattaatttattattatttcatcatcaccatcaattttttggcacctatgtgagtattttttttttatttggctagaatttcattcaaacatacatgatccattcacaaaatttgaatatatatatatttatatatatacatacaatgtaagtttttttgttggaaaaagtcttaactaaatgtattgattttgttgtattaactcattacgatctatacatatacatgtaacaaaaatggcttctccaacagtaaatgttgaaagttgcatatacatcgtatcatgtagcaatcgaattttatttgtttcttgtatatatgtatatgcatatatatatatatatatatatatttattgtatatatataattgtgatgcatgatatgaggtagcacttttactttttaagagttttctatcctattttttgaatttctaatttttttaatttttctcattatacaataatctattaataataattaatattaatataaactcttatttatttcctttctttcaattttttttttcattttctcaattattagtgtaccattacaaatcagttaatttagtatattttgttggaatttattttacc

SEQ ID NO: 119902 - DNA, 1165 bp, Cannabis sativa
taaggtgtcaatagaaacatccccttttctactgaatttaagcgttccgcaagtaatcttgctcgttcaacaatattgtttgttttaccaatgctcggtgcaaattgagaagcctccataaatgatacatattgagcaattctcatttttaaaagagtttcatatagacctctacacaatacaataatacatttatcaataataataaaaaataataacaatttatccaaatttatatttatatatataaattacctcatatacaatgagatgacagctgcactgatttcttcaagatgtaaaacttgtgaaacatcatccttgtcaatatatatgttatgttcaattgatccaaatatattttgaggagctgtaatcgtgcacataaaagatcccttactcttcaaaaagttttttgtgtacaaaaccaaacttggtggtatgtgatccggaattgtactttttttcgttgtcaaacttgatgttttgacactagatgatgagaatggacgtgactctttttgttgtggctgagttgtaggttgtatgtgttgacttggattattctttcttgtaactttcaacttctttggtcttggttctattaaggcctgcaaatgaccaattatgttaacaagtaagaaaagtagaggtaaaagatagcataattaagaaaaatatgttacctcaaatcctcttagtactaagtgtgaaggccatggtacaaatgtattaatcgcatcttttacttttacaacctcatctgagatcgcttttggtaaatctgcatctcccacaataacttcagttatgcgaactcgaagattatccctaatgtcatcgcaatgaattttatcatctccagtatggactatataaccttttgcaactgtttccaatgacgactctattatcaatctacaaggttcatcctgatcaataaagtaatttttattttagttagcctattatcgagtaaaaaaaacttataaatgtcaagtgtagtagtactcggaaataataaaaccaatcgttgaattagtagattgatgaatctcaagtccatttccaagttgagcctcaactctagttccagattgagcctcaactccatttccaagttgagcctcaactctagttccagattgagcctcaactccatttc

SEQ ID NO: 119903 - DNA, 670 bp, Cannabis sativa
ctaaaggtaaaaaaatttgtagtgtttgctcagcaaaaagtaagaaaataattaaaaatcaaccttacgacaactataaatcaaatataaataaattataaaacaaccagaaaaataaacttacgacagctataaataaactataaaataaccagttagttttatttttaggttgatttacaatctagttttagagttatttttaatgtttttatgtttaattattcgggtttatgtttatttttacttttatgttaattttaagtttcagataaagagagtttcactttttggtgaaaatatggttctcagctttcttggtgacaaaaatgatcaaattttgcaaaaatgaatgtccagattgaatttcttgacttggtgcatttcgaaagattaaaaattcaagctttcaaattttagtatcaagagtggcgaccttctctcaagagacacgactctccaatcgttacagagagcaaatttgagaaaattagaaagtcgcaaccttcctctgaaagttgtggctctcgaagaaaataaaaaactatcaatgtttatgtaaaaaaaaaaaagtcaagtgtcgcagccttccctagagagtagagatgaaaatttataccgcgggaatgggtaaccgcggggacccgcccctaatggggtggggattccc

SEQ ID NO: 119904 - DNA, 846 bp, Cannabis sativa
gttgggtgtctcctcgtcccggggaaaccggtggtaggtcccagaggtggaaggcttgatgcctgccaccaccacgatctgctccaactgatgggcgcaggtcagagtagaatgaacctcagccgcttcccacccgttggcacgggatttgtctccttcttgggccacgggacccttcatgacctcctccaaggtggccaagcgcttctttcccttcatcgaagacttagaaccggatgcagaagaagacatttttggttctgaaaaaagattgaaaaaatacagcagtcaggccccaaaccaaaccctaattcaaaaagggaatgggagtcccctaaccgttggaaagaggccccctccggacacttgccaacaaagaaagcctcaaaaggttttccttgacaagagtcgggtgcaagaatcccacagatagtgacattacggaaaaagtaaagagaaaaggaaaaaagagtaaaactgagaagacgaagtttgctctaaaccctaaagtgtcgttacgtgcgacgaaggtgattcctcgacaaaaatatggtgaaaagaagtaatctaaacgcaaaaaaggaggaatctaatacgtggtgcagaaactcaaacaaatattcccagacagctcaacatcgaacccagaaaaaaaaaaataaacagtaaagcatgctatgtgaacaaacagtgaactagtgtacaaggtacaagaaacttacataaagtatggaagcttggtgttggtgtttatcgccgctaaaaagttgactgacaacggcgaaggaacaagagcaggaaatctatggtgtttgaggtttcttttctctctggaaaacttgagaa

SEQ ID NO: 119905 - DNA, 1052 bp, Cannabis sativa
tttagaagggtacatcttaataattagtattatggaaaataaatttgaattttagcaaaaggaaaaaattaatttaattcgattaaaatactcgattcaatttaattcgtaaaatgtaaatatatacacttttacatgtatatgcaaaagtaataacctgtataatccaatattgatagtcgactaagacattttataatttgtaattttcataaccctaagagcatatctacttaatagatcaatactatatactatgtgcatatgtattttttttaaaacatattctaagtcataatttatatagatgttgtaatcttaaagaagatggctacctattaacattgtttaagttatgtagaattaggcatgcctaataatctatcactaaaagttattcaagagaaaataggttgtctataaacatactagtctgcaaagttatgcaaatttgagactataaatgtataagttaatgtttgatattagtgattttagcgatatcaccttttgagggagtggctctcaagacaaagtggcattctacatgtggtcctcttctcgaggatgtggatctattctagaagaagtaagtcatccatgtactattaatgacaatttctttggatctaagatagttccttctctacccaaagaagaggcttttcaccaacaattattatctctaacactctcatgagagctctataattccactcctagagaaaagcacttccaaacaattttggatatacgggtatgtcactttaattcctttcaagatgattgaccatacaaacagtcacttatcttaagattagttcaggtcaaacatacttaattttcgagattttatgtgatggactaccaaaaaaataagatacacattgttgatataagtagtacccaaaattctatttgacttttcctaataaacaatgtgaaattgcacatcttatctggtatttccctcacgtatcacaagaatcccgaatgtcagaatatatacttgagagggatgttagacttttatttgggcttacattaaattt

SEQ ID NO: 119906 - DNA, 551 bp, Cannabis sativa
  modified_base (513)..(519): a, c, t, g, unknown or other
atcatcacacttgaccttccccaggcgatgtgggattgcacagtttacccggtatttccccttacggatcacgggactactggctgtcacatgcatactccctagcgcgcgaatgtgggggttttggctgagaaaaaggctccacgcagcctccatgtgcgtggaaactcgatcagcggtgggtgaacttcgggcatgcccttgtctgaagggattttgtccaagcaaggcacctcatgacccctccatgtgcgcgcgttggctagtaaccctagcctaaatattttccaactttaaaaaaatcataactaattcaatttaaattccaaattgagttccataaaggcttaaattaattaacttttcatctactttccagacaaaatacttccagcacgaaaataaaattaatttttatcgaaagttcatagctaacaaacattcatcagttgagcacataaaccaacacgaacacatccaaatcaacaaaatcattgttttaaatccatattnnnnnnnagtaaatcattatcatggctctgataccagtt

SEQ ID NO: 119907 - DNA, 1074 bp, Cannabis sativa
  modified_base (1023)..(1032): a, c, t, g, unknown or other
tacattattattattattaactgaaaattttcatttaattagattaatttagtctcaacaatgacaaaaatatcactcgaaatattagagtttcaaaaaaaaaaacacaatcaacatttagttgagaagttcttgcaatttgatgaacaatttgattagagaataattaaagaattcaaaggatatttgcaatcttctacaacaccatcaaacatagatagcattaccttaagactaagaacaagcatctcgacgctactgatcaatgagtaatctcatttcagtcacgacaatatttcttttaaaattatagcttcatcaatctcatgaagtacaacaccctcctttaatcccgaaatactagccatcacaaaattgtgatgatctctaatcactccacgaatccaaacttatttcatctttaaatatagctgcatcgatatttacttttaaattgtcaacatcgagtttaatctacagctcaacaccatctgcaagacaccaagtatccatcgatagaaaaaaaaattcgtattttaagcttttctccattaatcaagactttcaaagggttatattattaatgcatattgatattttctaaaataatttatgaatatcctaatatttatgtatttggtatcattataataataactttttaacttgcttcatccagttataggaatgaaatttattttactgaaataattatataagctacctttttttttttggatatagtatgattaaattttttgagaatttacgatgtagatattcgtaatagtgcaagaattttctcgaactagaatagttcattatctaactgaaagacatgccttgtcaaaccatgaactacggaaataagcaagctacaaggaataaaactgtctctgaaaatttagacaataaaactataacattctcaaatagcacaccaaaagagttagaatttcaacttataacactaaaatactacttgaaatatctcaaaataaatatgggtaaataccattttgnnnnnnnnnntttgcaaaagttacagattagaccctgtgttttgttaaatga

SEQ ID NO: 119908 - DNA, 1211 bp, Cannabis sativa
  modified_base (867)..(870): a, c, t, g, unknown or other
gcgtaaacttgctagtagggtccactcaaattataagccctaaaaaaggcacataattattttttttaatgattttgaaaatattaggatgttcttaaatatataaaggtttaaataactttctttttttcttatggcccactaaagtttctggtcctacgagtgcctaataattatgcactttaatcactttaattatcttaataaaaatgctacaattttatgctaggaaaaatcactttagtagactttattttattagattctatagctagacttaaattgtatgataggaatcacttcacaataaagacatgcatgaccaattaattaagtgatcataatgatagttttatgatctcctagcaatattatataattgtatatatagcttcactaatccttaattacatgtcatttgaaaaactacaaactcacaattttttatgcttttaattaaactcttccaatattgattgaagtatatatagattggaaacttttatcaattaatcaattatcaaatattaaaggtttttatataataatataccaatttttaggaacttccatagataagcaaaaattctgaccaaagtggtgtagttagatggatacttgatcaactcttcttgttcaccattcatagaacaagtacttcttaatgaagcttctaaatttatcttcagcttctccacatatatacctaattattatgtccaattaaatttaaaaaaaaaaggaaaaaattagttcatatatttgattttattataattatctacaatattatatagtcgatcgtgagttgaaatgggtcataagcaaaaaagattttttaataagcccttactataaagataaatnnnntttttaaaaattattaaaaatatacgtatattttttaaaaggtatttttttttatttaggcccttaaaatacctagggccagccctaattatatataatttattaatatatatatttatatacatacatttgtacattattgctttccaaaaatccaacttgatagagcttctgaatgcacaaggcttattagctaaaatatggagtggggattgtcctgctccattcacagacattgctaattcttcatgcaatgaaattatttgaaatgccaaatctattaaacaaaaacaaaataaaatgatgttaaattttacactacaaataatgttaggtaacaa

SEQ ID NO: 119909 - DNA, 1071 bp, Cannabis sativa
acctcttccatatatatatatatatgccgcaaattataatgcatattcattatcattaacaacaattgtgttatcagagcaacaatataagtacatatatactaatttctattcacattcaatgcatcacaatttaaatataattaagtatataactgatatataaatataaatatggatacggatatggtggctgatatatccttaatattttccaggaactttctttatccatctgtctatcaaaatcaaacccctcgcccataaaaaataataatcaaatcaatcataaaataagaggaaaatgaattaataattaaaattaaatcaatttgattcttcatagacatttagcacatggatcttgcctcttcattatgtaacatcttcaccaactttgaaaccttcattgcaacttcgcccatcctctcaagaatcttttttttttttttttttttaacaaatcttctcaacaattctttgtatataaatatatctatctaaccacacccgcacactagattgacaataatatattatgagttaagtataaataagtaagacacaataatttatatgtatcgcaacaataatgaaactatgtgtactttgagttttatttgtcacgagaaatattacagaaaaatagctaagtctggatgctctaatttctagaaaaataaattcaagagagatgctttaactttataggtacttttttgaacttaaaaattgagttaggggagctcttgtttagggaaggatgtcctgttaaaatagtgataaaatattctaaaaaatatgaaaaaatacatttaagttatttttgactattgataatgatctaatagtgaaattgactctagagattggtcgttaatttctgaaactttctgtgggacccacttcgggtaagttttggcttaaattcataacactcttaaggacaaaatttgaagttgataacttcagaattacaattggagtgagagacattacttgatagaccatggaattatctttgaaatgcaagttaaaaagcgtcaattgaatcaatattgagtgagttat

SEQ ID NO: 119910 - DNA, 1797 bp, Cannabis sativa
accgtcccttataccagccaacactcctcatgacacaccagaaacaatacatctgccatgtcccactactgcaccacccgtaccctctcatcctatggtcactcgatcaaaagccggcatttttaaacctcgcacttttcttacatcacttctcgaaaatcctcatctcccagccctttccctatccactccagccacacctgaactcgccttaacaattccggtctggaaaaatgccatggatgatgagtattttgcactcaaaaagaacaaaacatggtaccttgttccccgcttacctcacatgcatgttgttgataataaatggatttttcgccacaaattcaactctgatggtacgcatcaacgatgtaaagcacgccttgtggccaaaggcttccaacaacaacccggagtggacttctttgatacttttagtcctgttgtcaagccatcaacaattcgtgtcattctatcgttggctgttacacatgaatgggatgtccaacaaatcgacatcaacaatgcttttatcaatggcactttggaagaggaggtatacatgtctcaaccgattggctatgttgatcctgagtttcctacagcagtatgcaaactcaatcgagctatttacggactcaaacaagctccgagggcctggtttgacactcttcgtatggctctcctacggcttggattacaaaattcagtttcggacacatcactgttctttctatcagaaggagatgcacgcctctacgtgcttgtttacgttgatgatattctactcaccggcaacaattccaaccgagtacttcagatcatctcccaactaaaccagcaattttcactcaaaaaacttggctccgtgacttactttcttggttttgaaacaagtagggggcaagatggacttcacttgtctcaaaccaagtactctttggatcttctcaaaagaacacacatgttggaagccaaaccaagtcccacacctatgattcaaagcaacaaactccatctgcatgacagcccaccatttgaagatataactcaatacagaagtgtcattggagcactacaataccttaccttgagcagaccggacatcgccttttccgtcaataaattgagccaattccttcaagcaccaacccaaaaccattggcttgcgtgcaagcgcatactaagatacattgctggcagcattggtgaaggaattcaattcactaaagctaccaatcccatcattgaaagcttttgtgactcggattgggctagctctattgacgatcgaaaatccacttcaggtatatgtgtttactttggtggaaacttgatcagttggagttcaaggaaacaaaaatcggttgctcgatcaagcacagaagctgaatacaggtcccttgctcaagcttgcacagaagtcacttggttgcaatccctcttcactgaaattggaattgaacacaatcgcacagccataatctggtgcgataattctggagcacgccaacttgcatcaaatcctgtctttcactcgagaaccaaacacatcgaaatcgatgttcacttcatacgggataaagtgtcgaacaaatctgttgaagtaagatacataccaaccgaagaacaaatagctgacatactaacgaagtctctgcctatcactactttccattacctcaaggacaagcttactgtttgtcattcaccacagcacagcttgagggggcatgttgaaatgagaggcccaatgtcagcccaattagaagatgaaatcaaggatgctgactaggc

SEQ ID NO: 119911 - DNA, 881 bp, Cannabis sativa
  modified_base (315)..(318): a, c, t, g, unknown or other
tgtgatagtatatattatagttatgggaaatattataacgcatctcttaaaaatgcatcaatgcacttctaattatttagtatttgaaatattttttagttaaattttttctcatgattatatacattatagttatttaagatatctggtaaaactttaagaaattcgaaaaaaaaaattaagacgtggaaaacaaggttcaaacagtatgttacatacgtgattattttcttttatacgcgtgtaaaatagactgtttgaataatgctttctacattataaattatttcaaattttttaaaattttataaaatnnnntaaataactataacgtacacaaatataaaaaaataaactaacaaattattttaaatatccaaacaagtagaaactacatgcatgtaaaagcacccgttaattatttataaaaaaagtctaccaatacatctacttttggaatgtgcatagtagaagcgcttttcaattttagtcgtcaagtgaataacatattatttataatatatggtgtatatgtatctctataaaatatgttatccaagatagaattatttaatgaataaaatattattttatcactttatgtttttcacacctagctacttcatttatgtgtgttcaatatttgtttaatttttttttaaatatatatcatctaaatatagatgagctatacaaatagagcattgacaaaaatatatataataagagtagtgtagtttacatctctactacgtatgtcctttgaatttgatatacgacgagttcaatcgttaactttctgttacaatctcttagttaatttctacgttcgaaaatatatgtcggaatatttttttttcacagagtgttcgttatgctta

SEQ ID NO: 119912 - DNA, 2528 bp, Cannabis sativa
ttccaactaatgatcttcatggctccatgtggggttgctgacccgcaacctccgctgaaaaaaatgaattctcctcattggaatctgactgagcatcagaaacttgctgattgttgaattcattgacctccttgctgctaccaatgttattgcggcatcttttcaaaatgcttcgaaaattttcaggatcgacatgtctcttgaaagccttactaggtgcagtcacctcgagagaaggctcttcaattaaaaccgctttacctttatctttgaaagaggtgattatggaatcacaaaagagagcttgtgatcctagacccgaaaggtaagggaggtggtctgaaggtggataagtggcataggtattaggtgaaacatagtggctggtatggttaggatgagtagtattagatgtaacgtgacaattagttggggaagtgagcatagtggaggataggctttggtaaaagttgggaaacggtgaaggtaaaataggaatggtctctttctgagggggcaaatttttactagagttactagtttcagcatcagtaagaggaaatgggtgtggttttgttgagatcattctggtttggtggtagttagtgtttgggatagtggaagcgatagatttacgggccattcttgtaaggaaaggatacacatttgccttggagaaatcatacctgtagcgatcataccccgagtttgggagtttatcccccatcataaaaggaccgaaagggaggtctggttcaaccccagcatccacaatttccaaaaacccactgcacttatcaaaaggatggctaattctaccacaatggaaacaaaaggtggggaggttctcataccgaaattccaaccaatgttcatcacgcactttcggaagattaacaagtttgcctttcatgagaggaagagaaatatctatccaaactctaattcggataaaagacccccaaccttcgtgaaaagactcctcatagacatcaatgtattctccaatccactcaccaacctttgtagccaatgctcgagacttgctgagaaaagggagtcgatgaatctgaaccaagaattgaaacttagagaaatcattccttgagacattctgtaactgaataggggagtgcagcaggataagatgattgaggaagtgccacggttctccattctgaattctgagtttgtcccctgcacaaccaattgtcagtaagaaaagatcagaatgcatttcagatacctcaacagggaagcgacatttgttactccagaagttacccattttcttaatgaaatttttgggattgatagcattcgatagacaacaagcgacaagaaaaaattttgggacagggttttcagaaacgaggtctgcatcagtgaaggagtgaactgctctttccttctcagactaaaccaattgagaattcatatcttgtaaaattgaatccataaagagaagggaagcagaataatcaaacaagaaatggaggtataaggcaaaaagtcgatgctgggaatcatatatagccccacggaccatgaaaaactgactggaggaagtgccatcatggagcacgattccatggaaggagggcatggaagatgaattcacaaccatgactgataaccgctgaagagaagtggagaagattgcaggaaaaacggtaactgctccagagcaaacagagagaaaaaacgaaaccccactctggcgctcctttttgttttgttttctctttaatgtagattacttttagtttttgttaaagattttttattatattaactgtattaatgtttatttcaaaatttatttgttagtttaatttatattaattgtagaccaaaatggaaattaggtgcttattaataaaatgatgtgacattatttttaatgatgtgtcttgccatctggcactcagtgtgtcaaaaaaccggagaggtacttacagaatttccaaaagtgtaacagaaggcatatgcaccgccaaaattttaatttaggtattaaactgcaactaaaagataaacttggatatttatgctgtaaattactctaattagtaaacaacttgcgtttcgcgtgctgcttatagaaattttaaattatatgtataaatatttattaaaaaaataaaatcatatcaaataattttaaatttatttttatatataattttaaaatatatttattaaaaaaatctgtatagagaattttaaagaattttttttttaaaaaaaaaacccactatacaattttttatagggtaaataatattttagaccctgtattttgtaaaaatcaccaattagaccctctattttgttgaatgaaaaaatggaccctatatttttcaaaattgtacaaataagactctgaactaatttttagtcaaaataaaatttaataataatctgatctatagatattatgataaaattggttacattttccgtatctattattgttaaaaattgtcttaaagctggttatattataaaataaaattattaaaaat

SEQ ID NO: 119913 - DNA, 964 bp, Cannabis sativa
atatatatatatgaaatagatatcaaatagccataaagtcttcatagaaaatacaagtaaaaaatataaatcatatttattttaaatagtgataacactaagttttgagagcaatttttaatcaagaaaaaagttttaagagcaaatacaaagtaaaaatataacataacaaacatatattaaagtcaacacaaagtttaaaaaataaatactactatcatgagccatttaagcaatataattattaaagagtatgctcattcttagccaagtaagcatcaactctggttcttccaatgaaggaaacatccctctcttctcttttatgataaacaagcgagttgcaaataaatacaagttgctccatttctcaattctatgcaaagaattaacattttcataacttcgccaatactattctcctttctaactatttcaatatttctacttcttgtctctacggcatccacaaggcgaccaatttgttcaaatatcactacaggccctgtcttcttcattttccttttttattttgtttctcaagtggctcggttgatctattattattattttctttaggaaatccatcaatattaggcgtctctagatcatcatcactactctcaagttgtgtatgtaaggtttcaatatcgttaaaaggctttttagactcagatagaattattccagaaaaaggtgtccaagcatactcccctctagcaacagtgttcatgaaaatcctatctaatttttcctctacctctggttcaatttcccgaatgcgaaactttgcagcatcgggatgactctacaaaaggaattttgttaattaaatgtatcattcacacaaaaaatcttatagttttatataaatacttaagggctcgtttggaacgccgtattatgtcgtattgtattgtattgtattatattaaattgtattttatgcaatatttttatgtaa

SEQ ID NO: 119914 - DNA, 1109 bp, Cannabis sativa
atttagttaaaagttttaaagcttgtaattttagtttcgttaagcgttcgaacttgtcttttgttgatggtttggccaaaagtgttagagtttcgacactggctgttggtgattatgtaggggagggcattccccctgtagtgcccaacttattttcccagtaatgaacttattgttccttcaaaaaaaaaaaaaaaatactttagacttgatatgctcctccatgccatctttgttgagatatgatcaacttgatgccaaaatctgtacattcataattcctacttagtgtattctcttgaaatttcaatacttgtctctcaacactctcaacaaccatttgtgctcaattttttatgctctccttatcttatttttacaacacttgtgttgtaatttattacaagaatgagtttagaaacttagaaaagaaggtgaagatgaagactaggaacaacaagagggaaatagttgaataatcattcttttttgtactctatttttattaacgttattgtgactattgaagtaatcatcagatgtacatgtttatgtccaaatctcatgtacatgtttctgtcgaaaaaaaaaacgtttataaagtgaaatcaaagttagacttcatgctcattacaaaaaatatttttttggtatagaggataattcagctggtaataaaattacaatttctaggaataaacataaattacaacttaacataaaagtagagaggtgtttctggtggcacacataaattataatttaatgttacctagcaattgtatccactacaatcgaagcataaaggaataacttcttagtatccactcctctaaatcttagatcccacaaaaaagtaacctaatcccaaacacgagctcctgaatccattacaggagtcttgttgtttggagttccacaccaactcattgcaatgcttccaaattgaccacaagatcattgttgcttcaagactttctgatgcgttctatgtcttcaaaccaacctcaaaccagcttgtaaaaaccatcgcaccaggtgcaacagatggtacatgacatcggctccaacaactttgagcaaatctacaccgaacaagaacatgcaaa

SEQ ID NO: 119915 - DNA, 923 bp, Cannabis sativa
tgcaactttggattaatacctccaagctcaaagatcacctgccatggaacataaagaagaaacaagaagaaagaaatgtaatcccaaatctccgatcaaaaggtcttttaacataatacccagaagttgtatttatacccatctaaaccaagaaacccgaaatagacagttgttaccatctgaacaattaaaacccaaaatatctttgtcgacgtggactaacactaacagtggaactccagacaaaacactacgaatctcagacgcaactggacatgaattgtcactaaagaatatacgggttcttccatctctcccttgaaaaattatggtcaatgacaacaatattaaagaaaaacagagcaaccatcaaaatataacagagtaaacaaacaggaaaaacaaacactttaagcaaccaaacaacaaacacaccactttacacaaaggataagtatttctcccccttcattgagcataatccatgtcaaaaataatacggtcctaaaacaaatgctctccctaagaaaatgaaaagtttatcaaagagctttccctgaatggcgacagaaaatgcaacatagactcctcattgcaaggaaatgcctaagtatccattacaacattaaagaagaaagtcaaaccatctcacaacatgacctaaaacatatggatattagatataaagaaatgagagattgacaaaacaaaataatcaaattatcacaatattacgaatgatgcttcaaatgagatttatttttatttcaatcaaaaacatgccaaatgatatatctcaagaataaacatgtttaacttgcaaagaggaaacacaatgagtggcctaatcaattaacaagtgagaaatgatcatttgagcaaagaaccaattcattcaacttcacaatgagccatacttaata

SEQ ID NO: 119916 - DNA, 748 bp, Cannabis sativa
tttctgaatatttcatttttgatattttgcagtatgttaggatgtaaggtgtaaattgatattgccttagttgctcggcaatataattaaattattatggtttaaattaactttaaaataatcaatactttttaagtagcatttcgtacaatgtacatcatctcaatattttgggtatatgaagagtttgattgagatcattggagctatctatctgattggggaataacaaaagtatggtccttttagaaagagaaatactaaaaggcactactggtgtctagcattctcctcagtgtcataccgctaaccaatcgtagactgccgcctataaaaggtgttggactctactggtgcccaataacaatgctctaaaaaggttggaagtgtgtactgtctacattgtgtcacttctaaacgtaaaaggtttcccccaacagagatagcttatatggtcaagtatgtggtttggttgttatagtgttctggtctcaaaatattgtaaaagttaggtatggagcctaagtttaatcatattctttttgtttttttacatatttttcttcaaaagtatttatttggcacgatttgatattggcagagtcttgagtaaatgaagaaaccatttccatttaagatattatgaatatgcaggtggtgtttcatgcacgtatgaagtccaaagagccatacctgttctgaagaaagcgtatggtgacagcatgcgtaaagtgttgcatgtgggccc

SEQ ID NO: 119917 - DNA, 1040 bp, Cannabis sativa
gtcaagttatttaaatttctgcaaatatttttatattctgcctgttttgttttgtcgctgcaaaactggtttctgcagtaacagaattacattctgcttctgcatgcgtatacagatttatattttcatatatattattgacatttgcaaaaactcgatttttcagaaaatacataatgtatatataatgaaacaaaaggaaattattttagcaaacattaggagagacaattacatataattacatcagattattaacctttaggaaataaatactgaactactaactttttcaagaaataaatttctaattacttattgaagaaagttccacattttagttagagtaatctattaatataaattgtaaaatttaacaaataaactgaaacatggaaaagaaaaaaaaatgaaaagaaaaaatctcaactgtacattaaataaaattttgtaaactgttaaatttattttgaattgctcagtatatctattaaaggttattttcaaatgtctaagtttttttaaatataactactaagataaactaaaaatttgaaatttgaattgtaatgtccctgctttaagcttctattgggtcttcctccatggacttacggcttttatacacgggcatgccactctgactgcttcaaggactgacgactgaccctacagaccaatacgagtatttctagcatgctttgtcctcattcgcacgctttctaagaaaattttccaggaggtcacccattctaaaattattctaagtcaagtacgcttagctatagagttctttcgtgatgatgcaccttgttgaaataggtagtatcaatcaatccatttaagccatctccaactgtgtatctcatacctacacagtctcagaatcatcacatttgaccttccttaagcgatatggaattgtacagcttactcggtattttcaatgtcctcgtcgactacacttttggctaggtcaagactctaataccatttgtaacgtccccgctccaagcctccattgggccttcccccacgga

SEQ ID NO: 119918 - DNA, 1847 bp, Cannabis sativa
caactaacatgcaaaatgataccctggatcggcacccgtactctgacccagactcaacccaaaccccaggggtagacttggattcggaccccaaaccctattaggggatctttgtttagagtttgttagagttagttaatcactgttaagtggttgttattttcggttagttagagttaattaagtttgcttttctttcaattggttctggtgtgtactcaatatataaaaggacatatttcttgcactctgaacatattgcaataatacaatacagatccctttcggtctttctctttcttattgttgttctctctttcttctttctccattgttgctgctatgactcttgaatcatgaatagaaggattaacaatcctaatatggtatcagagcttgattttcctccgttgagtgtgaacatggcgactattggcactcagaatcaagcaaatcaatcgaaccagggaaacactgcgaattcgtaccctgctcctcaaagaaatcaaaatcgagcttcaaatgagttctcccctgtctatgtataataccagcggaatctgaattacaacttggcaccaagataaaagttcttcaaactgatttggggggtgggggggagaatataggtcattcactaatacactcaaagaagctggtattatacataggaacccttgtcctactaccaatgaacaaaatggcctagctgaacacaaacataggcacatcgttgaaaatggcctaactttacttgatcaagcatccatgtcattaaagttttgagatgaagcctttaggacagctgtatacattcataatcgattgcctacacctgtccttatgcataaatctcccatagaaacacttttcaatatcaaacccgattacagcagctttaagacatttggatgctcttgctatccaaacattaaaccttataataagcataagctccaatttaggtcctctccatgtaccttcattggttatagcttaaatcataagggatataaatgtttagatccatcgggtagagtttacatttttagggatgttatttttgatgagtgtacctttccccatgcttcccaaaataacactcctataacatctgatgtcatgtcatccttctatccttctgcaaccattcctactgtgtctatcccagcttcccagtccaatgactatccacacatggaccctgtttctgtcactaataactctctatgcagctcttatgtgcctctgcaagttcctaccaatgtctccaccatccctactgtatcaccaacaacaacagctattcctcttccagttgcagatgttgcacatacatcttctattgcagataatccatcagcaccaacacagtcccctgctacttatacaaatgctgatattactgtagttgacactgctgctgtgcctacaagtgctgaacacacatctgctactgcagatcctaatctgcctgtccataacaacaccacaactgctctcctcagaactctcattccatgcagacccgtgccaagtctagtataaggaaaatgaaagtttatttggctaccaaagagccaacaagtgtcaaacaagctttacaaagggcacactggaatggtgctatgtctgatgaaatggtggctttaaggaaaaacaaaacttggacatatgttgtattgcctgaagggagagaggaaattggttgtaattgggtttataggaagaaagagaaccctgatggaaccacttcaaagtacaaagctcgtcttgtggctaaaggttttcatcagcaacccggtttcgatttcactgaaacctttagccccgttgtcaaaccggtc

SEQ ID NO: 119919 - DNA, 1820 bp, Cannabis sativa
ggtttgatgtacacccctaagtagaatagtcttgtttcgcaacaccttttccttctggtccaggatctaaattggttgttcctcatatgacagattagtttgaagctcgatatcttcataacttaaaacatgaatcgtattagacacatacttttgtagcatcgaaacgtgaaacgcgttatgaaccccagatagagcaggaggtaaagctagctgataagctacctaaccaactctttcaagaatctcaaacaggccaataaatcacctctttccaaacctctgaattcccttcattggggacacccgaaggaaaacaaaatccctaacttggaattcaatatctctacgctttggatcagcatagctcttttgtctactttgggaggcaagcatacgagctcgaatcttctcaatagcctcactcgttctttgtactacctcaggtccaagatacctacgttcaccagcttcatccaagtgaatgggcgaacgacactttcttccataaagtatcttgtatggtgccatgccaatagtactctgataactattgctataagaaaactcgatcagaggaagattcttgttccaagaactttcaaaatccatcacacaagctcttagcatatcctcaattatctgaatagtcctctcagactgaccgtcagtttaaggatagaatgctgtactaaactttaatttggtacccattgctcgttgcagactttcccagcacttggacataaactttggatctcgatccgaaagtatcaactttggggcaccatgaagccgaactacctccttgatgtatagattagcataaagatctactgtatacgttgttcgcactaataaaaagtgtgttgactttgtatatcaatccacaatcacccaaataaagtcacagtaccctatcattttgggtaatcccatcataaaatccatggtgatgtcttcccacttccactcgggaatctttagaggctgaagcaaacccatcggtctttgatgctctgctttaatttgcggacaagttaggcatttcgacacataatcaacaatgtcacttttcatacctggtcaccggtacatgaccttcacatcatgatacattttagttgtttctgggtgtaaggagtacggtgtagtatgagactcatcaagaatctcctatttgatatttttgtcggccggtacacaaaccatgctcttatatcgtaataacccatctgacaaaagtgaaaagtcttttgtcggtctgacttctaacttctctttgtacccctatagctcagaatcactttgctgggccgatctaattcttcgtaataaatcagactgtagagtgatgttagcaagttttccgaccacaaactcaattcccgctctagtcatatcttcagccaactgtgctgaaatcttctttaattcatagacttttcctggaccttttcgacttagagcatccgctaccacatttgttgttctagggtggtagagaatctcacagtcataatctttgactagttctaaccatcgtcgttgcctcatatttaaatccttctgggtgaaaaagtattactcttgtggctagtgtagattttgtacttttttccatacagataatgatgccaaactttcagtgcaaaaacgactactgccagttcattatcatgagtaggataccgctgctcataccctttcagttggctggatgcataagtgttatggtgagatttctctcacctagaaactcgagaccagactcctatttagaggacacgtgtattcagttttccaagaaaaactgagat

SEQ ID NO: 119920 - DNA, 3338 bp, Cannabis sativa
agttctcatttcatcaaattcatcaaaaaaaaatatatatatgtatatataaattaaattgatgttacgtgcaatacatgtgtcgtataattagttttattgttcgggttagggttgacaaatttaaatgcaagtaaaaaaaataaatcgatacctaatatgaaatataaaaatatatcaaataaaatatgatacgaatacgacacgttgatacacattttacaacttactcactaagtttcataaaattttacattattccatatatcaaaataaagttaaacttagactgttgcattatgggtaatatgatgcactttaaaagttggtgtacttttttggtatttttaacatttgaatagttataattttattttttttttatatgataaaatatatattgttgtagtcatttaaaatatataataaagttttttcttaaaaaaaaaagatatataataataaagtttagaaaaatttgaaatacactgtagaaaataaggttcaaataatatattttacaagcgtataaaacataaaaagtatctgtacaataaaatgtttaaactttattttgacgtgttataaattattctgaatttctcaaaaatttataggaaatataatcttagatatttataatgtacattgtcatataaaaaaaatcaaaattatctaatatctatctatgtaaaaaaagtaatgatacttgcacacataaattacacacaaatataatacacatttatgtggtaattaacttttgataagcataaaataaatgattcggggccaaactgcaaaagtaaaaataaagagaggacattaatttaattattagtaaataaaatattacaaattacaaatttatatatatatttttttttttgaaaattgaacaatacaaaaaaaagataatttgcggcataaatatttaaattttattcttggttgcatataaatgtacttaagtttaatttttgacagtaataatacttatgttttatttttagaacttcggtaggtacgtgaccgttaactgcttagttaatatccacgtatttttttattgtgatatatttaaatgattttttcaataaaaaataaaagtttaataatttggactaattaaggattgtcatgtggttattgacttgacagataacaactagatacctacagaaattccaaaaatataactttagtattattaccgttaaaaattaaacataagtatttctctaatcaaaaattaaattaaatatttataccgtaaattattcaaaacaaataataaataaaacaaacaaacaaaactacatctacaagatttgttaggcatccaaaaagcgaaaatgacttggtaaagcttaatttgtttggttacaggatgaattgtagcaagtgtccaatagaagttccaaatctaatatatacaccactaacaacaacgttgaatgtctcaaagagatatttttgagtgttgttttattttttttattttttttttagtaaataccattttagactttatattttgcaaaagtcactagttgtacttcctgttttgttaaataacaaaatgaaccctgtattttttaaaataacataaataagactttaaactgattttttgtcaaaataaaatttaataataattcgatctaaaggtgttatgacaaaattgtttacattttctgtatttgttcatgttacgaattgtcttcaagttggttatattaaaaaaaagttatcaaaaattaagctcaagttcctatttttactattttagaaaatacatggttcattttgtcatttaaccaaacaaagggtccaatcaattacttctgtaaaatatagggtccaatatagtatttaccctttttttttatacaaatagaatgctttcattttgaataattcttttttttttttttcgtttgagtttgttgtttcatttctttcttttactagaatagaatgcctcaaacaaagcaccacaaacaacatattaaatgcctcaaagggataattttggagacttcttttattatttgtttagaaaaaaaaaatatttcgattttgaataattttttttttgtttactagtagtgcaattcaatattgaggctcacatgttttattttaattaataaatattataaaaaattattaaccaattataaagtgacacttcactagtgctaaacatcttctgccccatatcagttaatgctctattatatttgtaagagaaatacgaaaacacataagtgtacttaatactcttttaggttataccggtgttagtaaaatcaaatatcatgtgctatataatttattatattaataattttctataatcattaattattgtcaaagtaaaaaaattgaactcatgacactttataaaaattttgaatgccatgagtattctttagtagtatcttttatttcttttttaagaaatttgattgctattcttttttcttaaaaaataaattctaacaaaaccaacaagaatggagccctccccctctatatatgcaaatgattttaaactttcaaaatcaaagagtgcatagagactaggttgggtaattgtcccacttgaaattaagacagatccaagttattattgggagtaagttgaaaaaaaaaattaaacccttatataatagttttttagtctatactaataataaataagattgtatgttgtagtagtaaatatttctttcaataaaaagatgtcacaagtttaaaattctatttcatttcaattttctttgtttttttcgaaaaaaaaaataaaatgcttgtgatttgaacataacacgaaggtataaagttaaaaggtattataacataagacatgtaacattttacattttattatatctaattgatctacaatttttattaaaattttgaagtttgacgtataaaattaaaagatgtaagtgtcccatttgaattttgcttctaggattgttaacggtgtccaataacacaatgagtgggcgcgaagggatctaatgggatgaccaacgattagagttaggggtgtgataaatgagatgaccaacgattagagttaggggtgttcggggtgtgagtgatgcgatttttgactattttttcaaatcaatccgcaatgtagtttttttaatttctcaaatcgcacccgcattgctaaactaaaacattgtagaaactgcaccgcaacaaatggtgtggtgcggtgcgattttgcgatttctacggtttgaactatcactaaataattaaactatcacaaatacaataaagcttgagcaacacttgtcaaaaatacc

SEQ ID NO: 119921 - DNA, 1030 bp, Cannabis sativa
ccccaaagatcagagacaaccatttaaagagggacaatgtaaatagtacttgagttcttaggaaaaggaaacttatgtattttgcctaaacaacaagcttgacatatagaatgagatgctttatttgcacaaagtatattactttaattcaatacagacttgaccactttctcatatgaatggccaagacgattgtgccaaatatcaacctgggaaatacaagctttattgtttaaagaaattgtactattacattgtgtaggtgaggagacagtagttgtaagtgtttagggaaactggatttatggttgttgacagttgctagagtagacaggtgtggattgagaggacagagggtgcagctgagaggagttaaatgaatacaggccactctggtatgtcccaatcatcaaaaccttgtgatgcacccgatccttaacaaaacaaacattagggtgaaacgcaaaaaatacattgttatctctagcaaatttagaaaaactaatcatattttttgttatctctagaacaggaagcatgttatttaaaatgaggggataagaattatgagttgcagataagaaattcgaataaccaatatgcttgatagacaaacctgtgccatctcctacaaacagttgctcagatccttcataggtagagcttgaagccaaattatgaacatcgggggtgcaatgatttgttgcccctaaatcgggataccaattgttgtcatttttgccagaagtttgagccaaattagcttgaggagagggggcagatgtaacaccctaacttacttaggcatgttagcgtaatttttaacgtactgtgcagctcattgctaatcaacgaggttatcaaaaatcgtgattaattaaaactttgcttatttaattaaaatcataaagttacgtacatataaaattccgggaacccgtttacaaaaacatttacaaaagtttaactatacatgtacaaaagactgtcacctagcgactacacaataaaagccttgatgtcttaaaga

SEQ ID NO: 119922 - DNA, 980 bp, Cannabis sativa
gaagaatggagtagagagaaaacaagggagaaaatgtaaaatggctctgattcaatatcagagagccctgctgctatttatattgaattcaatattaagatgagttagttacagatgtaagccacagctgagaacaggaaactaatacagttacagcaaaaaactgacagtgtaactaacataacagacaacagtaactaacttatcctaataaaaatattatgtatgaaattaaattttaattttttttattgtatatatattacttgtaattaatgtaaaaatatgaagaagatatataattttatctttaaaacaagataaatactgataaaaaaaaatatttgattatctaaattatgataactctaaatttatatttattttcttatagttattatttttttatatatagtttctcaaatttaataagattatcttagcatggttagagagagtgatctaactttcaaactattaatcaagctactaaaaatataatttttttaataattatttaaatataattaatgtaagtaagaaatgaagagaggtttcttattatatatgactctaacatttatatttaatccatatgtccaatacttgtacactatatttttatttttattttggctagcttcctcgaatttttggtaacccaattcaaaaaattatatagagttaatttatataaacaagagttttttgcggctaaactctctcaattattatttcttttgtatttaactctctaaacttaaattttgagagtaaaatcttttaaactactgaactgcttgcaaatttaaggtgtcatctattttttacagttaactgcctatatagactgcttgtgtggacacttttatacaaatatcaaatttatattggtacacttaatattattattttaaaaatataaaaattatttcaaaatttataatagtttttagtttttttaaatattttattttatt

SEQ ID NO: 119923 - DNA, 1312 bp, Cannabis sativa
tgttgtacatgtgtaacaataactacaattatatgaatcactactagcaagagatcgatatgtgatgtggtcaaaggatcaattatttgttatatttgtgggtcatcttctctttagggcacttattaacaataattttcagtctcactattgatgtgatttccccaaacaaaaagattttcattgaatgtagaaaagttgaaaatgaaatttaatttgaaataacaatgtatactaattaatattgagctaaaagagtgggatgatgcttacaatttttagatcatcatgatcaacttttatatatatatatatatatattatatattttagttcataaatttagttggacacttggagctagcataagatgggttttagaggaccaactaataaaatatcttgctagcttttcataaattttatgtagggttcaacaaatttataaccctagcttattaatatgtctagatacaatttttgatatagtggtgtgggacattttcaaaattgtctattaggatattaaatgttttaatatattttctaatatatatagtcaaatttatgatcatcactttgcataatatatatttagtacttgtctttattgtaatatatttttttgcaaaatgatcttagctacactccacacctatatccaccaaaaccttatatatatatatatataaataaatatataaaaagcattgctattatatcacagtgcttaggatcactatattataattttataaatagttcatgattattaaaagttaaaataaataaaactttttttgaattacatcagatataacactatatgtaaatactaagcataattggtgcccttagcatttacttagcatttgcctattgaaagtcattttatgaaaattatcaatatatagaaagctattcctcgaagtgtaatatataaataaaaattatatctttcacctacacaaatatcttcatatatatataaactaactaataaaaatgttatttaataaaaatattttatctatgtatgttattttttttaattatttattaaataaatatattttatctatgtatgtcattttttttattaaataaatatatttgatctatgtatgttattttttaatttcattaaatcaaaagaacagagttaatccaatattaacaatataaaaaattacaggtcattttaatatttcccttatttttttattggaatataatctaaaatttgattctcttgatatcttcatatataatttgaatcaatttttttctacaatttcaaggataaaatatt

SEQ ID NO: 119924 - DNA, 890 bp, Cannabis sativa
  modified_base (26)..(34): a, c, t, g, unknown or other
ataaaatggattacattgaaatggannnnnnnnnagggcataaaacccaacaaatctgtcatctataaaggccacatgggaaatgtgccacctaccaatccaacggtggggcctcatccccatgaagatccatcaagggtagtccatgcgagaggatctgcttataaatatccccaaagatgcacaaggcagagaggttcagattcggaggcttgactttacattccattcttttgctcttcaccttgagactgtagactaaccctttgtaaaaaaaacatcctattgtaaccccattatcaacttcaaaatatctctactaagcttcctcttctttaagaggaacacgggaagtcggggttaaagtccatactttatttatttgtacaaacaagcactagccgatgggccttataaaatagactcattgaccaaggataattaacactcgaaccacgtaaaaatctcttgtttgttattgtattatttataccttcattactttcttaagctctaataatatgtagtttctgaaaaactcggtaaacataggggttcggccatgagttgttcattctaagtcattagatgtttttcatcagcccatttagcacttacactatacctaataaatctctataaatggaaaagtatagctcttatttttcagataacatcaaacttcagtctcttttgtcagacaactagaaaataaagagagagcttcttcttcttcttcttctcccaatttcgaaatttttgttcttatatactgaatatttcgaaggcatgatgattgagagtattctcattcatgtcaaagcaatacctagcatagtgtggaagattgtgtctaaccaaactggaggagagaagatccaggttcagat

SEQ ID NO: 119925 - DNA, 2195 bp, Cannabis sativa
tgtacagtttaaggtttaagatataggacttagggtttagggtatcgagtttgtggtttagggtttagggtttaggggggtttagggtttaggatttagggcttaaggtttagggtttagagtttacgggtttagcctttagggtttacggtttaggatttaggatataggtggcatagggttagggtgtagggtttagggtttatggtttagcttttaggcttttgggatttgcatttagggtttagtgtttatggtttcgcgtatagaggatagggtttagggtttagttttattgtataggttttggatttaggttagggtttagggtttacagtttaggtttgggattttgggtttagtgtttaggatttaggctttagggttttgggtttagggtttataacttaggatttagtatttacagtttagggtttcaggtttagggttttacatttttttagatttaggatttatggtagagggctttgagttttagtgtttacagtttagagttttatggtttatggtttatggtttagggtttagggtataaggttttgctgtttaaggtttagggtttagggtctagggtttagtggtttattatttagagtttagcgtatagggtttaggggtttagtttttagtgtttagggtttagggtttatggttttgggtttaggattaagggttttaagatttcaatttagggtataggatttaggatttatggttttgggtctaaggtttggggttagggtttagggttttgtatctattatttagggtttatggttagggttttgggttttggatttattgtttagggtatagggtttagggtttatggtttagcgcttaggggttagggtttaggcgttagggtttggggttgagtgtttagggtttagggtttatgttttatggtttagagtttacagtttagtgtttaggatttatggtttagcgtttggggttttgggttttgtgtttagggttcaatgtttagggtacaaggtttacgtttatggcttaggggtttgggtttacggtttagggtttagagtttaggctttagggtttagtgttagggtataggttttgggtttagggtttagggtttaggatttagggtttgggatttaggctctagggtttagggtttagggtatagggtttatgtttttggggtttatggtttagggtatagtatttagagttttagggtttatagtttagagcttagggataaggtttcaaggtttaatgtttagggtttagggtttaagctttaggctttagggcttagggtttagtgtttagggtttaggttttgggatcaggattaagggtttagggtttagggtttaggatttagggtataggggatagggtgtggggtataaggtttagggtttagggttttgtgtttaggtttagggtttagggtttagggtttaggttttgggtttaggatttatggcttagggtttacagtttagggtttaggatatagggcttagggtttaggggttaggtttcaggtttcaggcttttttgggtgtagtgtttaggtgtttagtttttaggatttaagctttatggttttttgtgtaggattacgggttttaagatttggatttaaggtataggattaggattttttgtttaggatattaggtttagggtttagggttttggaggtttagggtttaggttttaggatttaagcctttaggtttaaggtttcgagtttaggggtttagcctttagggtttagggtttaggatatggggattatggcatagggtttagggtttatggtttaacttttagggttttgggtttaggggttagggtctagggtttagtgtttatggtttatggtttagggtttagagtttaggatttagggtttagtgttacggtataggttttaggattagggattaggttttagggtttacagtttagggtttcgggtattcggttaagggtttgggggattagggtttagggtttaggagttagggcttaaggattagggtttagagtgtaggggcttagcctttagggtttcgggatcaggatatagggtttatggcatagggtttaaggtttatggtttagcttttagggttttgggttttgcatttagggtttagtgcttaggggttagggtttaggcttta

SEQ ID NO: 119926 - DNA, 1515 bp, Cannabis sativa
  modified_base (32)..(65): a, c, t, g, unknown or other
atcgttttagaacgttcatatttagggtgttnnnnnnnnnnnnnnnnnnnnnnnnnnnnnnnnnngtaaaataaattccaacaccataaactacggttctttaacttataagaccccactattaaacattcaaaacctttaggccaatacattgactcgtcgactaggatttattaacactcgaaccacgtagaaatctccatctctgttacttaactacttatttaagttcttaagctcttctttaatttagtttctaaaaatctcaataaatatttttggtgcttccattgagagttgaagaaagatttgaagttgccttacatctgtaaaaatggtggctacccaaaagactatcgttgagaacccctcctttatggcaggatattgtcatggatgatgctattgcgctccctccaaggcacaccaagccgagcaatgtgagggacggagaagcgtctaaagctggcgaccgaacggttgaaacaacccaacatcaggacaatttgttgagaaaaacccaaaagacgaggaagaggaggaaaatgacgacggtgaaatcaaagatggatattagaaagacggatattattatgaacaagaccccgaggtggtttgagtatctagtgagttagctgaaaatcaacagaagctagcagaacaagaagctttctctcaacgaatggagaaaatgatggcacaactgcaagccaattttagtgatatagaaagagactctgaggaagatgatccaagtgagcatgttaacagggaaaaaggagcaaaccctactgatgttggaacctcagctcctacaaaggataagggaaaggcaaaggtaggcaagcctcaaactaaaactatcccattacctcctaaatacaacatgaacataaccaaccgacccttccagacaaagaaggctaccaacgcctctaggcttggatgcccttctactccgcgaggcccaattgtgcataacaataagcttggtactcaagtgcaaaggcctaccgttaaaggaaggaaaaattgccatggtgattttgttaaccaagatgatgggatagaagaaatttttcctgaagacagttggtctacaattgacctccggagatgccttgatgccaagcatgaaaaagccaaaggagaaaaggcgagacctcgcaggaataatctctgaaaccacatcaacgatagaattcgcagacgtgagcttccagatagttataccaagagattggaagagcaaatttctgatttgacaaaactggtccgaaaacagagtggagccattttttgacttagaagacaaagatctagaaccatgtttcaagtgaaccattgacgccccactaccaaaaaatttgaagatgccacaaatggagttatacgatggaaggacggaccccagggctcatctgtccaaatacaaccgtctgatggaagtggaaagagttagtgattgattagagctcaaatttatacatttgactattgggttttatgccctaa

SEQ ID NO: 119927 - DNA, 2396 bp, Cannabis sativa
  modified_base (561)..(570): a, c, t, g, unknown or other
tcagcatctccactcaagacagtaaaacccgatcccctctccaaacaagccatagtaaaaggacaagtaaccataagaggaaatgtagtctcgacatctccactacaaagaggacaagtactagtcacattaactcgcttagtttgaagtgaaacaagagtgggaaggcaattagagagggcccgcccaagaaaattcttaacttttggaggaagatttaaataccaaaacttcttacaaaaaccagagttgtcttgagaattccatcattaggactttatgttaaccaaattctggagttaacaaaacatacataaactagagaagacaaaaaacaaatgatgtagagtagtagcaagtaattagaatagaacataattacctattaatatccacacaaaaataacgtgggattaggaaaaactaagttttcaatttaatttcaagtacattaaatttgtggatatataattacaaatataatacatatactcttaatttatatgaattacctggctagaaattgtgaaaaatctcaaataatattaataataataatannnnnnnnnntaataataataataattgttatactcgaaattcggctgtacttcagaaagcgacacgtgtcgatcttagaggatatgaatcaaatataatggtaattaaattattaaatgtaaaatgaaataactcattaaatatataataagtagagtatgtccgtaactcgctggctgaatagtattaagtgagacagagatatacaaactatcaattcatgcattgacgataaaccatcttgcctcaaaagacatagtacccagagagctataaacaacacatagtatgtaaagaagtatcgacgagacgaattcactaataaaatacttagcatacaacccacgttataacaactaagtgtaataacctaaaggacatgattgtccaatctgcaaggccttatgctcaaagagcagtttttaaattttctcattatactggtgctcataccattgctggaatacgagtcatccaaagtcatccatctatgtacaaggcgagatacctccagcgaggtacctttggaaggaagtttctattcatgtcaacgttgtccgccttaaagatagtttaagtcacaactatgtgattttcaaaaataatttacacgtatttaaatggagcgtatttaaagcccacaattttggggaatattgttatgggattcaaatttaaatgtaattaactacctacctatattgctataaatatgggcaaattaaacaaaaaaggggggacgaaaatcttagagagaaaaaagaagtttactgattgtaaaatcctaattttttgtatccagaaatatcttaatcagatagactcgtggactatgcagagttaactgcaaaaccacgtaaaaaatttaatgccatcattattattttctttatatcggtgcttgatttattacaaaataggctcataatcgttaatgaaaatctgcgttaagaagttggtgctttcattgagagcctacgtgataaaagctcagaaaaatccctcctaaacaaagaagaaagatttttttctccatggctgatcatgaggaaagcgataacagttgtcctgaagagataaatcgtcgtcctggaaaaattcaatgggctcacggaggccacccacttgaagaactacacgttcaacacgatcgacactttcaagaagaagccaacgtgatgatgatcaaaacccaaaaattgggaatgaggaaaccaatactgaagctggtgattatatacctatgagtgaggatgcatatgaccccaccaggtacgtgccattggttgaattggaaaattgccaactccggcaacgactgactatggctaacaaatgaaacgctgagttggagagagagggcgctgcagcgagggcgactcaataaaatgtcgcacaaaattaacatgatcctggagtgagaaggtcgcgaggtagacctcgaggatcaagaacaaggaggcaagagagggctcaggaaaacccccagaacactcaggaggagtaacctggggaaattggggatgttccagaagatgaacaaccaaataactaggcacctcgtcaagaagtacctcagagaccctgaggattcacaacccaagggaatgaaaacaatgatttaccggagccttctcgtaaaaacgagaatagaagacaacccaggactagggaacaggaaatccctcgtggtaatgaaagaaatcttgggactcaacctaggacaagtgggttaccaccgagacaccgtcaacgtccttatcgcactaatagggaggaggcgtatgcacaccccatcaggggacatgtatcaaaccttttccaaaggagaaggc

SEQ ID NO: 119928 - DNA, 2722 bp, Cannabis sativa
atcataagatatcattattgtttttatctatgagtaatgtatattttaaaagaaccatgtattatatataactttttttattattcttttatttagaatatgaaatttttatatgcattcaatttatgattatatgatttgtttagtttcaattattttatttttttgctattttaaattcaaaataaaaatatcttcattaaaatttcagtaaaatatttattgataattaattatgaaaagataataataagttattcaaaaaatataataataaattaatgatatataaattgacgttatataagtacactagatacgaattaaaagtatttatatagtataataaagttaattatttatcaataataatattaatttaaatgtacatgtaatttgttaataacaaagtttttcataactatatatatagtagtaaaattatatgaatatgattatatttattctatagtttcattatcaagtctaccaatttaatctattttctcatttttaatagcatatatcatttgaatttcaatttgaattccatcttcaattatatatctatccatctatttaaatttgcttcatatatttttatttatttatatatttattttttttattttttttattttattttaaattctccctttaattatcttttttcttttgtatcttctatcaactttctccttaattagttctctttattttttaactttaaattatttctttattaattctcttattttttttttatttttcattctattttatttaattaaaaggtcaataattaattaattttttttttttgcataatcatgataactaataaataattatatatattaaaaaagaactattaatctacatattcaattgtatagagagaaaatacatacaattaatattaactaattatccaaaaatagataatgaataatttattttatgtatagagcgaacctatgatattaatgatgactacaagtgatacgatgatggcatcaactttaaatatagtagtgaatacaagtgaggtacagaaataacaattgtttagaaattatataatgtcttttctataaatttattatcttctttttgttatagatctctatttttgtttgatgattgtttaatttcaaatttctcttcactctaaagtacatttgaagatatttctttttattattattattatataagaaattgtataataatttttttaagaattcgttagatttttctatataaatttatggttttttcaaaccaatatttttacaaaaaaaattatcactaaagaaatacaactacacgcgaagcgcaacttgttgactagttattaaagaatcatgaccaatgtacgcgcgcatgaaaagagagaaattacaatatgaaaagatatcttattatagcaatttttccttttttctttctcttattattttttttttttaaaactaaacttaaactacctaaaaggaactagtataatcaaattaatttagttgaagaatatatcatttttttaagggatttatacaccaaatactaaaattttaaattctttttacttttttagtgtggggcaaaaatttttttcataaatattcgttgagtttttactgctgtttcacttttgttttttagttcttccactgttttttcaattgttctattttgttattttattgttattttacataaagatagtatttctttacaaaattctgtatagtaaaattataaatatttattcaaaatccaatatttttgtaagaacccatttttgtaatagctctaatttttctttttatgcaataaatcatttattttgagtgttaataattataataaaacattaaaatttttcataataggtatttttggcaaaactttgattattaatttatttagtatttactattaaaatttatttatttttattaaacttttttccaaatccaattattaattggatttaatcagattagaaaaaaaaaatgttagaattgatgggatgcccaatcctactaacgatacctcatccaccatcgcactccccaaacccagattcccagcttcgtaaccaataatgattctcacctcccctcttcataaacccaaatttagaccgaaaaataatctcccacccgaagactttgtgaaagccatagataaagaccattaccactctatttattcttgtatgatatagaatagtttagtgtactatataaaatagagaacaaaaaaatttgagacacaggacaaaaatgttggtgtatgagatactgggtaaaaattagaactttgtacttcttaaaataatagacagcttgtattcatttaaaattccaaaccaaaaattgtcattgacctatatattcattgatgcttgtcatgaagataactcatgtatttgtatttgatagaaatttttaaaagcaaaggttttaaaaaaccatgtctaataataaaataggataatatatggcttccagtcaggtgcgattgggtttgtggtttctagttttgttggtgcgatcgtaagactgcgtggttgggtgagcgaatcattcttggtagcgaatttaagtttctgggtctggagagtgcgatggtagaggacgtaccctgagtgacttttttttttttgagcaaaaatggtaactttattaataagaagattcaaccattacaatag

SEQ ID NO: 119929 - DNA, 709 bp, Cannabis sativa
taacccatttatgacacgttaaagtactaaaataactttaaataggtcattaacgggtcaatatcgtgttagccgtatcaacccgaacacgacccgaacctatttaaggcaaatacaaacccgctaactctcgtgcgggtttcgagtcgtgtcatcgtgtctgacccgttttgccggtcctagtttgaataagttatatcattgttgtttaaatttctgaggacagttttgtctcatgctgctcgctgactttagcagtttatggtttgataaaacatgctcttcagttagacgatgacccttctaggttcaaagaaattcttacactatttacaaatatttgtatcgtaaattcacgataaaaaattaccaattaaatataaaatatgctcacttttttcattatagtgatatgcttaaatatgtatagttaataaatgtagtgcctaaagttactcataattatatggaagactaaagtaaatcaaaattcaaataaaaatataaattatattacaaaaatcagtataatataagagtggctgtgtcgtgatttaaaccgcgtttatatatgaaacttgaaatcgtaaattgtaaactacactgcacccattatcgatcataatcggtttgcttagggctcgtttggaacggcatattaagttgtattgtattgtatagtattatattgaattgtattttatgcaat

SEQ ID NO: 119930 - DNA, 900 bp, Cannabis sativa
  modified_base (870)..(870): a, c, t, g, unknown or other
gattacattgaaatgaagttttatttggggcataaaacccaacacttcatggtaagtggccttattattattactattttttctctcctttcttatattcatatattcgtaattctccaggcttctctcatctcctttgtttctaatcgatcactctcggagcggataaaatacgtggaggtcaaggtccaaaaactattatcccaatggagggttgtgactaagcaacgagataacacccagcaaaatcacctgccttaaataagaagctgagaagggaaaggaagaagtagagaagaccatcaaagcccaagttgatgactttgagaagaagcttgctgagaaagaggtcaagaccgcagaacgatgcaacaaagttggatttcgtactttgtatggggcctggatggcgaatccttacatggacacaagcttcctggaggagaaggaagagaagactctggcttttgtgagaagtccaaggcaaaggaggaagaggctgatgaagagaagaagaagaagatccatccaagtcaccctccatgtagacttggtttttatttatctccttttttttttaaatggccttttggccgagacaatggtttgccccttaaggcacttttttgtaaagataaatttgcgaagttggatgaccaactttgcttttttaatgcctcatactttaaagtttaaacgttaacatgtggatgtttggttgcgtttcattcacaatttaaacaatcatatgcataaagtttactagaagtttccatctctcttatttatttctgaagctaagtagttaataaccttctttacgtgtgagcaacttatctgccctgcccttgtgtaaagcccgcttagttnaatttggaaattagcagttaatctggatta

SEQ ID NO: 119931 - DNA, 2064 bp, Cannabis sativa
  modified_base (1985)..(2010): a, c, t, g, unknown or other
aattggggtttttttaaaaaaaaaaaaaaaaaaaaaaaaaagcattttactatgttatttgatattgtgaatgtttaccaaaatttttaataactaaaaaaataaaatcaataatagtgtaaaggttttttttttttttttctttttggtagtgatatataacatgttaataattaccaactctattacaatatgaaactccacacacaacacccaccattcttaagtagtattaattatatatatcttgtaaatttgaatttggtgaagaatttaaggtacaatcacatcttaaatgggtattttagtagattttttatctatttcgacatatgagaaagctttcagtttaatttttttataattgcatgtgtagttaaggtggtgtttggtttgttataatgtaatggtaatgtataatggaataagaatggtaatagaaattgattgcaatgtttggtttgtagttggaatgaacattgtaatcagaattattgtatttagtttggtataatgtaatagaataaaatgtgtattgactaaaataatcttattccttttattataaaattataaaatattaaaaaaaaaaaaaaggtaataaagactttgactttttttattatatgtttattaaaatattattttttttctttgtaatggagtgtaattttaatggaaattacattggttttggtatgtaatcatcattacaatactcaatataataagcattacattgtaatggattacaaaagttaaaaaagaaaagcaaacaatataatgacatattcattaccattacgattacaattagagtaaaccaaacatcacctaaatttatttatgaccgcatcatgtaaatttaaaaaaaaaaaaaaatcgagtaatttataatgctgaaaataaaatttatatattttctcgcacacgcaactgtttttcttatgtgtagtaattaagtaactgtttaaactttatttttatcactttaaattattcaaaaaaaaatttgcatgttatcttaaatagctacaacatatacaattatgaagaaaaaaaatactaaatgtttttttagatgttgaaatagatacaagaatctactagatcgactttttagaattaaagaaattttcaaaaatttatttttattcaatttattatacaagattggatatcatgtaatcatatacctaatgatcaataatttattggaaggatgtaacaattatgaaaaaatgtggttttcaattattattccttgaaaattaaatggttaaaaatacaccacttcatcaatatattgcttgtgaatattatttgtgtgtggaaaatttaaaaatatatataatctaataataactcttaccaaacaaacatagagactagttttatacaatgtatctattctttccatttctctttgcatttatactaattaaacaagctattcattttatttttcttctacctagctatactaaacaataatttacaaaccatatctcaaatttgaaggccatcatgacttatcgagccttttaaaaaataaaattatatataatcatcttatgatccatttacatattttacttaaatattatacagtatatttatagaaatttatatagtatactcccttaaaagattacaaatttggtagattttctatctatttcgatattttaaaaaaaaatagtctatttttttatgattggagacgttgtaactatttagtactatacttataaatttttaaaattttttgaatagtttacaatactaaagtgagatctaacagttacttattgatgagtatgagaaaaattagtcgtgcgtataacaaaatgcgtagattttgttttttgtattgtaaactattcaaaattttcgtataatttacaaatgggtcctaaatataactataacatacacaatcattaaaaaatagggtaaatggcggtaaaacccccaatactttnnnnnnnnnnnnnnnnnnnnnnnnnnacccaaatttctgcgggtaaacccccaaagccactattctgttagcaatttacc

SEQ ID NO: 119932 - DNA, 3381 bp, Cannabis sativa
aaaaatataactgttttttgtagtgatattttgaataatttatagtactaaaatatatatgattcaaaaaatttgttccacaccttataataagagtaaatgcttcctataaattattcatcatgtgtctaactatttatcataattgtatttataggttccatcattccgaaacatagatgaaaatgtttatgaaacgatatgcaaatttctaaagccagttacatatttggagaacagttatattattcgaaagggagagcctattgatatggtgctcttcatcacacaaggtactatgtggacatttggaaatggcatcattcctatgaatcgccttcaaaaaggcgactactatggaaatgaactcatagaatggcaattgaactcaacattctattatgagtttccaatctcgacttgtaatctcaaatcgcatactaaagttgaagcctttgttttgatggcaaatgacttggaacatgtactctcgagttgttggtctaagttctctaaaagatattcaaccattgaagctatgtctaaaggcataaaattttttgcagctactactgtgcaacgaggatttcatcgttacatgaaaaataaaaaagcacaacagaagactatactcaacatatgtgtgaattgattatatcagtcttaattagggttgtaataacgaacacatacatcgcttatttttctttgtttcttggttgtaatattggccgtattgatttagggtttcatttgttgttgcagttgctcttgttttatgtttattattcttttttgttttgcacttaataatgtttatcttgagactagggtttcttttatagttctagaagttatcttcaattcaaatggtttttttttcttttttttttttttggttcgaatttcactattatacctagtttaattgatttaattgagtaaatatttatatatatattcattattaaacatgttttagaaaagattaatagctatatatatttattaatttataaaattgttttaattaatttttatatagctcaagttgagtattaaaaatagtaatttattaagaatttgatgtatttatttttgtgatatagaatattacttttgaaactataaaactatatatggatatagacttttaatttggtcccaaattctaattgagataagttggtggatgtaaatgttgtccaataaattactttgcaaataatctcagtagtaattaaagattaaatttgtatagtgtacaaaaatggaaggtgatggactaaattaaagagtaaaatttaaatgatttgagacattgatcatattagcatggaaagatagaaatgtaatatcgtaaattctattctaatactcattattaaccaaaacacaatttgcatgtatatttaactaaacaatatttgagctcatatagagtgagacaatatgggccttatcattttagctaaatagaagtccatgggctaagtttcttcgttgggcccaattgcttgatcaaataaggttgcatattattcttttgtttttttggtaagagagacattttttcatccaattttaatatttttcattacaaaaaaatttacttttaaaatttataactaaacataaaaaaaaaataattaattatatattattattcctaaccgcttcatctttttcttcatttgtccttagcaaagaccaaccccacgaccatccaacactagttacacttcttcttttccttcgctcatcctcatccccaattgcacgagaccaatcgttcattcctcttccgttcatcctcgtcccgatccaatcgcacacgaccagcaacaacagccgcacaagaacaccagctggagcgccccaatcattcgctcctcctttggcccatccccaaccgtcctctcctccaccagctcgttccgtccccaatcttgaaaaaaatggcagtaagaacttatgatttgctcaatatgatgatggtactaagatttattcttcttttgaatttcatatctattgtttgtttaccgagaaaagaataatatttgagactttcaatagggaaatttgattaaatatgcataaaatgctcttatatatttttctctaaatccatatgtattaaaattggccatatatgaccacattaccattttctccataatacccctcacatttgaaatcacaaaccaatcagcctcctctctctcccggcctctcgctcaaaccacgctcaaacaccttgctcaaacccacggtgacggcgcaacaccccattcgatgcacggtggaccaatcgacgaccgaacccacgaccatatcgatgaggcaatcgatgaccggatccacgacccacacggtgcacgccatccataataatgtggaaggtgtgttttttattttatttttttgggtctgaaagtgttaactatttatgtcggatctttgaaattggcaaattttgaggaggaagaagaaggcccgatgggtccgatgctagtccgatatgggtccgatgggcctttcaattggtttaaatatgtgtaggtccgatgggtccgatgggtccaatgccaagtccgatgggtttgatgcccagtccgatggatctgatgcccagtccgatgggtttgatgcccagcccgatgggtccgatgcccaatccgatgggtccgatgcccagtccgatagggtccgatttaaatcaggtgggaagaagaaaaaagaatgagaagagagagggagttgatgtaaatggggagagtattttggagataacactaaagctgtcatatgctaacaatattggcaagtataagtttaggagaaattttttaaggtaatgtaagcatatttaatcaaatttccctttcaatattcttcgtatatttagttgataagtaaatacatgttaaaaatggtgatatttttttttttagattttgacctcatatttctatttaaacaagaaaaaaaataacaaaaataattttctattatttgattttttcaaaattgagaaatatttttctttaactttaaaataaattctaaacgaattcttttataatttttaaataattatattggtggactaatataaatatgccatgtatacatgatagtacacgtagacaggatgacactttaaatttatcaacgatttagtgggaaaattttaccatttaaatttgaagttggagaattaaatataagtgaaataatagttagtagaatttaaccacaaattactctatcaattattaattggtcacgtgcttaatttacaagggaaatttgactttttatgcttacaaatacttaatacttttctcctaaacacataacatgtaatatttgtgg

SEQ ID NO: 119933 - DNA, 1136 bp, Cannabis sativa
tatatacatatcaagtaccttctttttcttcgtgtcaacttcttatagagaaatatatggctcgttttcgcaatcttatttgtggagtctttttttttttttttaacaacagaataagtttgcttcctttaccaacctataagtttataagaactttgtctgctagcgtctattgctttcttatctaaaccctccatctgtactatatgtctcaaagtgtcttagcaagcttttttttttttttctattaattatttgaatatattcggaggttcccattacatttaaaaacccagacagataagatgttcaaaaactacatcaggtcatgtctagcagggaccagggggtgaattaatgtgtgtgatgagtatcttgttattaatctttatacgtggaaagtactgattagagttatgagctagctctcattaaaacaatctatgactgttggaattatggggatctatatgattcccatacattttccttttgaccatatatatataattattaagatggttaaaaaaaaaaaaggaaacagtaaacatgctgatcatttcagaactcagatcagatatcaatcgattttgcttttctttctccgtgcttagttagttgtacaatgaggagatatgctgtactgaaaaatatgtatgtgttatatgttggaaaatgtttttaaagagaaaataagaggattacaattaaaatacttaaaatataaataaaaatattatgtcacgacccgagttctaggccgtggcaagtatgtaatattcataatttgagtggtcaaaagtcacactttaacccttgtagggagataaaacttataaatgatcctttaatttatatcacaaaatattaatttaaaagtaatggattaactcctatattaataagaaaatatcagtaacaaaattaggatcactcatcaatataaaagaacaataatatccccacagttagataatcatcgaatacatagatttaataagtcaataaaataccaaaataatacccagcatctatcattccttatttctaactactacatatctaatttaagtcatcgagactatccatttcagcttaaatacaaaatcagtttcattagaagattaaagagtaga

SEQ ID NO: 119934 - DNA, 3621 bp, Cannabis sativa
catgtaaaatttatgcaaacataaatcacttcaaatttcttatattgataactaatcaaattgtaatgggttttatttagggcacaaaacccaacagatagttcgtctatatggggctccgatgttgatggtatcttacataaattctatgttcacttccatatttttagagagcctccaaaaggccatgggtacaaagctaaagttcagtataaatttccaccctcggatagatggtcagtctgagaggaccaattaaatactgaaggatatgttacgagcatgtgtgataaactttgaggattcatggagtaagtatttcatattgatagaaatctcctataacaatagttatcaagttacaatagagatagtttcttatgagatgttgtatggtaggaagtgacgttcttcgattcactgggatgatactagagaaataaagtgcattggtcaagaatcagttcagaggaccagtgatgctataggaaagatcaagacttggatgtttgcttcccaaagtaggtagaaaagttataaaaatccaaagtgtagagatatagaatttcaggtaggagattatgttttcctacgagtttcacctttgaagggtgtaaagcacttcagtaagaagggtaaggtgagcccttgttttacaagatcattcaagattctcgaagaggttggtcatgtagcatattgtctagttctacatctaggattatcaacagtccatgaggttttcatgtatcaatgttgagaatatacttatcaaatccaacccatgtcctgagttatgaagccttagagttgcagttagacttatcctataacgaacaaccagttcaatcctcgataaaatcgataaggttctcaagaacaagaccttagctttggtcaaggtactttagagagacagcaaggtggaggaagccacctaagaattagagtcaaagacgaaatcattttaacgtgggataattgtaatgaccgtaagattagacatgaaattttttgtttcacattggggacaatgtgaaattttaagtatgtaggaggggcttaagtttattttttgttgtttagttttatttgtttgttttagtggttaattaagtcaatgtcagttttgctgcaattttatttatggaatgggctgaaattgtaaactatgcgcttgattctttaactcctgagattaatttggatgcttgtgaaaattttgtattgatgtaaattgtcaatagttggattgtatcataattgttttactttggtttgtggtaagattgattgaataggatagaacttgcatgaattatttcttgaggcaaaatccttgacaatgcttgtttaaaaaatgatgtagggaattttctttagattgtttgggccttttcaagcttacctttatcttttttatctttagtttacctgcttgagttttagtctgttcaattgtttttagccacactttgtgagactaattttgaatccacttgcaattctctttccttgtcccttgaattataccataagcttaaaaataagtttatgggagataaattgtgtgtgtgcgaaattattgttataagtgggtgattaagacaatgcgtgaattgtaaaagtatttttcaacatcactaatgttatttatgttctaaaaaatgatgatgaaaaaaatagaaaaaaaagaaaaaaaaatgttgaataattaaagtgatgttggaaacattttcagtaggctctcaaccatgcattgtaaatttgatgaatttcgagatagtatgtttatatacaagtgattgattagtttataatgtgcttatggtataatagagcttaaatgactttcaactaccctttacctaagccattttgattacaaccttgaaagtccttctgattctgaactaggtttgttaacattggaggagagaggtaagtcatgcaagcttattgatcactggactgtggaaagattggatagagtagattgaatatgatgttttcaaagtaagcatccaaattaattattagaatttttgggattgaaattctggtttaattaattaattgaagttttacaggttgtaggagcggtttgatcgtttgaaggcttagttaattgtttgttagttagtgtttttttttggttgtagttttcagtcttactcgagggcgagtaaggatttagtttgggggaattggttaggctaaaagttttggctcaccttttatagttttttttttcatctttgttattatttttggaatagaattactcttattttctttggtttcatatttcgatacttggaatgtataaattggtcaaatttcaaaaaacggtgatctataaaatagagaaaattttgcaagaaataaagctgaaacttcaaacctaaatttgactatgttttcgtcagattttgggaaaaataaaaacataaatgttttagatctctttttcagctttccaacacatcttgaattaactcatttagagttagtatgtgaaagttatgcatattttaatgaaagaggttgaagtaagaacattttagttgcgactaacatttgtggtcgcgtcgagcatgacttatggctgcaacaaaggactacaaaaaacccatgttttcacttttgtatagtcgctgcggtgccgactccgtaagggtcaaggagaacttcgtcttttatcgtttttgggttgaaaaactctatttaatgaaagggggtcgcaaaacatatagagatggacagaatggaacctagaaacacaagaagaaggctgttggagcgagcgtgggtgattcgtgacaactttccatctagttttcttcttttctcttgatttcttatgtttttatttgtgtttagtttaattatggatttgattatgagctaaactcccaatttaggaatttgatggatattgtctgagattatttgatgagttaatattagtttattgttctttcttccttattattgtgatttattcatctttgtacttaacatatgtttaatattggccacattatgcatgatctatgatctcaatacaaaatatgaaaagtgagtattgaaaatactctaaatgaataaacgtaagttttgatgtgaaacgagtatcatatagcttgtgtgacccttaaattattgcttaatgtgaattatttgttgtactatatcaaagatacaatagttgacatgcaatttaggacttttatgatctggagagagtttaggttaatttataatctgtcatcacataggtggatgaaaaatagttaattagtgttaacaattggataaccaaagtaattgaaatcatatccctaattttttatccattgttaaactttttatttgtttattttatttaattttgcttagtttatttagtttcaaaattatttattcgattgccaaatagaactaagaattcaattgattggtacttaaatacagtcctcgtgagaacaatctcacttacttgagtattacttttaaaacgatacatatgttggaaataatttaccaggatctagatttactactatgtatgttccattaacatcctaatatgaattctaatacaatgaaataaacaca

SEQ ID NO: 119935 - DNA, 1616 bp, Cannabis sativa
attgttcttgctcgtgtgttgagatttatacaagaacttcatatacactttatcctagtagtccagactatttcttgtgtgtggtggatcaatatggaagactactgttgtgagatttattggatccaacttacaagaagtttcgaggataccctgataatcatcaagatgatttatttttttcatgcaatttatattttggatttaatatatattgagatcctttggactatggtacaatgataatcagacaattattattccgctgcatacctgatttagtaccataagaccaacaagtataacacacatacatatgtgcatattaattttgccagatatatgacatattagttatagcgatagttggtgtacacaaacattcatctagatatcgtgattatatgtgttcggcaagttaggaagtatcaaccaatgctaccaagttagttaagttatgattatcgtgattatcttcagtcaaaactttaacaatcttcatagcttccttctccacaacttctctgatgaaatgaaactttatatctatgtgcttagtacattcatggtgcacataattcttggtcaattgaattgcactttgattatcacaatgcacagaactttctggttgagttttaactctttcatcaatccagttaaccaaagggcctccttgatcacttctgtcaagaccatatactctacttttgttgtcaacaataccaccaccttttgaaggttttctttccaactgataaatgttccgaacatgttaaacacatagccaattaatgacttctgagtatcaatacaccctacataattagagtccatataactattgatcacctccaagtcttcactttgtttgttcatgccaaataccaatcctttttcaatagatccctttgagtatctcagaatccatttcaggtcctcccaatgctcctttctagggtttccaatgaatctactcaccatgctcagtgcgtatgctatgcttggtctagtacagaccatgacatacatgagggagccaacaacactagcatatggaacctttaacatctcagacttcttagtttcatctttaggcatttgagtagcactcaatttgaagtgttgagcaagttgagtgctcactttcttcgagttactcatttcaaaggtattcggaacctttccgatgtagctcatttgattcaagtatagtagcctctttcgcctttcccttcttatgtccatgcctaagatcttacttgccagagtcaaatccttcatttcaaaatccatcttcaattggagttttaaatgcttgatctcctgcatactcttgctagcaatcaaaatatcatctacatacaacaacaaatatagtctctatttctttctcagaaatatatgcatggataaaacttacttctcttcagaccaatcttggtcatataatcatcaaatttcttattccattgtcttaaagattatttcgaaccatacaaagactttcttaagaggcacaccatgtgttcctttccaacctcctcaaatctttcaggttgttttattagaattctttcatctagatgtgcatacaagaaggtgttgggttttat

SEQ ID NO: 119936 - DNA, 1047 bp, Cannabis sativa
aattgcccaaagtttgtcatggtatcaagcgccaccacctaaaaatatcaaaataatgaccaccaaagatggaccaccatcctttccgattacacaaacagaggcaaagattgatgctagtttgccgttttatttagggtcgcaggatcgtctgggagacttcatcacaccggtgcggctccgattactatcaattcaattcaacaaatgagtttgtgagatgactgggatctttgcataaatattagaatataaagagaaaataaatgaaacaaaagaaaccaactaactaattaaacaatggctcacataaaagggattacaaactaatgaataaaaaacaaaaatagtaaaacaaacaccacaaaagaacataaactagaaagtaaatgcaagaatcacaaggaaacaaatttgaacagaaatattacttggttcggtagacaaaggcagtgaacctttgctactaacatccaagggtagaaagctaattagttttgttaacaatcaagagatcatacagctcaatcaccaaacgagtcttgctcctattacaaacgaactctctccccagaattctccatcaaaacaaaactttgggcacttcattaactaaataataccatgatgtagctacctactcgttgcttctcaagtcatgttaagtctattgtgttgagttaatgctgagtgtaattggtttgggcaatataaataaggctggacaatatgtgtcaaatccattaataaattaaaatctatttatatctatatataatcctgtacgactggtttctccttcatcaaaaaaaaaaaaaaaaagaggacatgtttttttatatacaatcttgtttcaacttcacactaacacacactcacactgaaggagaggagaggagaggagaggagaggttttaatttcaacaagtaacagaaaagtgagtttaatggctatagatgaggagaatatcccagctcaaggtactttttgaatttcacccaagtatataaactatagagaattattaatatgagcttttataataa

SEQ ID NO: 119937 - DNA, 743 bp, Cannabis sativa
  modified_base (324)..(324): a, c, t, g, unknown or other
actaatcagattgtagagagttttatttagggcataaaacccaacaatataagcctcacatcttaatggaaaggtttcaaaattttttttgtaagtagaaactgtgcagaaatacttatgtaattttctttgctctcaagaaactcacctaagctattcttgtgatcttgagtgttgaaataagaatacatacaaccaaaaggggaatagactattatcacttaaattggggtcgaacctctataaaaatatggtgtagccattatattatagttcttgtttacacaaagagcagccctgatgatgtggacatcaatgtttganacgtggcaagaaagatggcatctcggagttgagtagtcccgagtcatagcaggttaacctgggaggggcccctagccctgcgcccaagttcacttcaggcactctagaatggaagttcgaacttcaataacttcaatgcaactcactatctctcagtattttgtacaatgaagacatggagcaacctaatcgaagacctgacaaacgaaattacatgaacctacaactcggaagccaaccaaggcacctagggtttcacccggcgcctaggttgacatcctcaactagggtttaagtttttggggccgtcatagtacaaaacagtcaaaaattacattggaacacaaaccagacatgccacagacatatttgtgttgggttttgtgccctaaagatcggaagagcggttcagcaggaat

SEQ ID NO: 119938 - DNA, 2181 bp, Cannabis sativa
taattctaaatatcaaaatttgaaaataatttttaataaaaaataaacaataagaacaaatttattattaattgcaacactttaagtggattaaacatagatgctgacattttacatgcaatattttttttatttaaaaaaaagtcacccaataatttttcacaaactaagaattctgttatataggacattttatatagaatagatacataatacatatacatatatatgtattgagaattgctaaaaggcatcatcactggtcccatataacttaagaaaataacttttaggtaatatcgctaaccaatcataaggcgccacctatagaaagtgatgggcacggcccaataacaatctcatatgtattgatgcaaaagcggaaaaactctactccaacaccaatgaaaataaaattatataatgtatattgtttggctgctttggaattggagtttataagttgtggccaagaataaaaaattatacatgccttggaaaatgaaagactgttgtattataaaataatataatatcataaagtacaaggtaaatttattactctattcataaatatgaattatgaaatgacaaaattttattgaaaaattattttatatattaattttaatttttttaaatttacggtttgagttgattttgtggtttttatgtgggttactatgcaaattttagttgctctgttgattgttatgtgagttactatataaattttcgtaaaaatacaaaaaaaaaaaaataataattattttgaaatgtaaaaataaaaaaaatttcaattttattagtctaacccttaaacagaactaatttattagaatttttaggacttatattctagcaataattataaataaacattgtcttattattattattttcgataaagaaaaacaaattttattaatcaactggacatattaaaaacaaacaaatcagcaaaggctataaaaaaagccttcgaaaaaacactcatttcactcaatttgagtatcgagtaattagttgttgttcatagaagttcatctttttttttttccttttaacactatacaatatgtaatgcatcatacactttatttctttcactatgtactcaagtgtataagaagaatccttatggaagcatttatttcggttgagctaaataccatgcactgtagctgcaatgattgcatttactacagaagccaaatgacctgatcttgtgctattaatctagattttccaaggacaagcttgaaaactcaaccaatacaatatagaactcattgaagaatcattaccaactctctagaattttcttgagaataactagataaatatatcattttaggtcaagtctattattattaaattaattaaaaatagttaagtcctgtgaaagcttcaagaatattttagtaacacaattaggtagaattttttagaatattatagttggttttttagtagtataaatagagaccttgggtcctcaagttgtacatccaacaagagtgtttcaaagtgtgcctaaaagagttagagtgtaaacaaaatgtcccaaaatgtgagttatatacaagtgcattataaaggtgtgtataaataaataaaagtgtgagtgcttggtgtgttgttgtcaagataaagtgttgaagtcatggtgtaattattttctcaataataaagtaattacaattttctcgtattgtccaacaagtggtatcagagccgaattgagtttgttctgaaagagttttttgttgagtttcttagagtgatcgtgtgtggtttagtactatagagcttgcacgatggatgaccttcaagtggttggcagaattaagaaacttaacaactaaattacaacatgtggttgatacttttgcatcattgttcaccaagaagaatgatacaagattgcagcatctggagaacgagcttctctcaatcaggtagtgcgacacgaaaattaactaatacttcatcaagataaaaaaattttgtcgtgaaatctctgcattggactctactgttggtatgtcagatactaaaattagaaaaattattattcatggattaatgctagaatttagaacttttattgctgcaatacaaggttggctaagccaaccttctcttgttgagttatagaaaacttgctagctgaccaag

SEQ ID NO: 119939 - DNA, 9700 bp, Cannabis sativa
  modified_base (3900)..(3903): a, c, t, g, unknown or other
  modified_base (4979)..(4980): a, c, t, g, unknown or other
  modified_base (5535)..(5542): a, c, t, g, unknown or other
  modified_base (9637)..(9641): a, c, t, g, unknown or other
  modified_base (9667)..(9675): a, c, t, g, unknown or other
atttagggcacaaaacacaacagctttaactttacttcattatgcagctccacctgaagatggcttatacctactcccgatggcttatacctactctcgagccaagttagcaactttgaaagctacaacgaccacccccaacttgaaaaaagaggtggaggaagccaaaaaagtgccctaggagaagagtctgaagctggttaaggttaataagcaacttctggctgccaacaagcttgttgaggaactataacaggagattaggatatgccgtccactgcccagcctaaagcggacaatgtggctctaaccagagatgtcaattctctaaaggatgagagggaaagtcttcggacccttcttttaaatttaaccgaggagaagaaggttttgtaggagagtctcaactttgggcaggcagagcgggaggtgcttcaaaatgaggtggaaagcttagagacggttgccctggatgttttctatgaattttggaaggcaaacccagaagaaaactttgattacctcaatgaaaacaaagaggcatgtcttagtttttgtgaggcccaaaaagaaaaagaagaatctgaggcagccaaccccgatgctccgaccagccaaagtactaacaacccagccgctgacgatatcaaagagccaaggactcccgccgtttgaagtttttctttttattttttttatttatttcagttcagcccatgggctttttcagtacaatatggccgaccaagcaacttttaaactttgtaatacttcattttgtttcaagacaactagttggccgggcagcttttaatcctggagttatcatgcttttgttaccttttaaaatgaatattttctcttaagtttaatgcacatgcaattgttttgtttttcgagcttgttatttacctatgctttgtacgggtatagttgctcccaagtgattgagcagacttatgactcttggtcacttgcattgcacaagtttgattttgtctgtttggctactaggtttaaccagaccctttgtacacatttttaatggtaattacatagcttgctatagaaaagaaactaatagacacaattagaatgataattaatatctttattcatttactggtctggatggttttgttgtcgtagtaatgtacatttattgaattataaaacctattatatgatctaactgattattagctaattaaaacctaaaatagttgtttttctagaccgagtgtactttagagatggtcattcgacctgagtgtcagttgttttatccaaacctttgagcgaggtccgctcacaaggccacctacttaagagtagatgtttgagcattctgtactttaaaggggtcatcagaccatgtacacttattggtagtattttctaaaattttccccgttccaataccttggtactagaaccaattccatgttttcattataccgaccaagtttatatgctccagaatctgtgacttctgttacttgatatggtccttcccagttgggtccaagtacaccagccgctctatcttttatgtttaagaacactcttctaaggaacatatccccacaaagaatttccttaccctcacttgcttgttgaagtaccgagccaccttttgttgatgagctactagctttaggtttgttgaggctcttttttcttcaatttcatcaagtgattatgccagaagggcgtgattggattcttaattataagtcaatcttgtgtgggacgaaggctctaactaaacgggcagcattgcttcataaccataagccatggcaaacggtgtctgtctagttgttgtcctgtacgaccacaatacttcttgtaattcctccgaccaattccctttagctttttcaagcccctttttcatggtgtctttaagtgtcttgttgactacctcgacctgcccatttgtttgaaggtgtgccactgcagagcaactcttaatgattccatgtgctgtacagaaatctgtgaacatgttgctatcgaactgtttgccattgcttgagacaatctcgtgtggaagtccaaactgacatgatatttttttctataaaatccagtactttcttagatgttatggttgctaggggctcatcttctgtccatttggtgaaataactgcgaccactacatattgtacgccgcccttgccttgggcaactgtccgatcaggtctattccccatatggaaaagggccatggactttgcatctgaattagctcattagggggtgcacgggggatctttgaaaatctctcgcacttatcgcatttctttacgtgggcctttgaatcttccatcatggtcggccagaaatatccttgccttagtattttctttgaaaaactttgccctgtcgcatgattaccatagaatccttcatgtactttagacaggagccatgcagcctcttcttttgttacacatctaagtaatggcatggagaagcctcttctataaatcacaccttctactatgatgaatcgctcatcttatatcatcatttttcgagcctcatttctattgtttgggagttctctagtgttgagataagctattatgggtgtcatccagttcggtgtcgtatctatcattttgacttcttccacacagttgatgttgggttcttccaagaattcaattaggactaagttggcattatctatcattatgttgctcgcaaaccgtgccaaggcatcaacagttgtgttttcttccctcgggatttgcttaagggtgtaacccttgaattgtgcgagcaggtcctggatcttgcttagttaagccatcatcttttctccacgagccatatactctcttgagacttggtttaccactagctgtgaataactgcagacattaatatattcagtgtgtacctcccaagcaagctttatcccagctatgagtgcttcatactctacttcgttattgggggctctgaaccaaaatttgattgctccatgtaggggttgcccctaagtgtgatgagagcaattcttgcaccagaaagttggtcagtagttgatccgtccacatgtaatttccaagtaggtttgtctttgttctcttctggtagagactcttgtactggcctgaggttgtcctttgaactatcttcctctttacttgtacattccaccattaagtctgcgaaggtctgccctttaaccactgtgcggggttgaaagattatttcatactgccccaactctatggcccatttgagtaaccatccagaggcatcatgcttttgcaaaacttggcgcaagggttggtcagtataaacccaaatagggtgagcttggaaatagggccttaacttccttgttgctaagattaggcagtaagtaagcttttcaattagaggataccaaccttctgcttcaacaattcatttgttgatatagtagactcagtgttggacattattttcttcccttatcagcacgatgctcatagcgtattcggtggctgccaagtatattcccaattcttctccatccaggggttttaagagtacaggaggctttacgagttgtctttttagttcttcgaaaggattctcgcattcctctttccattcaaacttcttattggctcagaggatgttaaagaagggaattcacttgtccgtcgactttgaaacgaatttgctgagtgcggctattcgacaagttaagctctgtacttcctttatttttgttggagatttcatatctaggagggcttgtattttctcttggttggctttgattcctcaagcattaataataaatccaagaaacttacccgagctgaccccgaaggaacactttaagggagtgagtttcatgttgtattttttgaggattttgaagcannnntccagatcctctatgtgccccccagccttcctggatttgacgagcatgtcattcatgtatacttccatattccatccgaccgggtttttgaacattttgtttactagcctttgataggtagccccagccttcttcagaccgaacggcatcactttatagtggtatagacccatatctattcaggaacttgtatgttcttggtcaggtggatgcattctgattttgttataccccaaataggcatccataaagctcaagatttcatgtctagctattgcatccacgagttgatcaattcttgggagtgaaaacaatttttgggacttgctttgttgaggttactgaaatcgatacacactcaccatttttttttttggcttgggtactagtacagggttagccacccaagctaggtagaaagcttcaatgatgaattcgtttatgcgtagcctttctacctctctttcagtgcatgtgcacgctctttgtccagtagtcttctcttttgctggatgggatgaaagtttagatcgatgttcagggcgtgagacatgatagtggggtaaataccaaccatatcctcaagtgaccaggaaaaaacgtcaaggtttgctctcagaaattttgttaaggctaattttatttcgagcagcaagcctttaccgatcttgagattcctagttgggatatctggattgatttccacttcttctaattcttcaattggccaaacattggtatttatttccccaagtcggggatccatgtcttcgtccctgccttgggcgatgtaacaccctactagtttaggcatgttatcgtgattttaacttaaatgtgtagctcgtcactaatcaacgagtttattgaaaatcgtgtataattaaaactttatttaattacttataaatactaaaataaataacatatatataattcagattccatttacaaaatatttacaactgttacacagtgcgtaatacaaaagttttcgcctagcgactagaaaaaatacaaccagctgtcccaaagattgtacggtccaggtccaaccgccccgacatgtacaatcnncatctgctcgctctcacagctgctcaatctttgctttgcccttacctacacatgaaaataatatctgtgagtcgacagactctttaagaaaagcaaaatcaataacataactataactcgaattataattaggcgcccatacacccaaccataaccctatccccgtgtcacacacaatactaagtttagaacgttcgtacgacagtactatcgacaataatatcagcttatactcggtacgctagtcataccctagccgtactaatgtgatagcttcgatcagtatctaagccaaacatacatctatcggtatccaatataactctacgtatactgataccgctatcaacgcaatctagcaggcttaataaatatgtacgctaaacatgtaaacacgtatgcatatcattatactaatcttacctcacttttgaattcaggtgtgccggccaagttgagtggaaccgctgctcgacgatttacaggcccctaaatcacattattcataaaacttgtgagtgacacgctaaatcactttttggggacataaaattnnnnnnnnaagtttccctatcgatggataacatggcaataccctaaagcagaccggttccccaaccggaagaccggttctatggggtttcttagggaccaaccgaaattccagttcctacaggtaccactaaaccggtcgaccaattcagttcaggaaagacccaaaacctcctgacaactcaaatcaattccaaacttcacaataacttccagaatacctatttaggttacaacaaacatattccaagcaataaaacaacccaaaacatccaaaatcaaaatccaccattaaagagcaaagcttgagttcataaactcaaacattgctcaatcaccacaacaactcacaaatcaaacataacagagcttaaataacatcaacataacaccagaacacaaatcaaacacacttcaacaaccacagaatcctaattcacaaattcatgcaataacttaactttgagcttaagaaatcaaggagaaaggcactaaggtggcatttggttgggagaaataggaatgggaattggaataggaatagaatggaataaaatttaaagtgcataaaaaattgataacaaattattaaaattttttaaatcttgcattggaatggtctttccttccatttgaaaatggaatagtcattccaccaaaatggtggaaaggccattccattggaatgatattccaatactttaaattgcagccaaacaaaggaatggaataaaaattgtttcctttccattccattccattccattacctccaaccaaatgccacctaagggattataccttgaattggaaacaccaaatacttgcttgattacccaaaaatgaagctaaaaaatccctaatccttgctgcttctagggagcttgagaaagagagagttggagagaaaatgactttcttgatttttcttaatttctttctattttccatattccactaaatgaaagataaaattaaactattttatcaaagagttgccagctgccacactaaaaaccagccacctaaacccaagtcaaaatgacaaaagatgcccttcccataaagcttaactagtaaagtggctaggggtaaaatggtcatttcttaaaccctgactattctcgacattcccaatgcctatctaggttgccccgctattactaaactactaaaatgtgattctattggccaaacgccacgtttcaatgttgtcgggaataaaatatgaaaaacgtgaatttttatatatagcataaataatacaccctgaattcaaataaatctttataaattcataaatcataattaataatctaatttcataattaagccctaattatctgctaatttatcatattaaagttaagcggtccttacaattatccccccgttaaaaggatttcgtcctcaaaatctaacctgaacagctctagatattgaggcctcatgtcagactccaactcccacgtggcttcctccaccttactgtttctccagagtaccttgacaaaagtcatggtcttgtttcaaaagactttatctttcctatctaagatctgaactggttgttcttcgtcaatagatctggttgaagctctaagttctcataactcagcacatgagtaggatcaaaaatgtatttccataacatagagacgtgaaacacgttatggactgctgaaagtgctggaggcaaggctagacaatatgctaccagtccaaccttttcgagaatcttgaaaggccctataaacctagggcataacttgcccatttcccaaaaggtttgatccccttcatcggagacactcgtatgaatacatgatctcctacctaaaattatatatgtctgcatttcagatctgcataactcttttgcctactctgagaggcaagcattctggccttgatcttttctatagcctcattgatctgttgcaccgactccggacctaagtatttcttttctccagtttcatcccagtgaattgaagatatgcacttccttacatacaacaactcatagggagccatccctgtagtactctaataactggtgttgtatgaaaactcaatcagcggcaggtacttgcttcaagagccttcgaaatccatcacacagccacgtaacatatcttccagtatctagattgtcctttcggattatccatcagtctgaggatggaaagttgtactgaacttcagtttggtacccatggctcatttaagactctgtcaaaattttgaggtgaacttcggatctctatccgatataatggacttcagagccccatgtaatcttactatttaattcacgtataattctgcgtactaatccactgtaaaggttctttttacccatagaaaatgtgcagattttgtaaattaatctaccacaaccgaaatagaatcgtacattctcgtggttctaggtaacccaaccatgaaatccatggtgacatgtcccacttccattcaggaagcgtcagtggctgcaacaatcctacaggtttctgatgttcagccttaatctgttgacaagttaaatactgggatacaaattccaccatatctttcttcatcccgcaccaccagttgtaaggtcttaaatcttgatacatcttggtagtgccatgatgcagtgagtaaggagtggtatgagcttcctcgagaatctcatttctaagttccgcactacctagaacacaaactctagttttgtacagcagcatcccgttacctgacaccgcaaaatctttagcttaaccagctaaaacctcttctcggatctttaccagttttggatcagttaaccgagcagcttactctatttaacagatcatattgcaatgttaaattatggagtttgcctacaacaaactcaatgccagatctgaccatgtcatctgctagctgaggtgaaatcttaaccatactagttatctgcccaggacccttttctgctcagggcatcagccaccacattggccttcccaggatggtaaaggatttcacagtcgtaatccttaaccaactccaaccaacgtctctacctcatattcaaatctttttgagtaaagaaatatttgaggctcctatggttgatataaatctcacacttttatctgtagagataatgccaccaaatctttaaagcaaaaactaccgcggcaagttctagatcatgcattgggtatcattgttcatattcctctaactgatgggaggcataagtgatgacccgatcgtcctgcattagtacacagcccaaaccctgtctatatgtatcacagtaaaccacgaacttttctttatcagatggtagggctaatatcatagctgtgatcaatctctgttttaaatcctgaacgcttgcttcacacttatctgtccacaaaaattgctgattgtttttagcaagttcggttacgggtattgagatcttagaaaatccctcaacaaaccgacggtaataaccagccaaacccaggaaacttctgacttctataactatctttggtctcggccaatccctgacagatccaatctttcctggatcaactttgatcccatctttactgacaatgtgtccgagaaaagacatctgagatagccaaaactcacactttttgaacttggcatacagtttattttctcgtaatcactacaaaaccatctagagatgttgctcgtgttctgcttctgattgagagtacacaaggatctcatcgataaatacaataacacatatatcgagaacatccttgaagaccctatcattaaatcgataaaagttactggagcattggttagtccaaaagacataaccaggaattcatagtgcccgtacctagtgcggaaagtagtgttggaatgtcctcctctcagattctcaacttttgatagcccgatcagagattaatctttgagaagtccgtcttcccttgaagttgatcgaataagtcatcattactatgtaatgggtatttgttcttgatagtcagtttatttggttctcggtagtcaatacacatgcgtagggatccatcataagcacagagcatataacataatgtttgatatattttaccaagatctagatnnnnnaccaagtatgttttattaacatcctnnnnnnnnntctaaaacaatgaaataaccacata

SEQ ID NO: 119940 - DNA, 3700 bp, Cannabis sativa
tttgtactaagaatatcattgaaaaggcatcaaggtccaggcagtattttcttttccataaatttaaataacaaaccttacatgctggataataaatacttttcccaattgtggtacaaaagcagctgaaaatgcacgggattctaagtaaatctttttacccccactcttttcataagactatgaaaagtttggttagaaagtacgctaggaatgtaatagattttaggaaacatttcctatcaggaaaggggctgaaaacatgttgaaggtcaggcaaggtgaatggctaaaagtgtaatagatttcaaacgatattttctaccaggaaagaggctaaaaacatattgaaattcatgcaatgtttcccttctcagaattttaaaaagactacaaaatttgaagacaaacatacttaaaaatataggtgggcactgtagggcacatagctaggtagactacccccatgtgagttgagaatttttgacgtctcaaaattccttatcacttgtttaaaacatagtttgtattcggagaaaaaaatgcacattctttttgtaaatttcttctattttcatttcattatgcccataggcttacattaagaagagaaaattataaagaattataatttaactaaagatatagttaaattcagacacctccagcttattagtaataacgacgtaagtggtctgcattccaagcacatgggatttcagatccattcatcctctttagttggtatgttccatttttcaccatatgatttatctcgcagggtccttcccagctaggtcctaaggcccccactcttggttcttgcaaagtggggaacactctttctaagatgaggtctctaatcttaaacgttcaaattttgacttaagcattaaagtgtctagcaacattgccttgatacattttgagttggacttgtgactgttgcaagagctcttcgatcaaatctagagattcttgcagcagtgtgtgattcccagttgaatcataagtgtctcgtctttgagaggggatggttgtttctactgggatgaccgcttcgtgaccataaggcatcgattatggtgcgtgccatgttgaaggtttttccatttgtttgtatgcctaaatggctcgtggaagctcctccaaccaatgggctttacaagcctgaagtttcttctttaatgtggtttttagaattttgttcatggcctccacttgtccgttagattgcggtcttggcacagttgagaagcttttgatgatttcgtgttggatacagattcgtgaagtgtacactgtccaactacttcttgccattagacacattcttgtgtggaagcccaatatgacacacaatatttttgatgacgagatacaagccttcttaaaggtgatcgtgttcatgggcttggcttctacccatttggtgaagtaatcaattgcaacttctgcatattttgctcctccttttcctgttggtagtgaatccactaggtctattccccccactaaaaaatgccaagggctgtgcatgagagtaatctcagtaggtggtgcatgcagaacctttgtgtatctctcacattgttcacacttttgaacatactccacacaattctttttaatcgttggccaaaaatatccttgacgaagaatcatttttaagaggcttgatctagaaatgtggtctccataaaaaccttcgtgaacgtcatggacgattacacttaccttggttccacatatgcacctcaagtatattacagataaccccttttagtaaagctttccacctagaatcacctatcggggagcttgattctaaattttcctgagggcaaccttgttagttggaagctcccttaaacttagaaactaatagatgggacctatccaagaatttgagagatcaaatacaacatttacccttattttttcaataagcagagccttctgatggcctacagacactactccttattgcacgatctttgggtctgttgcaagtttggtcggcatgtgtacgaatgagttttggtccctcaagacttggcggatgttgtagcttttgaacccttacaatggctcctaggactgtgttatataggcatccatcttcttacatttagtttgatattccctagatatttagtacaccacgagttgggaatcactatacacttcaatgatttaggatcctacttccttagcgaattgtaatctaggtagcatggcctcatgttttgctttattgttggaggttggaaattcaaagaggagggtgctctgaagctgatgtccttgcaaagagattagtataattcatactatggctcccttctcatttgatgctccatcaatgtagaccttcctgactagtagttctaggagtgactcatctgggaggtcgttgattccaaaacactctactataaaatcagtcagggcctatcccttgattgacacccaggcttgatattggatattaaattagctaagttccatagtccattttagtaacctactagaagactctagttttggaagcacttggcagagaggatgattggttagtaccttgatggcatgggcttgaaagtaaggtctcagctttctagaggcgattaataagaaaaatgttaacttttgtatccttggatacgtgaattctgcacccaacaatcttttacttatttaatacactagacactaaactttcccttcttctcacactaacgtggcacttacagcatgatcaaacactgccaaatagaggtacaacacttctccttccacagtcttcaaaaagattggagccttggtcaagtgctcctttagtttttggatagcttctttgcattcctcagtcaactcaaatttcctgtttccacgcaacacattaaaaaatgggatgcacttgtatacagactttgaaatgaattgattaaggcatctgatccttccagttatgctcttcacatatttatgcttcttgggagaaggcatgtcgatgaatgctttaatcttctctgtgttagcttcaattctccaagaattcactccatacttctgaatgaccgtaaatgtttccttaaggtcaccactgtgctccatagaagtcttggatttcatgagcatgtaatccacatatacctccatatttctcccaagctagtccttgaacatcttgttaaccaaccattgataggtggctccaacatttttcaatccaaattgcataaaacttgtagtagtacacccccttatctatttggaagctagtgtgctcctgatctgcgatatgcatcttgatctgattgtagccagagtgggcatccatgaaacttaatagttcatatctggaagtggcatccaccacttggtctatctattgtagggaaaaagagtcttcgagcaagccttggtatggtcagtgaagtctatgcacattctccatgtgctattaggctttgggaccaaaactaggtttgccaaccatactgggtacgatgaatcctagaggaagtcattggaggttaacttatcaacttctgcccttaccaacaatttattaactactagtgttacttcctgcctaacatagaagtagttgccagaaagtaaagaatccagtatccttagacgagtagacatatagagaggaatttcataatatcaaagattttgtgattaa

SEQ ID NO: 119941 - DNA, 3469 bp, Cannabis sativa
attaataataaaataatatatatttataaattatgctaaaatacaaaattgcaaagctgaaaaaaaaaatcataggaagaccctatgacgtcagttatatgaaacaacagacgccataggacccctatggcgtcggttgtttttaaccctttagcgtcacccgaaacagcgtcggtagcgaattttgccaataccgacgctgaaagtccttaaaaaacgcctctaaagcccaattttgtagtagtggtggttatatgatattggtgtgattgataaatttgtgaaaattttattgatgcccttaaaactttaaatatcatgtatgtatattgtgtaattgtttttgtcttttcacactgtcttgatgatttcctagactttattcacttaggtgtcgtttggttgggaaaaataaaaatatagaataaaaattgaaataggaatagaaatgaaataaaatttaaaatgcataagaaattgatttaaaaaaaattattaattttttcaaatcttgcattggaatagtctttccttcaatttccaaatggtatagtcattccaccaaaatggtggaaaggctattctattgtaataatatttcaacattttaaaatacaaccaaacaaaagaatacaatgaatattgtttttttttttttccattccattacattcaacttataaagtcattttttgacaattaggtatcaaaatattttttaattaatatgtgtttttcttatgcaattaatttgattttattacattaattttgtgcctctaattactcttttcttctaagaaaaaattcattctcatctggttttattttggttaggaaacttcttgtaagagaaggaattttcttatggaaagttgtctagttttaggaaacttgactttcatttttcttattaatgattttggttttgccttgattagagcagatcaaataaattttatttgccaggtttgaagtctgaattagtgatctttgtccaatttggaaagtttcatttctagtcttgatctgttgctgcagagctcgattcagatgctacaaatcagaaaacttttaaagacaattttgtacaactagaaaatcatttttgtagctatctctagggttgctatgttctataaatagaacctagaggctaaacgttttacctcttttagcttcattatcatacttttatctttgcatgtgaggagggagtttcttttgtgaaaacctagagtgttcaactagattttagtgtttgttttaatttgatactactcatagactaggttgaagaaaagctttgaacaagcgtgggtcttcaggagaaggctttttcaagtcttattttaagaggaagtacttggtgtgtttcagacatcagattagcaaggtggattacaaagagttgcggtaaatcactagagtgagtctaaatttgtttaagtcaattgattttataatctttgatactttactaactgatttcattctttgggtgtggccctgtggactaggagtgtttgaaagaacaccaataccacgtgtaattttcttgtgtcaagtttttaaattctgcattttttatttctagttatggtgtgattctacaaatttgtgttctacagtgacaagattgcattttattgttgcagactattatagttgtgtttactaaaatgtagtcaaattattggtatttacaaaaacacggttttttaattggtatcagagcgagacactaatgttaagcgatctagatttataatgcttcaaacaaaatttgatgatcttagaatgttaagctatatttaatgaagtaggtaaaaattttattgagattatatcttcttgtgaattttctaaagatgcttggaaaattctacaaatccaatttgaaggaacaactgatgttaagcgatctagatttataatgcttcaaacaaaatttgatgatcttagaatgtttgataatgaaacttatctgaattttatgaaagattatctgatattgctaacaaattttttgccgtgggagaaaaacttgatgaatcagtgatagtcaaaaaaattgtgacagtcttgccttacagattcgacgctaagttattgactatggaagaagcaaaagatttcaagatatgaaggtggaggaaatgatgaggtccttgcctacctttgaactaaatcaaaaaatcaagcagaaagataaacccaagtccacagttgatagaggtaaaggtattgcttctaatgttgctaaaaaagaaatgtcagatgatgaagaaaatgatgagatggatgttttaacaacacacttatagaaatacatgaaaaagataagtgataaaagtaatttttttaaaattatttaaaggtaataatttttcaaaaccttcaatgactaacaatcaaaagagaattcaatgcatagaatgtgaaggttttgggcatattcaatctgaatgtgcaaatacagtaaaaaagaataagaaaagtttcaatgtcacatggagtgacgatgaaactgatagtgatgaagaaatttctaataatattgcactaacctcagtttctcctagtttgttttgtgattttcaggtgaaagagaaacttgtatgtttgaataataccattgaaaaagaagattctgattcagatgaatctgaaatctatgatgagtcactggccgagtcttacaaggttatgtatgaaaaataaatacatgtaactttttaaaatagatcaatgtctaaaatacgcaaacaattgtctcctcaaattgaatctcttgaattaaaaattacacaatatgagactgatttttgtttaaaagattaagaaattattctattatagaaggaacttttattttcaaatgcttaaccctggatcttttatttttaagaaaatctaaaaacaggtcaaaaagatattactagtcttggatgaaatggtactgaaaattttgaaaaaataaaatttgtaaaatctagtattcctgtgaatatttggttgcttgcgtcaaattcaaaatctgttggtgcaaaaccgtcttctgcagtagcaaaatctctagaaagcacaaaaagggtaagttctcaagtaagaaagtttattcctatttgtcatttttgtgccattaaagggcatattcgacctaaatatttcaccatgcaaaatttattcaaatcaaaatattttggtatttggaacattttttaaaagaaacataatgctccaaaataaaagtagattgaaaaagaaaaatgtcttgctggattttctgataaaagtgttgtttctcaaatatggtattttgaccgtggttgttctagacatatgacaagtgacaataatttttttggtgaatatcaaacaaattcaatgtggtgagctcgtggaccgccatctaagagaaagagagaggatggcagggagcagaggtgagagagagagagagaga

SEQ ID NO: 119942 - DNA, 1719 bp, Cannabis sativa
ataagaataataatttataattggttaaaatttttttatttttaataaatggctaaaaatataaccatctattatagcaagttatataataattatgattatatatttaatataactatttatcataacaagttatataaaaattatggttacatatttaatataactatttattatagcaagtgatataagaatgttgtaactattgaatattcaacctatatatattacttatcttttcaacatcaatgatgttaatagataactgaaggacatttatgtaattcaaaaatagagactcaaagaaaaggattagtatagtctttaaaagtttgacttttcaacgtgaaaaacataaatttgtaataatattaagcttgtgagggcaaattagtctagacaatatgggactaatttatatattaaaagagtagttatatttacacccctaatattattaagtacaccccaaaattttgtatacatttttaaccttacataaaatgacaaaaatagacattttaaaattaaattaaattatttttttaagaaatatataaattaaatcagttatttttaataattaacacaacccatttactttctttttttttgaacaagaccccatttctttaattaaattgagtaactttaaatagtaaaaaaaaaataaatagcaacacagtatagaaaagattattcatcactaaaaaaaattagagattacatatagaaaaataaatagcaacacagtatcaaagtttcattgtatgatttatttacaaaataggattatataaaaatacagtattcacttttttttgtactactttatactgctctctacacatatatatatataacttttttcttctattgtgccaaaaataataaaaataatgctgtgtcatggtattaaaacatgtttctaaataattaaagattattcatcacaaaaaaaaaatagagatcatatatagaaaaatcaaaatagtgattacctttcttaaaaaaaaaatcgtgattaccttataaaaaaaaattctttgagcagtaacaaatagagattaaaagagaggttagagattttccaattaagattgaaagaagaagatggtcaccataaaaaaatacgaggtgtacttttaaagaagacctaattttgtaataaaaatgggttgcttttataaataataacaattttaaaaataaaaaggagtgaacttagctatggggtgtacttatatatttttttgggtgtgtaaatataattccccatattaaaatagtgatgagttagcgatacttcataaaaattattatattgaactatacgagactcaattacaccaatagcgatattgatacgtaggaggatgctagacaccaataatatcctttagcatttgtcaaaagaaaaatagcattttcataaaattgaaagcaaggccgacactcagagtaattgaaccttagaaaaataagtattaattagacttgtgtaggtattttttaagattatcaacaaataaaattgtgtattttttataagataattttacttttagattgggtggactttaggcgcaggcctgtcctaccttaactcataatcgaccagacctatgtttaggaccgactctataatatgataaaaataataaatttgatttaattcaaaataaactaaccttggacaaccactgcaagctgtaagaa

SEQ ID NO: 119943 - DNA, 1502 bp, Cannabis sativa
aagacacacctgaagaaaccgaaggctccttgaaagataccacagaagaaagttgcagttaaaacaaagttcctataagtgattggatcagttccggggtctactattttctgaatcattgaaggtaaaagtagtgataccacagccactggtccaatcgctatgtctctcgaagtccccattacagcgtatataagtggtggtacaacacttgtatctacaattatagttaataatattcatcattccatatataaatatccaataagtaattagtaaggaaattagaaaacccatgaaggtacatgacttacaaaggccatattgaggatcaagtcttgctaaagttgcatacccaatactctgatcagatgaaagtttatttggtcatttattttcaaagctttaactttatgcattaaaataatacaaaaaatgaattacgtacgtacctggggaatacagaggctagcaatggttaaaccagccattaaatcattcttgaacttggctgcgctgtagtttcgaccccatacgagaataggaaatatgtttcggttaacaaggagcatgcctttggtgaaactattctggcttttcagagacttgtagtacttgtttctcatcgaaccaagggtgtccctaaccgagtctgcagcctcacggaatagccccggtggttcaggggcgttgagaacccaccttgacctttcaacgacgccgtttttgtcgatgtcttcgctgacgttgtcgtagacttgggtcatttcaatgctgtggtagttctcaatggagccagtagtggtagttgtgataccactgcttgattttttgaagtgtttgggagaaccaacagctgggaagctgattgtctctttttcggtttcgtggtctgctccggcgctgtagtcggagggagaatatggatgaggagcaatactactgaatcccaagtacttggccctttcgtcacggccatcggtgtctcccatggcagaagaagccatggtttttgaagtgttcgggagaactcgcaaggtcaaaaataaatgtttatggttttgggcagtaaagaaagcaaaacaccaagctttgatgctaataaagtgcatttacgtttcattggaaggatcttataaaaggagtggatccaattaattattccttacccagcaaaaaaataataatcaattaattattccttactatatttaattctttacttatttctctccgtacaatttaaagttcatgtcatcactctttttatttttatttttaatatattataaatatcaatccaagaatacgtagtacactatttggtatacctctactttttagttcaatttttttcttggtctaaattgtagttatttacaattattaataaattttttaaaatttttaataatttattatgtctaaattaaattccaatagttatatcccgcacctaagaaaaaacagtcacatttacaataaaatatttgaatcttatt

SEQ ID NO: 119944 - DNA, 523 bp, Cannabis sativa
gagttacagagttgttttctgtaattacagaaaaactgttttcagtaccaattttattattccgcatttaattaaataattaaattgggaatactaaaatacagaatttcaataacaatagttatagggctcaatttaaaactgacgacaataacatccatcactattgtcaattttgaagggttagtaaacttttttaccgattattttctactgatgcctattccacttagttttgtgtcagccttataggcatcggtcataaagaccgacgacaatacaatactcaactatttttaacaatcgggaaaactttttttaatagtaattatagtaaaaatttagctaaaatgaatagtgtttagctaaatatatctacaatattattagtttagtgctttagctataatatttaattattgggtaaatttcattttagaccctgtattttacaaagttactaattggatcctatgttttgttaaatgataaaatagaccctgtattttccaaaatagtacaa

SEQ ID NO: 119945 - DNA, 4023 bp, Cannabis sativa
agagagagagagagagggactttcacttgtggcttaggcctttttatccaagtagggtgacttggaatgactttgggaatgagagagacctaatgccctttatatagtgtagggcttacaaaagatataatttaagtagataaagatattccttttaaataagaatattttaatcttcttatctattgtttatgttacaaaaaaggataactgaatccttaggaaatatgactaatatctcgaaggaaaatccccattttcgtgggttgttgggcatgtctcgtaactttgctcaaatggtcaaagttgtaagtagaaattggttggccagccctattttgtaggacctggccaacctatgcactcctaaggtcagccaggtattactcctatagccccaggatgtgcctgccagctttccatgtgcctaccagcttttccatgtgcctgccaacttttccatgtgtctgccagctttttcatgtgcttgccagcttttccatgcgactgccaaccttggtatgtgcctaccagcttttctagcttctttgtataactttccttgtaaaagtcaggcttccttggtcgaacaagccctttatgatctgacaatcactctttggtcggctagcttatgctcaaaccctggccgaccataaaagcttcctctggccagcctatacacttcctttggtcggccagacaaggttggttaaggccttgttggccaacttaactcctcttgcttattgcttgataatttttcttgatttcttcagaaaccttgacagttgatatgtcgtgtaaggtaactttttctgttgttgacgagctgtattccacgtgttctcaatcttcactatgtagacatgccacgtcacatggaccaaatttgagataacaaaaagaaataaagaaagaaaaaggtattgccacaaaaatctaaacccataaattcactatgcataaacatagtgaaaaaacccaattaatcacagcctaagctaacaccctaacccaatccaaatactctttatccaaaattattcgtagtacaaaatccaaatcaatattatcaagaataaaaaatcgaagaaaacaactaaaatctaggatcaagaactagagggagagaatggtgatacctatgatgcctaaaggaaaaagatgaagtagtggtgaggactgaggaggtgattctagagagaggagtttatgaaagtgtaataaacaatggcgcttctaggatgcacctccctaatattagttttagtctaattttatttaatagacgtgtatattatatttattaagatatactataaaattttgagaaattctaattaatttacaatatagaaagaagtgttcaaacagtctacttcacacacatataaaattaaagagtgacacgtgcaacaacatgtttgaaccctatttttggtgtgttattttttttaatttctaaaaattttacatgatattttaaataactataatatacatgatcatgaaaaaaaaattgaactaaaaaattctctcggatgtcgaaacaaataaaggtgcatcggcgtattccttttagggatgaattgtagaattttccaataaattatagactcttaggcccaaaaatattacaatacaacatacattcatggatcgtattaaaattaagttatcacttatgccccaaacatgatagtgactaactttaggaaaatttataattttatatacattatgtaattttattaaatatataatacaaagtatttatttacatttgattatagattttattaaatacataaatataattatatttttttttatacaatctatataagataataaattttattaagtgttatataaataaatattaaacatacctcaaacatatacaaaagcaaacaataaaaatattttctttataaaattatctataacattttaataaatacattgttggtcgagattttcagaaaatactaaattttagttacttattaactactaaataatttttagatatgaattttaaaatggttggaacattaacgaaatttagtccacgagtcacttgtattgatatttttaatcaagttcttacaatttttttttttgcaaggattgttttaaagctattttccctttaatattttccatccttttttcagtggtttgacccattatttacaggcactattagagagtacaacggagtctcaatacattttcgccatcagttgtaacctatatggccatttttctatacagagaaatatttctttacattgggtttgttgagtaggtcaaaattagacgtttggtgagacaagactggacctatttgcaacctatggtactacagagaaacatgtcttcgccaggcgtcttgggaggatgcatgttagaaaaatgtagtgaatactttaaaatatatctcatttttaatataaactcgttttgtcaatcgtacaaagggagttagcaacagtatttttcgttgaaagttttgtcgtgaatggagtacaagcataaaccttgtgggctcctgaaggccttgtccctttcggaggcttgtactattattttagtctttccacgttctcaaggcccatgtcaccttcccagatgcttttacttctcccaaagtgatgcctaattatggtccaatgataatttctcctttcccattaatcggggtcgcacaagccacgtggctttattctagtaggccacatacattggttaaaattgatgaaaatatttacccccaaaccctagcttgtattgttataagttgggacttgctataggatgtcttttcgttttcctccaggagagttttaatcatgacatcatggctagagggaatatgtaacacccatcttcaaaaccacttggatttaaactttaatcatacaaatcaaatataaacatacatatatatatacgtatatagttttacaagtcgggatcccaaattcaaaatcgattctaaaaacaaaacaaatttttttatatgtcacatggtgactacaaaagttaatcctaaaatactttaagactgaaaccctccaggttgtacttccatgatatgtacaatcattatcaagctctaaactcattgttcttctgccttaggttttcctttacctacacatggtagcacactgatgagtcaacagactcagtaggatatgcataaaatatacaatgtaatatcgacttgtacttaggccttattgtgcctacttacaaggctcaccaaatagtcaagaacattcttaacggaagtacgacctctataccacatgcactgaagtacatctctcatactagtgttggtagggctaaaatgtactcccaggtactactgggtgttgtaccacatgccctatgtactcaccgaatgttggtaacaccttaacatacccttaaatactatacattgtaccaatgcactatgtatcacaactattacggtgttggtagtgtaaaataatataattagcatgcattcatatacatacactcatacatatacatatttatgctaatcttatctcgtttctagatttaagtgtgccagccgacttgaatggaaaattcatgagctaaacggaggttttatgtcacatttacataaacagggaaataactcggataaccttcttgggaacctaaaattaaaatatgagtatgaaaattagggttctgggtctgcccaaaaaccggtaaaccagattccccaactggtgaaccgattccccgggccctgcctagggaaactgttaaccaaatcttccactaaacaaaaccaaactcttcagaatacctgtaatatcatatacatattacaggaaaactgaccatttgggaagttgattatctaaaatagaattaattaataaaaaagaaagaaagaaaaaaaatatgtgaaaccccattgttcttgaaatttcttaatgcttacttataaatcggatcatattagagctcgccaagaagtac

SEQ ID NO: 119946 - DNA, 1827 bp, Cannabis sativa
gaactcctcaatggggtaagccgtggaatgagtgtggcttacataatcattgagatgaggtggtttgttaatctgacggccagctttggatttaattgctggagctgattgaattgatttttgtgtaatggtaatattattatttgttgaagcgtctggtgtgggaatgacaccagttggttcaacatgagctgaagggttatttacaccaatgggaggtgttgttgggtgagtgttagcaggagttactggtgtgggagcaacaccagtaggtgctgatggtgtgggggtgttgtcgacaccaggaggattatgtttgttgttggttcttggtgtgggaacaacaccagtaatagtgtctgcatcaggattatgttggttgtttgttgctggtgtgggaacaacaccagtaacagtgtctgcatcagtgtatgcattagattgtgaacccgaagcagtaggagttgtatgttgtatatgcatttttattgcagggggattagtgagagttattgaattgttggcaggtatacaatgagattgaaaaaacatatcaatggaattgttggaaccttgaccaagaaaaggaaatacgttttcatgaaagatgacatctcttgaatggtagatttgtttggtttgaatgtcaagaagggtgtaagccttcatgccacgtgggtatccaatgaacacggatgcacggctccgtggtgaaaatttatgcctagtggaggtgagtgtggaggcatatgctaagcacccaaatactcgaagatggtcataatttgggggttttaagtgaagtttttcaaaggaggtactgccttttaggagggccgaaggagttcggttcatgagataagttgcagtagcaatgagatatccccaataagcaaggggcaaatgggattgaaaacataaagcgcgtgcaatgttaagaatatgttggtgtttgcgttcaacaacagagttttgttgaggacgttcaacacatgaatggtaatgaattatacctttggaggcataaaaggcggacattgcaagttctttagcattatcggatcgaattgctttaattttggaattgtattgtgtgcaaatcatattataaaatgttggaaagatagtttgtgcttcagctttagttttaagcataaaagtccaagtaaaccgagatgcatcatcaacaattgtgaggaaataccgatagccttctatactaattatatgaatggaccccaaatgtccaaatgaagtaagtcaaaggcattttcagcaaaattatggtttgaggtaaatggtaatttcttttgttttgcaagatggcaaatatggcaaaattgattttctgaaatggggaaactagacttaattcttttattgaatgtattggaaatatacattgaagggtgaccaaggcgttaatgccattgatctacattattatgtaaagaaagacaacaattgggctgaagtatggggctgtgctcttgttgaattgcacagagtttcccaagccgtttagctgtcccaatcaccatgctcggagaaggagcctgtatagagcaagaatcattagagaaaacaaccttattaaggctgttttcaatgaaggcagtaagagaaaataagttgatattgaaagtgggaacaaagagtacattttgaagtgtaatatgcttgtttaaatgaactgtaccgatcccttttactggtatgtttgcaccagtaggaagcacaacatgtgttggaaaaacattgctggaaaatttttgaaagaggcttcttgtggcacacatatgatgggtttgttggaaattattttac

SEQ ID NO: 119947 - DNA, 1223 bp, Cannabis sativa
caccatatattataggttcaaataaaacaagaatttagattttttttaatttgagaaaattactaatttgatgtttttagtttttaccatctctttcaaaatttattatgtttacatttttttaaaattattctatcaattttactcatattatttcatgataatttttattttttttaatcaaaattttgacaaatctacacatttatctacacagaacacaaatctactatgtttgaaattatgtcttaattatgtgagtgcgtgaagataatttgagtacaatactcataaaaaaaatgtatatttaaattaaattttatttgaaagtaagtgtaattaatgtataaaaaaatatatatttttcaactttcccttttaatttactaaatgggtatggttatcatacatgataaatgctaaaaaatattttatcgaattcaataccttttataaatgcaaacaaatattaggttttacatatttaaatttaaattaattttaaagtaaaatatatgaagacttgttaaattatactagtgatgtagtattcttctgagaatgctttttactcattgttagtatgttttttttttcttttttaatttaaagaattaattgtgttttaagcttataaaacttaatattaaaattctcttaattttgtgtatcattaaagtttttattatagtttgtgttaattgcggtaaaaatacttaacatttaagaaatatattacttaagtactcaactaatgtttttgttggctaaaatatttaaagttggttaatcataacatctaaatgttatttttttttagtaaaactatctagggtatgtttggtttataagaatggaaattataatggtaataatatgtccattactttatttgcttttttttttttttaaattttataatttattacattgtaatgagtattatattgtataaggtaatgctcattacaatgaaaaatcattgtaatagtcattacaattacaatctaatacaaaattaatataatattataataaaaatataataaaaaaaattaaaaaaatctattttacattttatttaaatattttataattataaaaataaaaattatagaatattttggtcaacatacattttagggaaattctacaatgcaccccttaaaatagatatattgatgcacccttatttgttttagcacccgaaataattttttagt

SEQ ID NO: 119948 - DNA, 3165 bp, Cannabis sativa
  modified_base (3103)..(3126): a, c, t, g, unknown or other
aaacctgaaaccaaagaaaacaagcataattctactccaaaaagaataacaaagaaggaaaacaactataaaaagtgacccaaaatctagactaaaaatagcctaacaggtgctcagtagtgcaggtaagggcaacgaaaagttagaacagcgataagatgacagtcttctccaacaatgtacatattgaccctaccggcctgtgtgccaagtttccaggagttgttttggactagctgtatctgctgtattttgaattgtgattgtatatagtcttttgggtaaatcttttataaaagggatccccagaacacctttttactgctgttatgatgttcgtttttagtagtttgttctagtcaagtttttaatattatcacgatttttaataattaattattctattagtattaaactagtttagaaaatcacacatgtggccttcctatcgattagggcattacaacttggtatgagagcaataatggttttaaatatcctgaacacttgttaaatatgtacatttgttgcgaagacatgtcgactcatggtatagtaagtgtttatgttacttgctattaccttacctgcttagataattatagtgagaagaagtagcgtactaattatccataataacaatatgtgtatggtatacacatattgatattgatatatgtccaagttttaagtgtctcaaagatgtggattaaatgtgtgacaagttatacagtaagggtaattgaattgcttgattagcgagctgtctgggcttggggcaaacggtaaggaagagaatcctttattgtcgtaatactgtaaacatgtaaattctactatgcatgatatgattagacaacaagggaaagcagatccaagatctaagagaacaacaggctcgtcttgtgtctattcttttactatcgacactttctgttatgcaactggatgtggtgaaatgtatgaacccaacttacgagcagatcagcaggcaaaaactaaataaaccaccaattatgggataaaacaaaaaggttctagggtgacaaggatagtggtcaaagtgaaattaagaaattgcgatcttattctgagtgttcaagatgcaaaaaggcaccatttgggctaatgtagagacaaatcttgtcattgtggggtagtgcgtcatctaaaaagaacatgtccacaattaagaaagactgatattaaagaagaaaagtgtacaagttttgtccatgtgccagttatcattcaaggggacccgggcactggtcttttagatgactcaagttagaatattatgggcaatattattgttactgtttcaattgatatcaatattaaacattgtatactcaatgaggggatatcaaaagatctgaatggactgtgcatgtatgttagttagtggtaactcatctgacggggtagaccagttagggaaatgacaatatgagttaaatttgctggtattcctatgtagaatataggacatgagtaaccaatgaagacatccatttaattgatttagagaaaaaaaatctttttgtctagaagtaatctagtattagtaaaggtgggacaatttattagtatcatctagaattctaggtgaattgaaggcgacaatttttttgtgagttgatctagttataacaaagaaaaaaatgagatcaaaagggacatgagtgaaactgcaacagttagaatttcacgatctgcaaagaaaatactagtaggtgtacaatcccacatcgcctgagggaaggtcgtatatgatgattttgagattatgtaggcgtgggactacatagttgttcaggacttgaatgaattgcttgggactacctatattagcaagaaatatcttattttggtagcccctcatgaaggaaccccacgactaagtgttctcgccctggagtgatttcatctggggagtttccccatgaagcgtgtgagttagagcaaaatacgttggaaacacttggattggtctgtagggctagtcgtcagcccagaaagtagctagagtgacgcactcgtgtataaaagccatcaatcagtgggagtaagggcccaagagagactttaagcggggacgttaccagggtaacgtataaaagaacgtcagtgaaagtagtggtatcactaaggtaaaaagattacctggattgcttatggtgatacgataatgatgaaaagtacttttgtaattgattggataatcaatatggtatataaggagacctttgaaattttgggaaaagattaccttcttaagcaatgatggaaaggtgtactcacccagaatgggtaaaaagccaataaattgagatgcttgggccccttttttgtttcctaggttacaccttcggaataccgcagtaatggacatgtatttgagtgattggtgaataatggatcacaaagtaggttgtttattaaacaatggactacataattgaggtaaactaagtcttagaatgattaatcaagtacgaagatagtgatgattgcaaggaagcaataatagcgtaccaatcatggagtgaaatcttagaggtaataatagaaaaggaacatgagagtcttagatgttgatgaatcagtatcatcaatgagaaactcacaacaagttggagtggtagttcacaccaagggattgtcaataaaacagagaatatgcttgagatacatatatatatttctagatgtgttaaaaagggcattttaggatttttacctgttgtcgtgatttttgtaagcttaacacgtggatcctaatctggaaaggctaaatgataagtagcctgtcaactctcttgaccattgtttcgggaaggtggaagcattagctcgcagaaagggccaccaaaaaaggaactcccttgaatggcgatactacaagaaacttccacaaaaagaactcgctcttagcaccgggaactgaagccagctattcccggtggacaaaagtcgagtgctcccgcaagggtatggttttctcaccaagtgcttgaaggtgtcttggaatgcgattagttaagctataaccctgttttgtgaaggttctgttggaatatgttttaccaagatctannnnnnnnnnnnnnnnnnnnnnnnaacatcctaaatatgaatatctaaaacaatgtaaataaa

SEQ ID NO: 119949 - DNA, 2659 bp, Cannabis sativa
ttttaattggattttgagattgacatccaataaccaatccaatctaattagaatccaacttttggcatccaattcaatccaatttaattgtaattgaatttccaactttttataattagattaaattggatcgatttaattggattggattggatgatgcccactcctatcaaaatgaccagcttaataaatagttacattaaactagccttgaatttattttttttaagttccaaatatatattattatagtaagtcataaaactgataaattttaatttaatagctttattgaagaagggaaaataagattgattaagtatctttttatttaattatttaataaaagttagaaagaaagttcaaaggtatttgtttttacaaatctctttaattattatattatttttccatatttgtttcattacgtgatttttattttccatgttttttttttttaaaaaattgttagttccaccaaattcaaactatatatatagaataattttatgataggtatacttattttgtccttacaatataggaacattttcttaaccattcaaacatatgacttttgaatgcatagattatttactgtgtacctatgtgtcttgaaaaatataaaatagtaagtattggtattataaaaactattaacccaataacaaacatcaaataatacaaatatgctgacaaaaaaaaaagatatcataaaatattgatattataaaaagttataaacctcttgccttctttcttgcatgttataaaacttaaataagaaataaaatgttaaaacttacttcttttttgccttctaatctttaagtttaaggtatgaaaataatatatagttcatttttttttttttaaaaaaaaatagttaattggaaatattgtttcttgcacttgttagtagtcttcgtatcgatatttatccgatgagttatttaggtagttgtctattggtgatttatgggtggcttgacctccattgatattcaaagaaaaaaaaaaagaaagaaaaaagatttgattaaccttaataccgttaatagcggaagtggagaaagtaattatatgatattccacacaaagaacaaatatttagtaatttttttattaaactgctatttattaaattttatctcttgatgtcaaatatatgatagtttggttatttttaaaaatattttcttgttagttataagagataattaatagtacaaattcaaagcatgaagaaagagacaccacaaagatggagacatttaaaaatgttatattctgacttagccaaattctatttatagattttatttaaaaaaaaaataattatgtgtctaaatttttattttgatactttttcatggaaaatgtggaaaaattgatgaagcactgtgaagaagaaaactgaggagagagaagagatgagaggggagagagaatataatatttaattattcctaaaaaataatttaatggaactcaaatactaagtggtattatacactctttcatttttactgttaaatctaccatctatagccacaaaaacacccttatgaaaagaacaaaacaatgatctctattatagacatatcctatatgtatagggcccgtttggtacgcaggattggattggactggacaagattggattatgctgaaagtaatcctatatttggtttaagaatggactcgactattttatttatttccttttaaaaaaagaaaaacttaaattaaataaaaatatataataataaattaaattaaaatttataataaaaataaataattcgtagcaaaaaaaaaaatatatatcatatataattaagaataaagcctttttcccatgcctctctcactcatttggggttctacggctctgaccacagagccctgaaactccaattagaggacactatttccaaacaccaaaagcaatcccgttttcatcttgaaaattttctaataaacgatccttccttctaaactttggtctgtgactcgtggtgccttccttcctactccccccttcctcctttgcaacattttcttaaaattcaatccgcttgcctctccaacattaaggactggcaagcttctcaaccatctcttaaactccaaattgctagaacgcaggctgaacttgaaaacttgttgaattatgaccagcctggtcctcattctgctcaacaaatttcccacctccaatctgagcttaacagacttctccttaaagaagaaatcctttggaaacaacgatccagagttgattggtttcgtgctggcgataaaaatactcggtttttccatcaaaaagcctctaatcgtaaacgcaataattacaatcgtggtttaactcttcctgatggttctatcactcatgacactcagaccatattcactcaattccactcctactatactgaccttttttgctctcaaggagtttccccatctgctatttcctccattctccagggtgttaacactaccctctcttcttcccaatccgcttttcttgctgaggagttcactgctgatgagataaaaacagccatgttcagtctctctggagacaaatctcctggtcctgatggtttaaattcctacttttatcagaaaaaattgggatattcttggatct

SEQ ID NO: 119950 - DNA, 1979 bp, Cannabis sativa
  modified_base (1906)..(1913): a, c, t, g, unknown or other
agggcataaaacccaacacatacgccactaaggtgagtactgctagagaacaatctgaccattggctggtaagaaccttcttcattgtgtggtgtaaagctgcttgtacgatccaggatacgcatcgcgcaaaagtctctcctttgcatattactctctaaccaggatgttgggtaaaaagcatatttgagggtgcgtacgcgcactaccatgttctggcacgagggacaaaaattgatcctgtgccagaaaaaggtgtaaccgtccatggagtgatttttacaagacgctgacgtggccattgtctacaaacctttattgcgctttgagtcctttactaaaggaagttactcccgaaggtcgtcgtctctcgttacctcctaagtctgggagacattccttttctttgttacctcgaataattcttaccgtagctacattcttccctccgattgttaatgaaaacttcgataacatttatccccaagctttcgagattctttggatcatgggagcttactttgttcccggtattgaccgttgacacatgctgaagattcaggtcacgaatacacccccacatgagttgtattctactgtggatacatacgatatttgcttcctctttcgtggtaatcacatgacatttcaagaagtatttcttaccgctttttgcacgtagcaagatgcgtttagcaaaaaatagtgcagtgcaattggcggctgaatgacgtgcaaaaaaggaccttgacgtttttttgggccctcggctgattgtacatgatttctcatctccttagccattggatctattgaaagaatttgaaccgttgatctttcataggccttttttctttttaaaatataaattgtctttggtggcatcctttttactttatttacttgaagctgcatattttttctgcaacctcattttctttttcagcaatctcttgcatgcaagaagtgttagagggtttgatccagtgattactcgttatttgaacaaaactttttccaaacatcgcaccccttcgattggaccagggaagttcttccttaggggagatgtttcatttttaggttaactacaaccgttgcatcaattgccttcggggctttcaggcaggctttcttaacacaccacttatccctcatgattagaaaagtgcactcacccctatctaaatttttgtatttaacatttagagcaaaaggtttttgcttagggtagggctagggttgttcgcgtgttgaataacaggatagcgtgaacgaaagaaaccccatccttgcaaccgtcaggcctttcaaaatgtttgctttttccttcgtagcaatggacttgaatgaaaaccttcttgcaagcacgaccatatctatcgaaggcaaatctatcttgtatgtcgaaagatctttggtgagacgagattaaactgagactcgtgtggtaacatttcaacctaaggaggccttggacacgattctagaaaatgaacccaccgctgagagagaccttcttgtggagattagaagaagtgaaggggtcaaaactcctctgcccgcgtaggcccataatgagtccatttgggaaatggattagaaagccaactgctttcaatcttatgggatgttgcaagcttattctgaagttgctgacctctacaatgtccctagactaatgtggcacagactttccatcatggggaaatctgcatctgttagtatagaagggtttagtgcacggagttggtcccacatttcaagtggtgctcatctccccttgagaacttattttacaaatctaattgcaaaaattgggaatgccccttttatgctaatcccttcatcatataggctcttggatgggtgtgttctataaaataaactgttgggttttatgccnnnnnnnnaactcatttcatataatcagattgtaaagcccgcttagttaatttggaaattatcagttaattgtg

SEQ ID NO: 119951 - DNA, 1042 bp, Cannabis sativa
aaaatatcacgtgttgatattaaagtgcgatattagtctctaataaaaagtttattttgatgcagataagtctctaatctaaaaaaaatatgataatagcctcaagttcaagattctcgttagtccgtatgcatgtacccaatttaaatgttttgtttgttactcttaaaaatatcacgtgttgatattttattagtccgaatcataattttaattaaaaataaataaataaataattttcaaaactaattgattaactttatttatttttctttcttcttcttcactcccaacccaacctgtttaaaaaaatattctaagtaaactttgaactaggaaagcttaggtcaaagaattgaattgaccaccaaaattcactacctaccactacacatatctctctttatctaccgtatactctatttatatctctatttatatctctcgatttactagatacaaaaagaaacaaaaaagaacaaaaagttttatttctctccaacatcttgactccgatcatattttttcttttgtttaattggtattttaggatagtcggatgggacgaggaaaaatgtggagatgaaaggatagtagagtgaacaatctagatttaggaattcgtaaaatgttcattatttatattttttagaaaattggtagaattgacactagtgacaattatgagtagtgtatatagaccctttcaaaaaaaaaaagagtagaaaatgttgtcgttcactatatgttttatgtacattttataatatcaaatctctcatgtattttttttttttaattattattgaacgatgatgtgatgtgataccactttggataatattatttaaacaaaatgtaatagtcttgtaataattcattcattgctcattattttattgataattaatgattctctctctgttttattttataatagaaagttttattctttgaactaatacttataactattgaaaaaataagattacttttccctaaatcctaaaatactcctctcattattctcaatcatttctct

SEQ ID NO: 119952 - DNA, 1048 bp, Cannabis sativa
aacccgatttaattgagaacaagccacttggttcccccatccaaagccaatcatcctttacatcatcctgcgggagttgaatgttaagaatggctttcgtatcagctcggttgaaccagtttttgatcatctcttcatcccaacagtcgtcttcagttataaattggttcacccatgccactccatgtgttgcatccaaaagtggtgtgggacttctattagcggaaggcacccacagatcaaaccaaatagatgtctctttcccattgccaatctttctgcacacatggttgagtagaagagacctagactttaggatcgatttccaaaagcttgagtctctgctattgatctccacatcgaagaagtttctgtggtttagatatttgttttggataattgttccccagacgctctctttatctgttagggctttccagccccatttgagaataaaggctgagttgatagtttcgattttcctaaattcgaggccccctcgcatttttgattgacaaagggagctccaatcaacagtatggaaagttttttttgcctctgtatccccccaccagaagtctgtcaactccttatccacttttctagcgattgtttttggaattacgtccgaggctgcaacatatgtagcaagggaagaacctaccgactgaatgagacaagctcgacccgccttggaaagaagtcttgttttccaactctttactcgcttcattactttatccaccaggaagttgagatctttagatcttttgaaggatctaaagagcggtagcccaaggtatatagagtcattttgcatccgtttcattcccaggatgttcataatctcttgcgccttgttactgggaactccctgagtaaaataaacagtcgacttctgatagtttactgcttgcccggaccaagcacaatactcatcgaagcacttaaggaaattgttagcttcctttactgatgcttttccaaacaaaataatgtcatccgcgaacataaggtgggtaatagctgcccccccccccccttgtga

SEQ ID NO: 119953 - DNA, 2358 bp, Cannabis sativa
  modified_base (133)..(137): a, c, t, g, unknown or other
  modified_base (225)..(232): a, c, t, g, unknown or other
atcatagtgcggaagacggtggtaaccaacctgaaggagagaaagagatccaggctcagatcttgataatactctgcagtagaatggaacaatggttagagatctgagcgaaaggagtcatattattctgctnnnnncaatgtaaggttttctaaactcttgtgtctttaatttcatcgattagagatattcatatttagaatgttaattcaacatacttgttannnnnnnnagatcatggtaaaataatcccaacacctttctcattccttataccacatgaccttaagacatccccaacgtaagggccaatggacctgaccttgaattcaatcaattctgccttgaaagtgacagaagagttctatggagtcttggattaacgaactttatgagccatatgtttaaattctaagtcacctggtgaaaaaacaacagtgactggtggtaaaaatattagcttcgctaagggaatattaactaagcaagacgattcaagctaaggtgcttctcgcaagaagcttcgtttaccctcaataacttcttgtaaaaattgcctatagtggttagaagtttcttcttagttaaacctaacgaggtggtccttaatttttatatcgtttatttgaagtaaggtttgaggcttttgggtttgaggtttataaactaaggcctaaattgaggacattctgattctgaggattttgggagcatgaattttgggttaaattaggacgtggttacagagaaaaattccccaattcgtagaaaaatagagcacaaataaaacccagaacttgcaaattaggtaaccttaaatttttttaagccttaaattactcaaacatccatatagagcttactcaaacaaattgcgaatgaaaaataacatacacataaggaaattaagatttaaaacttaaaaaagtcagaagaaggaaacatcacttactggttgtttgaaaaattctgggttgcaaaggacttcgtgatggaaactctgagttcagagagactaggtcttgaagtcgaagggtgttatttgataaaatttgaagaaagaaggtgagagacagtgagggcatgcacttttagagaagaaggtggttaacaagtgttcgagtgcaaaggtttggtgggcaggcgaaagagaaaggattctcataatatatacccaaaagaagataatcgttcaatcatgaaaagagtagatcgaacagatgggaactaatgggaaaagaaacgatcagagcattaaacggtgaaatgatttgccttgaagttttaaactgccaaaataaaagcatacaaattttaaacgggaaaaatacgatcgtacccttgaggcatttaaaaagtatttttaggggacaattaatacctatattttgagcatcaataaaaagctgacacatgtatcaaagctagaatataaaccttctcaaattacgcattattaaatgtacttaaatgactcatcttgggaaataaaattaatagaaatactcgaactcgctgccatatagacaatagcaagacatgagcaataactattgactgatgagatcagcaaggtaaacaagtccatctcgggataaatagaatacataatagaactgtttggaacgggtagataatgaagtttgcagctcattgacccacatacttgtgagtatgttcaaagaataaagacaacaacttcaacattcactcacctcactcttaacacgttgaagtaaccatcttgcttataccttactcaacagttaaggaaggctgcgagatacacaccatgacacaacacttaaacattttttcacaaagatgtttaagaaagatattatttgaatgacgagaataattgagcacaatcagcataatcgtctatagataaagacaaagatcagttagacaattatttataattatctcatatgatcatatcctaagggaataactgtcaccctagacttctatagatagggacagaatctaagaaatagaggacaaccattctttgaaaaaatagattatattgtgattatttatcattaattcctgaaaaatagtattattgtattctatatacaatctctcaaatctgaataagatggacacgtggactatggagatttaacttcaaaaccacataaaaaacattcttattatttattgcctatataataattctgcagtttatttattacagtaaaggctaattatttagttaattaaaatctgcattaacaccattgtatcaatctaaacaatcaatgattctctatgaatggtttacattgggggtgggcatcatccaatccaatccaattgaaacgaaccgatctaatctaatccaat

SEQ ID NO: 119954 - DNA, 726 bp, Cannabis sativa
tctctctctctctctctctctctctctctctctctctctccgcagctcactctcctcttcctcacgctcccctctcaagctcacatagacccaacacttagttaaattaaattttctaagtgttatactcacatcatgagtgtaaactataaagagagagataccaagggaatgtacaacaaagaatagagttgttaagcatgcacaactttaaggaagaaatagttgtacaacaagtacaagtagagaagacactatttgtctcactaggagtactaactatattatggatagtatagtaaatatatcaatccatctcctcccattttttcatacctcatatataggcttaaccttcggcataggcaggctaggcttgtgcctagagcccacgtaagagctcctaaaaaaatttctttttaaaaatacacatggtttttattgattttaaaaatactacatttctttttaaataagtatctaatttttttatttttattatggtcgactaaagtttagagccgaccctactcatatacaatccatccttaactcattttttccatcctaccaaacgaagggggtttggtggtttcgatgattttggtagtgcctggatggacataaaaagtttggctaattaggatttttaccccctaagctttaacatgtaccaaatcatactccctgaacttttctggccgttaaaaattccccttgaactat

SEQ ID NO: 119955 - DNA, 1062 bp, Cannabis sativa
atcgtgttcgtacctgcaagaatttgttctggccgaggaatggtgccacgaagaataccttctagaccatgagcacgaacagaggggatgattaaagatcatcagtaggagtaattgttgcgatctagtctgatgttcaaggggagcagagtgtttggaacttgaaattgcaaagcggcagcctgattatcgatcggagcttgtggtgaatgagggggagcgttggtgcgaggatcatcaggatcagccataggtatgataccatgtgagagttgaaagagagaaagagagaaagagagaaagtaaacagaacagagaaagaatgaaagagaagctcaacaaagaagatgagctatgattgtatttatattgagtattgttacattagacaaagagaacacgtgacaaaaagattaagaatacagttgtaacagaatttgtaacagacacctaaaccaactaactctaacatggtgaatttggccgttttattgtacattttttttaaaattttgggcaactgttattgtatttttttttttctattttgggcttttatatgggtttaggtatgctatatttaggcaaaagattatttaaaatctcatatttaaggtaatagaatgagaatccgaaccctaaatgttgttttctctctccaatcgactctactctaatgaaagtaaatatagtgaagaatgatattttgtattttgagcttaatactagagctaaaatacttttagtaggcttagggactcggctgttggtagctgatgcttattgccatcattaaggttcttttaatttttttgtactttattttatttatattgattgatatatgtaataagaataataagttacaagctagtggtaattttgtatgtttcagttctttattttaggtttgtatataagttgcatagttatggggttgaataatgataaaagggtgatcaagatgcaaaatggtcttaaatctaataattaagttaataaatgtccctttttataaaaaattaacaaaatgtccattctgttaaaagtttgatgatgaaa

SEQ ID NO: 119956 - DNA, 1098 bp, Cannabis sativa
caccagcgaacttgtgtttgcctcctgtttagcatcagttttttacactggttctttgcccgaattaacctcctgttttttcttcaattctccattgtcaactccttgttttttcttccaaacaactttttgatctctattacaattagctacaatgtgtaccaagtttgcacatgccgcacattttgtaggaagccactcatactccactggttgttcaagtagttgctttctttcattaacaaaagcaatggtttttggagggtcattcgaaatttcaatctccacaaggacatgagcaaatttcaccatcgatcgctcttgcgtaaccttgtctatcatcaccggtttgccaatagtactaacaagcgcacttaggttgtttcttccccaatattgcagccccaatccatttagacggatccagacgggaactgaattcaccattcgagtcgtatcaagatcagtggaccaaggacgtaaaactactggtttcttgtcaaaatgaaccacaccagcctcaagaataagatcacgggtagcttcatctctgaagttaaccagagtacaccccgaatgcatacgaacgatcttctatataccaagattgccctaaattctcttcacaaatccttcaaacaccttgaaaggggggtttgcacctaggacaatacaaacaatggcatttttccagaatgaagcttcatcttctatttcctctaggtcaagtttggccaaaacttgatcacctacacggactggttcagtatatttgagtctagaggaaggggtaggtacctgattggaatggaacttactccataactctttcgcatcagtctggtaatcggctttctctgcatccatagcccaggtgccagttctcggagaagcacgcaactgctcctcacctccaaggtccattccagcatctgtaaccaagttctcataagtatcgtgaaactcatctgtttgttctccttcagcagtaaaaccatcagcttctacctcttggatcgaagggagatcgtcgactgaattcgagcgtgtcgtggcagtgattccaggctttcaagtgatccgcttcttcttcgccat

SEQ ID NO: 119957 - DNA, 833 bp, Cannabis sativa
  modified_base (742)..(749): a, c, t, g, unknown or other
  modified_base (791)..(795): a, c, t, g, unknown or other
gatctaatcccctgtacccaactcatatatggtttctctggctagagcattacacctctaggacaaatctgtctacccctcactgttggacaagcttcgaggagcacaactgtgatggcaaaatttttgataattcaggtcccatcagctttccatgtcatgttatgccaaccagctctattatgacttaaaagttgtcacatcagtttcccatttatgcgtcaagttgccaacaaaaattgggtagggtacctcagaaggaaccaaagaatagcacggaaatgctataaccttgccctaactaaggttaaaaaggaaagtacctccagccagagttcggggaaaggaaaaagtattgcccaataggaggttgcccaaggcaaggacgaggacatggatccccggcttagggaatcaaacacaaatgtaaggccggtagaggaattcgaagatgtggaaatcgacccatatatcctgaccaggaaactaaaaattggtaagggtttgttgcttgaagtaaaattagccttaataaaatttctaagagcaaacatggacgtttttgcctggtcacatgaggatatggtcggtattgacccttctataatgtctcacgccctaaacattgacccaaacttttgccccattcaacgaaaaagaagattactgtacaaaaaacgggcgcaagcattgaaagaggaggtagaaagattgtgaaaaaatgagttcatcatcgaagctnnnnnnnntcatatatcactgatgcctgtactgttgggttttatgccctnnnnnaaactctatttcaatgtaatccattttattcaatatca

SEQ ID NO: 119958 - DNA, 2123 bp, Cannabis sativa
  modified_base (2094)..(2097): a, c, t, g, unknown or other
aaaaaaaaaaaaaaattattttgatgtgtaaaaatgaaaaaaaatcccttatatatatatttttttttatataaaaaaataaaaattatattaaaaattggtaactttgtaatatatagtgtagtgcggtttgaaccgtaattattaaatttaaaattacaaaccgcactgtatcacgcgatttggtcaaaatacaaaccgcaattgcactacaaaaaaatcaaactgcatatatattataatcactgatgttatggccctttatttattatgtgctccactttacaacattctactcctacatatttataggttttgtttgtaacaaaattgattgtatactaatgggaaaatagtagactcctaaaaatattttggtagacctttaatcttgttaggtatttaggagaataatttaaaatttatttttttcattatcatgtacgttgtagttatttagtagcacttgtaaatttttaaaaattttaaatactttattgtgttgaaaacaatgctcaaatattttttttctaccaatctttgaaaattaacatgtaatcttaaataactacaacatacacaattatgatgataaaaaattaaactaaaaaactcttataaaaaaaatttaaaaaaaaaaagaagaagaagaagaagaactatctaaacactcctttagaaagtgtattataattttttcctatactaaataactgaaaaatacatgttatttaaatgtcaaaaaaattaataaaaaatagatggggtaccattttatttatttatttatttaaaaaaagaaagtaagttgtagtaaaatgtcaaacgtttttttttcttttttttttttttttgagaaaaaaaaaacctgtatccattagatgaaatcagcaagtacatgatacaattacaattataaagaggaattcttccacaaagcttcctgatctaggcctaaagctgtcctagctaaacaatgggcagtttcatttgcccctcttgggatgtagctaagataagctttagggaaataagatagcaagctcttaatttcagtaacaaaagtgttaagatgcagattatgagtgtcattatttcaaatataattcaccaaaaccttgcaatctaaaacaatactatctgggtaaagggagtgagcatgacaccacgaaagagcaaaatgaagggctggtgcttccattaacaaaggtgtagtaattccacgccatggcattgccaagtttaaaagaacctcccctgtatttgaatgaatggacataccaaaacccattttgatgagttgtgaatcttgagcagcatccacataaagctgatgggtgaaagtaggagcagaagggatacttccagtgggcagtaacagatcatcttgaatctgtgttgtagttgaaacctttttgttgcaactttggtattggtcaatgtagtctgtaacctcacgcagaacctgttctggacaagaagagaaatcagcatgtatccaactattcttgcagttccaaatcttccacaacaaacatacaaagaagtgataatctccagtagcaaacacagtgggagcaagatgtaataaatccagacaagtcagtgaaaaatgtttagtaataaaatcatgaaatctagttaatttccataccttctggacagcagggcatctgagaatagcgtgctctacggtctcatcatgatagtgacatcggctacaatgtggagaatggttggtctttcgattgaacaggttgtgattagtagggagaatatcataacaagcacgccaaagaaagtgtttcagtttgggaggcagagggagtgtccataactgtttccaccatgtgtgtgagggtttggtatccgagggtgttgggtcattttgatgaagctgactcgtggctaggtgttaacctgagttgacagtgtatgtgccatgaggggtaagggaccaaaagtatgtatcaggtgcagaaatgttggtgagagggatggtcaagatagcttgtgaaacatctgtagggaaggtggcttggataagggcatggttccattccttgctaggtgttagtgttgggttttatgccnnnnataaaactctttacaatctgattagt

SEQ ID NO: 119959 - DNA, 699 bp, Cannabis sativa
agatacacataattatactcacaataaagatataaattccattactaattattcaaattacttgtacaaaaaccaatttaatgttcatacgagctttagttagtttgacctacccccactttctctaaactaaactccttttgtgggccatattttgtcctaacattaaattaaaaagaaaaaaaaatctttcaaaactttgcaaattccattaaaaccctatcttttttgacagctttatcaaaacccaatgcacaattattattattattttacatttttttcacttttataatggttagcttatttgttcttattgataaaagctttaaaaaattgatcccacgtttgcttttatttgtgttttgcttttaataaaataatttggtttataaaaagcaaaagcttggtttgcctttctctgaaattaccaatttagccctaattctctatttggttgtgtggattctccatttagaagtgagagggtagttatgtaattacacaatgagtacaaaaaagagcttaggagaaaaaaaagaagaggttcatactctcttatttttatttttatttttttgaggaagataaactttgaccacttgccacttaggaagaatatatgtttgtatagttcttgttttcttttcttagtacataagattcaatcctatggttcatcaaaaaaaaaaaaaaaaa

SEQ ID NO: 119960 - DNA, 2814 bp, Cannabis sativa
atccttgcaacaattaagaaaaactattatacaaacaaacaattgtgggtggctgaatttctcagtagttttgagctcttatagttttgggttattggttcgtaactatctaatagaattgaaaaaaatcgattcctctttttttttatatagtatatgcaaaaatgttaccctaactgatttttcaattattgaaggaagaaaaaagtaataaaaatctcatcaatcattttcagcatatatattaaattttattatttgtattcacatttttattgatattttgggtctctatgtgtgatgtgatccgagtgaacactctgagcctcacttcaagaaaaacattaatgtatgtattaagcaaaaacaaggtaacaaaaggagaagttgttgaattgaaagaggcaacaaaaggggctgcctccttaaaacaaagaaaataagcacccaaagccgtaatatgattggcgtcactcttcaaatttctaagtgcaactctaatgcagtcagtggctgtcagaaaatgggattaatgtccaaaaaaaaatattgatttttcaaccttaaatgtaagtagagtaactcatattaagcatcgatgttaactttattttttttaattgattaatttattaatattttaattaaaaaatatatccattaacgtaactagcgttggagctggagccagctcttgaacatgtaagttaggcagtttaagatttatcgtggtgctaaatattatgagtgccatcgtagctagaaaaaaaataaaaatggaaaggtattattattaagcttccaattagcgttttcctagcttcaatggccaactcaggtagtgacaatttgaaaagaaattagtagacttctagtatgtattatgtttcttatatatatatatatgagattagtattttgtccaaatatattttactaattatataaatgtccatctaattataatttgttgtatttttaacagaatatactaattaaaaagctaaacttaagcagattttatattattaaaaatatttcacccactcacatctagcccattcataaatctgtacaaaagtatgtgcatatgcggctatatcatacctatacatgatacatttttttaaagaaaagtgtattaatatattaaatcaaatcaattattacagaagcaattaagaatctaagataaatattaatttaaacacgcttttatgaaattagtaacagacttaattagtgtgtgagttacaccattcactaaatgtgaaatgacacaataagaaccactaccaactacaactaaaagagaaataattttatcaataataggtttaaacataatattagaattaggacaattcactcaattgctaactgttgaagaatttgtctccgttctcactacattgaagcctaaagcaatcccagccgcaaagctaagagctccgccaccaccacctggaattcgcctacactaaatttatttcagctttagaaacactttcccgcctgaacttgttgatggggataatgttgcggacaaaaagtttacacatgttgttgaagtatttttcattttttttcgcttggagcacccgtctcctcgtgcaatgaaatgtgtagtttggcctcctttcctttagaaagtgctgcctcaatattttcacatttgtatttacctttcacccttttctttttcgaagagcttctacctagtgtagacatactatacatagagaacatattcacaacatattaaataagaacatattttggatcttatttagatcaatatctattaccatcagttacataagaacatatccaacatattaaataaaagttggttattatggtactaaatcaggtacgcagcaaaaaagttttgtattatctgcttatcattgtaccatatctaaatgaaactacagatgtgtgtactttaaatcaaaacaataaatcataagtttagaataaatacctcttgaagcctatcatgatatttcgaaacttctcgtataatttatcccttagtccagataatgcaatttgaactcacactagtgtcttccaaatcgtttcaccacacataagaaatagtgtaggctattaggataaagtgtataatgttcttgttgatttctcaacacataagcaacaacactttgaaagagaaaactgttttctttttctctcttaaaaattacagtgtaaaataatgttcttatttctcaaattagacttttgtttatagtagctaaatcatattaattaaatcatatttaattgtttaaataaatgtctataaccaaatttaattacggatatttataagagaatctctcaactacttgagagaatatctcaataatcttgaaatatcaataactatttttcaaattagatatttacttaattaaataattaattaacccaaaaagcatagggacaaaaagatgctaggcgcctaccttgtcttttaggacaaatatgatgtcttttgtcttgacaacttttgtcttgacaaattttgtcttaataatttttgtcttttccttatttaattaatttgaaaaaatatatatttgataaataattactatttcaccaatttaatatagatttttctgaacattattatactactatttatccctatccttaacaatattttaaggtggcgatttggggaccatggatctataattctaagctatactaaattagattatttattgagtctcatcaaccaaataattattgtttattaattgcatgattactccactataaatatagaattgaact

SEQ ID NO: 119961 - DNA, 3270 bp, Cannabis sativa
tttaatataatatttccttatctcaaaaaaaaaaaaagtagatttaggttttttatataataactttattaaataatgtgtaaattaaaaatcaaatcccctaatatatgtaggtcatgatttactgaattaatttgacataacactgtaaaaaccctgacatacactattgaaagaattgcaacttccggccatttcaattactgtaaaaaccctgacataagaaccaaatctgacctttaattaatgtggaaggtataataattcctgtaaatatctcctacgggaatataatctcaatcttcgagtggtgaataagtttcgctaacaatttttttcaaatttcttctcttattaatgttctggctctaggaaatcgaacattgaaagtcgtacaccacatcaaatttaaatttacacaaacaaggaagtcatacccaatacaacacaatcttgacttaagcttttgtcaactttgccattctttgttatagccttgaaactgaaaaacactttaaaaatgaccttgtatttccaataaagtttttaaacaatgaagttgatatgacatatgtttttttaaaaaaaccttcaagtacgattttaaataaatgttactacttgtttagtttttcataaaaagaatcatgttaatactattttcccatcaattcatataaggtcaaatcagtaagttgtactatctaatttcataacctaaaaaatattatattaatattaaatataaacacaaaaccataaacagaaacatgtttaaaaataaagtgtaaatttaaaatctaatctcataatacccaaatatgccgtaaacaggtcatgccttactgaaatttagatgtgacgtactttgtacaaaccttaaagtacgtaatttaaaaactttcaacttattgaaatatggaaggagcaggtgaagacttaccttgaaatacgtcattagaaaaaataaatctatattatttctttattaatttcaatgaaacattatttaaatgataaacgttttttttgtctaatcaagggtacaaatttatgtgatgtttgcattgaggtaatagtattatgatgttttgtttgacactgtaatatagattgtaatgaaataaagtaacttgtatatttacgaaaatatcctcacttttaatacttttaatattttaaatttaaataaaagtgacaagaaagggcaaaatagttattttttaacaatgtaatcaacatcacaaagttttaaaaatgaaagcaaacaagcaaacaacattacaacattacaactaggcaccattaaatggaactcaattcttatgatcttctccctcgcgacccgattttgttcaagtgtctggcgcgcccatggtcggtacctcaaatataagaatactcatcccacgatggcattgtggaccacgagaggtcgagcctcagttgggtggtaggtgtgaccgtgttggaagtagttcctccttacccagtccacccattcaaagccactaacaaaattaactgaaaattaaatagataggacattcctacaatttttatcaaataaaaactaataatagagcgttcaactaaaaagatataaagagttgagttaatactgaaatgtttatgagatgatttattggattgtcaaaattacatgttccagctacaaaacacgaaagtagtacataccaatccttctttttacaactatttacttcactacaacaacaatacatattttaatattttatattttatcctatacataatctatagatagcgactaacttctgtaggcaagaaaaaaatactaaattaacgtgtgaaggaggaaggaggggtagagggatatatatatagtacttgtgaatctgattgtgatgtgtggtcttgtcacaatataaaaaataatattaaataaacttgatatgacttaaaggtagatcttgaattaagttgatattttcaatcccttgaaaagcgtaattttaacaaacccaataaaatggacggtttggttaaatttgaattgaaaaattcaaaatgtaaatatgttaaatattattttcccaaaacatcaagaaatatccaaatatgtgtttcacatgtaatgataaaatccaaaatgtagcaactgaaggataatatttttttatttttatgagtaccactttggacacttttgtcactaccgattgtacatcggccccactaattagagactactattcgaaagcggttagtgatttcgttacgaaattagtgacacggataccctacaactatcttgattaaagactttgtgtcccggaaccccttaacacctacagtgatagtgtcactactgcgactgtacatcggcaccactaattagagactattgttcggtagcgattactgatttcattatgaaactagtgacgataccctacaactaacttgattagagactttgtgtcccggaaccccttaacacctacagtgatagtgtcactactgcgttgttacatcggcaccactaaatagagactactgttcggtagcggttacggattttgttacgaaactagtgattctgataccctacaactaacttgattagagactttgtgtcccagaacccctaaacacctacagtggtagtgtcactactgtgttgttacattggcaccactaaatggagaatactgttcagtagcggttacagatttcgttacgaaactagtgacgccgataccctacaactaacttgattagagactttgtgtccccaattatcctttcatgttacagcaccatataaaaaaataacagttttctatattgattctttaatggtatcaatctaaaatttaagtaatatcccatccctattcttaatttatgtttatgcagtgaaaaataaagtgcaagttatcataattaatattaggaagatgtatcttcgatcaaataagatgtttcatgtaagagcaccaaataatgtcgttcatgtacaacaatcactctaaagattaaaagctataccaatcaaaagaactaacaacaccatgacccaaattatatcacacatttaaaaccctagttatcctttcatgtaagagcaataattacacagattaagagagatgtctctcttttaatattacagcacaacataaacagacttaaatcaagggtgagatcactctcctccatagttttcaaaactcatatatttatttttaatgcttattacatgttactgttggatattatttt

SEQ ID NO: 119962 - DNA, 1225 bp, Cannabis sativa
aggtaataaaatagaaaagaaacaatttttatttcattcttttgttatgattgcatattaaagaaacaatcacataccaatataatgactattccatattttttatgaattttaaatttgattctatttcattcttatactcattactatttctttttttttaattcattccaaccaaatactacctacgaaatgaaaacacaacaagaatagaattgaatttaataaacatataaaaaaaaaaattcaccttgcattggaatgaactttatgcctattttaaaataaaataattatttcacaaatttgtgaaaaaattattcttttagatgacattccaataatttaaaatacaatcaaactaaaaaaaaaattgaaattgaattattttttttttcccattccatttgattagcttggaatgtatgtgaaaaatcgtacccagacatcatggggaagcaaattatgagattactctcattcacatgaatatgaagataaattcataaataaagctcaaatttcacttatataaacgcctgaaaattcagtaaactatctataattacaccacaaaatcaatatcaaaaggttcagttcagaaatattccttcaattcaaagatattaagttattaaccattactacaaccaaaaaccagcagtgttattgtaactaatctacccccgaaatcaaacacatagctcagaaaaacgaaattcaaattcacgtaagttcaatttcaatttactccaaaattcaaaaagaatcataaaccctaggagtatagagtatcgaagatttacgagatcacttttgagatgaggaaggcgtgccgaggagactggcctgctgaagctcgagatcgttcatctgctgctcacggtccatctcgatgatcaaaggtacgacgagaatgaggaaagttgtgccggcgatccaggcagccttgctagtgctcttcaaaagcttcttcgttacgaatgccgcgtccgtcgctgcctgctttccccgagccacgatttctgactgagaaattctcaggattatgcttttgctctcgtctttcttggggtttcgtctctcagggagtgaaattccaccttttcgggattgggacgccattgatttgggaaaacagaggaatttggcactgaaatctcttggctcgctgagacgagggtttttgagttttttttttttttttttttgggggggggttttt

SEQ ID NO: 119963 - DNA, 833 bp, Cannabis sativa
attaatctagttaagttatatatactatacagctttgataactgggctactaagtctagttgagagtgtgtggttcatttaatatatattagtgacaaacaagtactatatatatgtgttgtataagaaaggtcaccttaatattaatcaaatgattttttgagaatgagatttatttgttttttatcttttgagaaaacgacctgatgccaactccattcaagttggtatagcaagggatctcatactttctttgctaatgaagatttaggacgtgtttggaataacttttattttatccaaccaaattatatatcattgtgtatcactttatattactagcttggttatttgcaattaattccttgttttattaaataatttggggacggtggtgactgcattttatgggattagtacaagaagtgaatagtacttgacctaataatcaatggacaatgaatatgtatatgttggtcatgacgacaggtgacgactagtttagtgtagattttaagtctactgaccaattaacagaagtaatcttcaaatcttaatatcttattatatataaaaaataaaccccccaagaaaaagaaaaaattatctaaatctgctgaagcttacagatcctatataaaattgatttaagtgtaacgaactagtttgaccttttttttaaccagaccaatattatgttttttttttgaaaaaattaaaactaaaccaaatcaattaaatgctcaaatcaaaccaaaaaaacacacttaaaaactggttggttggtcatcaaaactatatatggtttgttttcatagttttttttttttttt

SEQ ID NO: 119964 - DNA, 2130 bp, Cannabis sativa
  modified_base (1960)..(1984): a, c, t, g, unknown or other
caacagtaacgacaacctctattgtggtggtgtcaaacgtcacacaagtgtcacacaactgtcattacgtgtctcgaggttcagctttcaagaaaaggtattaaattccccagatattgtagagacattcaatcagtcacatcggctcaaatgaaaggactgaacacgtgtcaaccggatcagtcaacttaatgaccgaataagtccacgtgtgaccaagaagttcttgcacggacttggggggaaaatattatcctaatttttacacaaggtaatgtggcatctatctgggtgacacatggagcatcgtacaacctggatgggttattctaactgtggtggtccgttcagggagattcgatattcaaagtcagttgaagttgagacatccgagtagagcatgaaagagcttccaactagctttcatcataaaggcagctcgaataagccgaccaaggactgcaagttgaacatttctatagatatatcccatcatcatgcttacaagacacgataatatccctaatttcatgggataaatacgcagtatcaaggaagaaagaaaacctaccttgtttcccattttatttattgtaattatagaaagtaaataggtttttcattttatttcttattagttttgggaaacctactaatgtaatttatccctataaatagaagaatcatctcactattcagtgacacgaaattcatataaagaaaacacatgagaaaaatatagacttaagattgaaatactcagagatcactgtaagagctttcgagagagatcaaggccttcttgattctctactcacaagttagtacaacctaatggggagtaggctattaccgtcaccaaggggttgaacctctataattttgataatttttttttctttattattattatcattattgttattcaattattttaaacgctttaatttgactcactgtcgttagctaaaagtgaggtcaataggtacgatatgtatttcataggcttttcaaaatactggttggaccaacacgatacacacatatttacagctctgatattttgacataataaatctctcttttggtagttttttctatacaagaataaacatgtattttctttttattgtatatctactacatatcttagtctattctttctttaaattttcaattgtaactctaatgtgtaaatatttgaagatttttagtctttatttcgctaataatttgatcttattttctaagtggtcaacaaaagcctatcatgtaattcaagatgtcttcgttatgtttagtagttgctctagcctcaatgctaatctaaattagtctcatatttaatttggtggggttgatgaagtgtttaaataaggcatttcagatatagttttgtttgaagaggacattttcctcttaagtattttggggcactataagactgacaaaatagaaggcatgggattgtaagctttttctaaagaagattcaattgaagctccataattgggcaactcgccacctcttatttgctggtaagacgcaattgatttagtcaatactgttaggcaattcgttgttattagatgagcatctttatgatctcccaagaagtggtcaagaaagctagcaaactctataaagactttctagaggtgcgaaagggaatactagtaaaattcacattgcatcttgagaccttgtttgtaagcctaagtattatggaggcttgggattctgtgatggaaccaagtagaacaaagcctcgattgcccaatttgtatgggctcttaccataaagcaagatgttatttgggctaaatggattaattccatctacttaaagcaccaatacattcacattcctattctaattctcattccccagcccattgccattcctattcccattcccatttccattctcattctcattccctggcccattcccattccnnnnnnnnnnnnnnnnnnnnnnnnnattcccattcccatccccattcccattctcattcccttgcccattctcattcccatcctcatttccattcccattcgcattctaatttccattccctaaccccttcccattcccattccttggcccattcccattcttattcccat

SEQ ID NO: 119965 - DNA, 851 bp, Cannabis sativa
taaaagtcacatttacacatttagccacaaattttttttgttgtgactaaaaagttatcactaaaagtggtatttttgtagtgcaaaaaatgcatccagttagagtgaaggaatggaacaagatggagaagactccaatttcaattagagattgattgaagaaagaaggcatgaatgaaagactaaagaatgtaaagacaagtgctcaaatgaagttcagtgagagaatgagctcgatgcatatatcctcttattgatgctttgagttgcgtatttagggaatttgagtcaaggtaaagattgttagatatttgactcaaactaattttgggtaatcattaaataattgtatgaaaaaaagaatcttgctgaccaagttttgaagagtcttctttaggaagctttgaaatgtcttggtgcccaagtttattcttcatataaatatgtgttttgtgtgtgagaagaagagtgagttatgaaaagaaaagtgagtgtgagtttgtagtgtagtgagagtgtggaagaagaaaatggtgtattgagattaagatagtgagtgtgtaattttgagttataagtgaaatatatctctctttgtggatttggtaacgagtaatttttttgtttgctttgtttccttattatttcgatgcacttgaggtttattattttctcccttggtaattgcatggattacattaagacaatcactctccatgcaatcaatcttccacccattattgtaacaccatttgagagtgttgggccccgctcttccaccttgtcgggccgctacctcacctttgactcccacattagtatgatactgtccgctttgggcctaagccctc

SEQ ID NO: 119966 - DNA, 2362 bp, Cannabis sativa
atttcttatattgataattgatcagattgtaaagagttttatttagggcataaaacccaacattaaactcatcctatgtacagcatcccatacttaggaggagtttaactactgaaaaaataccacaactgggtagcgtctcactcccagaggattttcttcaatcaattagaaaatctccactagatgcagcgccctgcttttagagagctttatgtaactgatgatacttttcatttattttttatttttgtgaaccaaggaggaacacttgcactagaactttaaatttataaactcgatcgttacattcttgaatgtcactacaaccctaagcctcctatatactagggtaacacctgactctcgtataccaaagtgtatgtgttatctgcatttttgtaagcatgacacgtggattttaatcaaagatggccacggagtcatcagttgcccacctctctcaattaatgctccgggaagacaaaggcacccacttcacgggaagggcatccatgaacaaaagtctcacccctttctagaatccaaattcatctactcctacaaggagcatggattatccaaaaggaacaaaggcattagagacacaacaaatcgggctatgcctttagcccggtgaagccttactcatacgtgtcagactacggacctagggacaaggctctcctcaggtacagcatcaggggttgtctcccacgacatgctatcgtatagagcatgcctgtccttgtgtaccagaccaaacaatccaacggctacggataaagaaattcaaaagggagaagccttgaggcgacacgcgttcgaggcccagctcatacaatctgacacccttaaatgccatatgggaaatacgccacctaccaatccaactgtgggaattcgctccaatgatgatccatccaaggcagctcatgcaaacaagttggcctataaataccccataaaaagcacaaggtagggaggaccttctccttcggattgaagactcattcctcatcatcctaagcaaacacattttgtaaccataataataattccagaatattcctactaagcctcctcctcttcaagagaaacacggtggaaaggagtaaaagtccattgtatttgcatttgcataaatagttatcggccaatgagcctaataaaatagactcgtggactaaggatagttaatgcctgaaccacataaaaatttcttgtttgttatttcactacttactccattattactttcttaagctctaaaaatatttagttgccgaaaaacttggtaaacattttggtgctttcattgagagctttgaaaagaaacatgcgcggcggtcggcagtgcaagcctgtaaaaagaaaggaagctcgcgcgaagaaagaagaaggaaggccaccagaccgcttattaggttctggccaaaggtcaggagggtcttggcgagaagtattgttcaaaccgagggtcaacacccttagtcgcctgaagaaactacagaagatgaacaacacgacctagaaatactcaccacgttcgcgctcgcccctaaaaacccagatctggccagccaactccatggcaaggtaaccgaccactggtatcctcacgctcgtgctcttcaccgtccactaaagcataactacgcagacacggtgaggcgcaagaggtgttagggccaggtgaagaggataatacctgatgcggttgccacgactaacttaggaaggatcgtcaggtatgacgacccaatctagcaagagacttcagtgctggtgctggagcgagcaccggatctattttttgacaactacttccactgcctttgcgttgggctacgtagttgatcggaaattgatcatgtaatggcgacaactgagaggagaccatcagtatcgtcgccgtctgatggtctcaagtcaggcctggttatggtattgttggttgaggcatgccattttaggcacaactccctcagaaggtttctgacgcctgatgtgactgcaaccccagagttacatcagagaaagcaattcaagacattataaagaatttaggaagttcttgccagaccactgcttatcctgctaggattctgagtcttagctttggaagccattggatgccctgcacttcattggaagaaacagactgcccaggagatcctggggcacatgcatgcaaccctcaaagcttctagaagctcgggagatgcatgcgcattgcttttcacgcatgaaagatcattgggtgtgcagcatgtcttcaaccctccttccaaaataaaaggactgcttgaagtctgctttactcccaatgactctttcaccctttgatcttttcaagcaa

SEQ ID NO: 119967 - DNA, 1070 bp, Cannabis sativa
  modified_base (90)..(94): a, c, t, g, unknown or other
ttcgagaagtctctcacggacatttcagctttcattgggaatctgaatacacgtgtccttttaaagaggagtctggtctcgagtttctannnnngagaaatctcactataacacaaattttgcagaatacaaaaagtgatgttatgggtaggatcgcagccattttctttcaaaggaatagaaaaatggatgaagcgtgaattgccaatttgtaattgttttgtcactttttctgttcagtttggtgctggtttttgtattgttgtaatggttttttagttttaacgataactttattgattcataaaaaaaatccatgcagaaagatattttgcggtataaatactaaggtattgagtgcgaacattttagaaatttttaaaataaaattatggcttaattaatttagtttgataaatattttatctatgtcataatttatataaatatttcacagggaactaattttataaactaaaaagtgaagagaaaaaattacaacttgatatcaaattggaaaaaaaaaataaccacaaagcggaaattgggaagtcatttaaatagattggtaaatgatttaaataaattatgtgacacattttttcggtgacttgttcaaattaataaaattttaatgaaatttttaaataagattgtagtttgaaggaaaaatattatactaaagtataattaccaaaaggataaattgcagcataaatacctaatattttagattttatacatttaaataccttatttttatttttagaggcaaaaatactcaatgttgttattctctttgttactcataaatatgaacacgtaggtggcccagatgcattatacaattattttattttaaaactcaataatcttaatattagaaactaaaaactacttgcttaaaaaaaataagagacatgcaataccaaattaccatagctagtgaaccagtattgttgaccgaggttttcagcaaccagtataataataataattaagaaagctataaggaattaacgagagagatttttaagtggttggggatttaatgagccttagtccacgag

SEQ ID NO: 119968 - DNA, 1316 bp, Cannabis sativa
gacaagtgtgaaacaagctttcaaagctgaagcagcaattgatcatagtaccaatgttagctttactattagagcaagaaaagtttgttatttattgtgatgaattcagataggatctggcatgtgttctaatgcaagccgatgaaatcataccctatgcttctcgccagttaaaagattacgagcagcgttatctgacccatgatttggaactagttgtagttgtgtttgccctaaagatatggtgacattatttgtacggagaagtgtgaaatttatacaaaccataaaagtctcaagtacttctttactcaaaaagacttaaatatgaggcagagatggtggttggaattagtcaaggattatgactgtgagattttatatcatctcatgaaagcgaacatagtgacagacaatttgagcagaaaaggtcttgagcaggtttttagtaccataatgatatgacctcagttggctttagacatggttaaagctataattgaatttttagttggaaaactatataacctggcactttaatcatatttattagaaaggatcagaaaggtgcagttggaagattttgagctggttaagattcaagagaaggtattggcgagtcggcttaaggacttctcaatctcaaaaaatagaatgttactttacaagaatcgagtttgtgtttcgagcagtgatgagcttagaaaggaaatacttgaggaggctcttactacaccttattcattgcatccgagaaccaccaaaatgaaccaagacttgaaaccctattaatggtggtgcaaaatgaagaaagacgtagtcgaatatgtgtcaaggtgcttcacttgtcaatagatcaaaacagaacattaaaaactggtagggttattacaaccattaacactgcctgagtagaagtgggaagatgttacgatggatgttgtggttggtttacctagaaacacatgaatgttcagtatgggtcatagttgactgtttcacaaagtcagcacactttttgccggtgagaacaacttatattgtggatcagtattcagagctatatgtaaaagaaatagtgtgtcttcatggggctccaaaattcatcgttttcagacagagatttaaatacacattttgggtgagtctttagaaagctatgggtatggagttgaagtttagcaccggtttccaccctcaatctgatggacagtttaagaggacaatacagatattagaagatttactgggaacctatgttatggactttgagggttcatggagcaaatacttgcctttaatagagttttcataca

SEQ ID NO: 119969 - DNA, 1071 bp, Cannabis sativa
gggtttctaaagtggttgcagcgtcagttgcaataggggtttctgtacgatttttcagttgcaatttaggttggagcgctagttgcaataggggtttccatataaaattccgtaaaaaaacaaaaaaaaaaaaaaaaaaaattaaaatataaaaatgaaatgctcctattttttacttattttaatttaataaaaataataaaaaattgataaccaattataaactaccatctcataaatgcaaaggaaaggaaaatggaattaggaaattaatgtccacttcttaaaaaagtatatgatttggccctcacctcacttatttcgtctcaactattcatggatgctttgtccatagaaaacgtagattgcatattccccactctatcattaagttgcaattcactcaaaaacaaagtacggatcttccttccaaccattaatggaaagagagagacagagagaaagtttgacagtttcaatatacattacattcttctactatatatatttaaataattattaagcattaccaacataatcaaacagacatgattcaaggtttgacaattttaattatgacatttatatttactttatttctaagaaactctcattgggaaatggttatcttttctctctctctctctcttttgcattaacaaatatcatatattcatatagctaattatacaaatagtattgttattatattcatgaatttttaaggtgtagaacgttgctcatgtgatttgatttcttatatatattataaattgaaatgtgatattccatattatatttagcaattcttgattgtaaaatgtactagtagtatatgtctcaaatgaaagctaggtatcaggtgggtaattaaagacacattttcaaacatatcaccttcattctttaattattatctctatataaatattaaaccaccataagacaactcaaactgttaaaactccaaaaagaaaaaaaaatctcttaatcatatctactctatatatatctctcgatctattaaaaacctttttctcccttaggttgttgttctctctctctctctct

SEQ ID NO: 119970 - DNA, 7178 bp, Cannabis sativa
agtctcagaatcatcccacttcactcaccatttaataaattcttgggaacagctatccaaggattttaagaaacaatttcaagctgtcagatataggcgacctgaagtatcatccctaactaacataaaaggcttacctgagtcgcttcagcactgcagctacaaaagttaaaaatttgaacgatagtattcaacttattgctcttcaagtaaggatcataaccgacctttcaatagctgggggtgagttgtgggatgacttacagggtcgccaagtaagaaacattaatgaatttaaagaaagagcgcaagtgtttgtgtgcaaagaagaagcaaggaatgagatgaagttactgaagactggcttgggaaataaacctagcacaagtactaccacaacaagtaccatctcgaaaaaaattgataacccaagtggttcaaacaccaaaagaaaagatgactcgagagaataatctaaaaataagaagaaacagaaaaagtacgacaagtatgttctaatttaccatgtgtacactgagttgaatgatactcatgaacacatctttctctcaaataaccacagggttgcattccgcaagcctgaaccaatgagacatgccagatacaaacgagattcaataaaattttgacgatttcataaagacatagggcatacaatcgaagagtgatgacaactgaaggacgagatagagagcctgatctcgcgtggatatttcagacaatatgtgaagcgtcaagggaacgagccaaaccagcctaatcaggccaacaacccaaaaacaaaagattgcaacctccctctgttgagggcgaagatatattggttatctcaggagagtcgcatcttgctggagagagtaataatgcccagaaaagatatgtcaatgaaataaaaaacgagcaattggtgtttgatccaaaaccactaaaaaaagctaaaatagaagaacctctaatcatattcttcgacgaagatacaaagcacgtgaggtatccacatgtaaatcctctcatcattacagttcagctcgccaataagagagtaaaagggtgttggtggataatggaagctctagtaaatatcctttataaggatacgttgaagaaaatgggattacaagatgcaaagttaaaagctttcacggtgaacttttgcagattcaccggagatagtgtcgccagccaaggcatcattagactcacattgactatagaagagccaccattatctacaacactgatgatggaattcttagttcttgatctaacatcaatttataacatattgatgggtcaccctatgttgattggcttaggggcagtcagttcaatcaaacacatatcataaaaattccaaacacctgcaggaataggtgtagtacgaggggaccagttgttgctcgcgaatgttatcgcataaaactccaaaatagaagagccaaccatcaattaatagtggtcataacagaagaaagagaaaagaaagaagatctagaccctagaatccaagacgagaaaaaccagttaaaatcaattgaagagctggaagaggttcttttagatccagacaatcccactaaatgtgtgttaactgggaaaaatctggatgaaaaactaaaatagcagttaattaaatttctgaaggcaaactaggatcaattgtcctggagctattcagacatgatagcgattgaccctaaagtgatttgccacatttgaatatcgaccccaactacctagcaaaaagacaaaagtggtgacccttagattctgaaagacaagaggcacttaaagaagaggtgaacaatttattaaccaatgatttcatacgtgaagccttccacccctcttcgatttcaaatcctattcttgtctcgaaaccaaacagcacttggagaacttgtattgattttttggatttgaataaagcatgtccaaaatattgtttccgactaccaaggatcgaccagttagtggatgcagctgcaggacacgggctgatgacatttatggacgcatattctagatataaccatatcaatatgcacatccctgatcaagaacactaaagttttgtaaccaatatgggactttattgctctaaagtcatgtcttttggtctaaaaatgttgggacaacgtatcaacgactagtgaacgggatgtttgaaaaaaaaattggacaaaatatggaagtctatgtcgatgatatgctggtaaagttgataaaaagggaagatcacacgagggacctcgaagaatgctttgggatacttagaaataacaatatgaagcttaacccaaagaaatgctcttttggggtctccttaagaaaatttcttggtttcatagtaaatgcaagaggaattgaagccaacccaaaaaaaaaaaatcaaggccctgattgagatgccttcaccaagaagccgaaagaggtccaggccttaacaggaagaatggcagcattgaacagattcctttcaaagtcaatagattaatgtctaccattctttaatgttttacgaggcaacaagaagtttgaatggacagaagaatgtgaggaagcttttaaaggcagaaagaaacatttatcaacacactcagctttggcaaaaccaataactggagaaactttatacccttatttaactgtctcgaagatgcaatcaagccttggtgggagaagaaagaaagcgccagtaacatgtttactatgttagtaaaaagttactaggggcagagtcaagatatccccctcttgaaaaacttgcctcatgcctgattcattcatctcgcaaactacggccttatgtccaagcacatcccttaaaagtcttaactgatcaaccactaagacaagttttatcaaaaacctaatgctttaggaagattgataaaatggtcaatcgaattgggacaatttgacgtaacctaccacccaggaacagtaatcaaaagccaagctttggtcgattttctaattgaagggataatcacagaagaagaccactcgtcaagcacgatacaaaaacttagaaattatatgtggatggagcattgaatgagaatggctcaggggcaggagtaataatgatgtcgcccgataactttaaattcaactatgtgttaagattccaatttgatacttcaaacaacaaagcagaatatgaagctttgttggctggcttgaggatagttgaagcattaaaagttaagaatcttatatgttatagcgactcgcaattgattgtgaatcaagttttaggtgagtgttaggcgaaggattaaagatggctaaatacttagagaaggttcagaagaacttggagaagtttgattattttaagattgaacaacttccaagagaacataactcaaatgtcgatgcactggcaaaattggtctcacaaaatgaaattgataagttaaatctagtatcgatcgaagttttgaacgacccaagtatatgtgaaaaggaagaagttgagatgatatatgtctcgccaacatggataacacccatattcaaatatttactcaacggagaacttcctacagattaaaccaaagcatgcaaactcttgtgttcaatacctcgctatactgtagtcaagggatcgagggaaaattgtataggggaggttactctatgcctctcttacgatgtgtgttaccaacagaagccaatgaaataatcaaagaaattcatgagggcttttgtggagatcacgcaggttggcatagtttctcaaagaagattatccgtcaaggatactattagccaacaatcaaaaaagatacgcatgaatttgtcaagagatgcgacaagtgctagcaattttcacatatacctcgtgtaccaccaacagaattgaggatgatgacctcgccatacccattcgcaatatgagaaattgatctaattggggcattacccaaagggcgaggaggcgtaaagtatgcggtagaagtagtcgacttcttcacaaaatggacagaggctaaacctctagtttccataacttgtaaaaaagttctcaattttgttgtcaagaacataatttgtagatttggaatacccattaaaatagtatctaaaaatggaacttagtttgatggtgagttattcactgagttttgtgaaaggaataaaattattaagagcttctcgtcgatttcaagaccccaaacaaacggacaagtagaagctattaacaaaaccttaaaagataatattaagaagaagttggatgctggaaaaggaagattggtagatgatttaccacaggtactttgggctcccaaaacaacagagaaaacagcgacgggacatactccattctcgttagcatttggcttggaggcaatgctaccagtagaagttaatattgtgacccatagacgtgaattctataataaagtagaaaaccaagagctcctgaacctgtctttggacttacttgaagaaagacgtaatgagacgcaaataactaatgcagcctatcaacatcgaatcacgagatactttaacaaaagagttaagaaaagactttttaatgttggagatttggtgttaaaacgagtatttgcaaacacacgagatccggctgctggagtatttaacctaaactaagaaggacctcatgttattgaagcggtagtgggaaccggggtttataaattagctcagtttaactgttcgctaataaagaactactggaatagtgaacatttgcgaccttattaccaataaagttaaaatataaatgatgtatttatctctgtaatatgtaaattttaattattaataaatttaaagtttgttcaagtaattacaatatttatcttctttaaaattacttgaacagcatatatatgtgtatattaaaaggaattcatctagaaatacatattatattgcaaacccacattaaattttttccacaaaggaaaggataattgattaaaattatttatggacaatataaagtcatggaattgaaatacctttcctctagaaaggaaaaaagtcaaaaagtagcagttgtaaatgagatcaactcctaaaaaaacataaagctacatgcgaagttgaatacttaacggctcgcattattctggcatgtattataaacgaggtacaagaatggctagaaaaataatacttaagtcaaaatataatagaagacctaactattcatatgagcaatcaaaaactatgcaaaatagttcctggagtgaattattcaaaatatttttaagtttgctctaaaaatatatataacgatgttatatacggcagattaaaactgctcatacaatatttggtagattataaactactcgcgtataacaaggcagattaaaattgctcatataaaataaagtagataagaactgctcgcgaattgaaactatacgcatattataattgctcgcgcacatatgtagtagactaataactacttaaatgcatcaaagaaaaagggagaacaatggaaatacttcctagagtatcagtaacttggatcaaatataaatatttaaattgtgaaataaaacaccatgaacagatatattcaatcgaaatataaggtacgagacattgaaagtaaagataaatgcataaaaagtaaagttggccatctaataatgtaaaattatctttacaaaaataataccactaggggcaaccattgtctcgtccggagggccatttttctaaataaaaaaaacaagtaaaaaccaagcatacatggtgggagacttggatggatcctcttcttcttcctcggagtccactgcctcttctctcttggttcgctcgcagtaagccagaacctctttagcaccttcacccagaaagcttaaatccatgttggggttggccagccaggctctgtggatggattgctttgcaacattgttgcaccattccttagcatcagcctcggctcccttgagcttcacatttgcctcatcgagttcttcctggagttttagacaggcctcacatttgtctttggcttctttctgagcaacctcaagctccgtcttgtggctcctctttaactcctcagcatccttagtcaatcgcgtgatttctttttaggcatcattccattgctttgcaatgactttgcatttttcaatggatttacggagtttagcttctagttgttggactttctaaagaccccgatgttgtgtaacatgagacagaaaggatgcctacaaaaaaaaatataaaataatttcttttataaatataaatttgaaagaaatataaggaagatcaaagagaataagaagggaactaaccgagaggctaaagttgagactcctctcaaataactcttcatagctaccattgttaaccaaatgctagttgttagactgaaaggacgtgaaatggtgccatctaaaggtggcatattgcgagcagtactccaagccagtgctccctgctttgttgggcaaggggcaagaaggttcaagcagaaccatctcaagtcctttacccgaggacttggcttggtgagtcgaagcctgagctttctcatcaacgtgtacaatggccggagtgtgagcttgaacttcatcttctgctgactcgagatttataggctgtgaggcacgttacttgttggcagtggtcttccttgatctcttcagaggttccagattcgtccccgatgaagtttccaaggcaacaatcctcttctttccttttttgccagaggtgttcagaaggtttcctagatccatatgtacgaggcaaataaatgcgtgaacacttgttcaaaaatagttaaaagaaaaatggggaataaactcccagttaaagaaaagttatcataatcatcaaatgatgaagagggaggactatagtaattactaaactccctagaccctgtgatcatgaaatgataaaagggtttattggagaaaataaaatcccaatttgaatctggatggctcgacatatccaagttggtactgctcggtaatctcgtaatatgaactagtgcaactaagctggacatggaattgagggtaccagctatcaaacctatgggctatgcgatctatacagaagttgtcccatgtataaaaattttattggctatccctaaaggttactagcgatgtacctca

SEQ ID NO: 119971 - DNA, 1698 bp, Cannabis sativa
  modified_base (358)..(359): a, c, t, g, unknown or other
tctggaaagatatcaggagaatatccaccaacaacatgcatgaaggagttcctcgatagagcagatgactttatcaaacttgaagaagccatacgacaggcctaggtggggaatgtcaataggaggcagtcacgaggcacccagcagcctcatgacccaccaggcgcacaggcaggcaataataataccgcttagacctctagtggtaaaaatactagaaacaagcgcaacaccaacatctttgggaggaataatggcaaaaaggggaagtttaacacttctcccatgccacagaagaataaggaataatggatagatttctgtttgtaaggagagattttttttgagttttatcacnnaggctcttaatgaaagcaccaaattgttagcgcaatttttgttaaacaaaattttcttttcagtaataaatactttacaaaaattaataataaataattaaatcacaccagatatttttacctggttttatagttaaaatctacatactccacgagtccttcttattagggatttttatgagtacaaaatacaatatttgaataataataatttctctctcaaatcttttttttctttttctacggaatctgcccctatttataggagtataggttggcagttattctttttgggattacttcaaatataaccgtttatgaaacgtgggcaatcccctcgtttcctttgatcacatgtgggatactatttaataactacccaactgctctttaatttttatcctttagacagttattgctcagttggaaggtgatatcttacttgacatgatttatcctccttgtccatcttaataagaaaaaaatactaagtattggcaagtcattcacctcgtcacatcccttcatttgagtcagtattgcgaggtgattgtctcgctatatgtaacccgaagttgttgtatgtgattatatttattctacttgagtgaatgaatatcctttttttgtctatgtattccgagacagatgtatgtctcgtcaatatcagtccaatagtttttatccttgtctcacttaagactatatagtcaacgagctttgaattttatcttttaaacttttatgtaaaaataacgtgttattttaatttgcatttaatgacataatattattatatcattaaagttgactcatattctttttgttggatacgttttagcttctgaagtgtagccaaattttgagtacaccagaaccaactaagtattattgaagtttcttttttcctcaaaattaacttttttcttctcaaaagggcttgaagagcaccaaaataaacaaaaattgaatttcacttgaaaaaacacaaaaacaaataccaagcataatctaaacaataaagtggtaaaatatacatatacatatataaaacacattaaaatagactctaaaaatgcataaaactaaacctaataaatttttccaaacttaattaacatttactcgccctcaagtaaagactatgttaaactaaccgaaaagaaaaaatataaacaaatacaaaagtaagccaccatttccataaatactacattatttttctcatgaaatctcaattacaattgttgacctcgtttttagccaacgacaacaagtctattttataagcgataagtgatctatagcaacaaatatatgataaagcaatataaagaca

SEQ ID NO: 119972 - DNA, 1415 bp, Cannabis sativa
attttgacagcaaaacctactgaaaccccattatgttttgctctttatactctcgtccaaaaacttcagttaagtatcacagtagactgcgcacgtgtacacttgtgtacacttgtatacacgtgacaaattatcattggtccacgtaatattaagtattgatataatataaaatataattaaaaattgaaaaaaaaatatttacaatgaaatattttttttttacttttatttcatctttttctttttctctttcttctcctctatccttttctagaagcttcttctctccgagtgaaactagggtcaagattgttagaggcccagaatgcaaccccgactctaatctgctgcctccagccaccaatggcctaggaggacctcttccctactcactttgttgcacacaggtcactgcccactcgagagcctttcctcttctttgtcttcggtggttcaaggagcttcactatacaccgatttccaaaatctctcacacacgtatgcctcctcctctctcagatttaatattcttctccctctatctttctcaaaatcattagctgattgtcggcgaccttaagcagaaccccaaaaataaggaagacaacatcgttgttgtgaatgaaaagatgaagaggatgatggtgttggatctgttatctaccaacgatctatgtagatctagaattgtttctcatttattttgttggatcttatgtcattattttttgggtttctttaattttggctttaggtgtcaatttcttgatcttaaaaatgtaacaataatggtggtggtggcagtgatatggcaataatagttgtgatagtggaagtggtgttgttgcggtggttgtttttagtggtattgtagtatagttgtggtggtggtagtgatcgttatttttttattttttctctacggatttggtggtgggcagtggcaatggtgatagaggtggtaatggagttaggattctaggataagaaagaggaagaagaaaagaaaaaataataaaaggaaaataaatgatatatattttttttttattttagagtttaatttcaaaaaaaaaaaatcaattctttttataatattttaatacttaatatttcgtcaatgaaaatttattgtgtacacgtagatagtccaatgtgccatttaactgaattttttagacggaagtataaaaaacaaaatataatggtagttcaataagttttgccattaaaattttaatttttaaagttaaatattaaaaataataaagtttaaataattttaccccaacaaaaaaaaaataatttaacatgtatacttgtaattatactagcaaaaagtacgtgcgaggcacgtatactaaattttatgttagtttttttttctatattatttaaaagtgatacaatta

SEQ ID NO: 119973 - DNA, 1145 bp, Cannabis sativa
taacactacgtggcttggcacgtaacaatcacctagtatatatttatgctcatctaactgaaataatttcaagaacttatattttatctatatatttatatattatatatgtatgtacatattcttattctcatatatttattattgaattcatatatacattatattcttattatttaccatatttacaatatattttatataatttgtacctgtgatatgatagataatatataaacattatgcctatatcctaaaattatataaacacgtcatataataagctgaaatataatacaagagatgaataaatgttcatatacatattcttatgttatttaataacaatcaaaaagcaatctaatgtcattacagatttgtgcaaataactcttgaatgttttatatttatcaataatattatatttatatgaatacaactaaagaatcattgaaatgattattattgatgtaatttttagtggggttttgaatacccaaattaattttaaaaatattgtattgaaacatcaaagtataagaataacattgagcatgactaatattatttaaacacatgagacatgtattttttttgtttatcatttcctgcagaaaatgataggaactgaattcatttaattttaaagaatgttcatattctatatattagtcttgtattatatatatttattacttacaatgtctatattagaagttataaaattttgtatgacacgttgaatatattatttaagaccatattttgcatacttctcgaagattatgcaaaaattatattcatatattcttttaaatattgtaaaaaaaattgctgaataattttttatatttttatggatgaacaattaacaagtttttaagaaatttataataatgctctacttgttcaacgtcattctccgaagtgaataacacctttaaataatcaaggtcattatttactgctcaaatatttctagaaaaaattagaaacaacaagaagatgaaaataccacaaataattaaagtgcatggatacagggacggagggactttagcctatgtgtaggctaaagccctcactcaaatatatacattaaacttttcacatattgatatatacatatattaattcactttact

SEQ ID NO: 119974 - DNA, 975 bp, Cannabis sativa
ttttctcactctcattcatctttgcactatcctttttctcactcaatttctttttataacttaaattttgcaacctcacttggtcttcatagacttgctttggcatcaatggagctagagtgattgttcactgatggaacgtgaatgagtacttgttggtgaagccatcatgctggactcgccaatcaaactgccaaggccttcctagaaggaggtgcccagcttccattggaaccacattgcataatacttcatcctcatatgtgccaatttggaaagataccaaaacttgttttgtaaccctcacttcaccactatcattcaaccactacaacttgtatggatgtggatgtttaagtgttggaagccccagcttctcaactatggaagaaccagcaatgttagtaaaactacccccatcaataatcacactacataccttgtctttcacatgaaaatgagtattaaaaatattctcacgctgcacctcctcttcctcttctttttcttgcaagtttaaggctcgtctggtgactagtgcaagcatgtcaccgtattctttctcatactcttccaatggtggcatgtcagcaaggtcatcttcatattctatggaagtatcttccaattgtggcatgtcagcaagatcatcttcatcttcagactctacctcaccactttctcaaatcaccataactctcttgtttggacattggctagctatgtgtcctcataccagcatttgaacacttatctcactagaataggatgaagtaggggttgtttttccttaaggggttgtggctgtggtggctggtttacgtgtataggatgaagcaggttggtcttctttctttggatagtttgacctccaacatgttgtacatggattgtgtggactcgatcttggctttgaactcaaactacccttcttgagtttcctttcaactttgattgccatatgcaccaaatctt

SEQ ID NO: 119975 - DNA, 1443 bp, Cannabis sativa
aatgtacactggtaaaactttgacctctttgtcagcgcagtttgtgaaatgcgctggcaaaagtaagcagtagcgaactgtgctagtaaaagtgacgtttcttgtaatggtaacaatgatgcttaacatttacttttagtcatgagatcattgttaaacggttgtgattaatttagaaattaactaaaaataataaataaattacctgtaacttgatattaatcttattttattttattttcttatatataaaaaaattttaaaaattataaatattaattgctaaaaaattcttaacgaatattataatctaaaattaaatttattttaagtatttagttcattataggaattttctactataggggtgtagaaaaagaccccatcagtagggacacttttattccaatcaactactaccatgtcatgtaatattatgaggatagttgtagaatataatattttatttatttatctatttaatggcttacacggtgatgtgtcagaaaaaaatactatttgaattaaaaagaaatatatccttctctcattaagtctcatactatatggttcttagatttctttcaaaattttgcatacatatccatgtgttcttacttctttgtattcttaattaaagcccttcccacaatgaacctttaagactagaatcacaaaaatataacatccatttaatctgatgtgaatctctaaactatagcaaaagaaaaagagagaaaaaaaaattgagattttgattagaggttgggttcattgaaggaggtggtggttgggttcaaagacggaggtgtggtgattagatttgtggatggtttataaaagggagtggtcgcataaaattttatatagaaaaaggaagaactgagagagaaactaacaaaagaaaaaaaaaatcaaaaatactataaaggtaaagatacttaataatccggtatttctcacttaaataaaatacaacttcattaaatgaagtgtaatttctaataggttttgagacacccccactcatgaaaatcgttttaggaggtcctatagaagaatctttcgttatttataattaattaaatttaaaaataaaatatttacttattagtatttaacttaaatcatagttatatttttaatataacctcatttatatattcttttaaataatatataatttatatatagaacactttactaaaaaaaaattagggaaaattacatctacacactaaattatgatctaatttatagaaatgtcgttagtcaaaaaaatataacgtaatttcaaaaatatataactatatattacgtagtaaattaaagtattgagtttcaagttataacacacacgtgagtatattccttctctctcttaattgatctcagcttaaaggctttttgttggtcttgagttctttttgtgtaaagtgtatc

SEQ ID NO: 119976 - DNA, 2676 bp, Cannabis sativa
taaattaaatattttatttgattttccttcaaaaaaatattttatttgatttgatttataaaatataattaattatttactaattaattaaaatattataattatggtcagagaagattagggtaggagtaaggagaagagaaactttagcatatgcaaaagtgtaatgaatatagtcaatgcaatgtttcatattatccagtttattattgtgtaccttatcattttagatccgctagatagtgtcaataacaatcgatgcataaagaaaatttttatctacattactgccctgggattttatactacagaggaatttcacctagtcccacatgtgaatgtcagtgccatagacaggtgataaactccatggagacgctccgccacaaatgaaaagccaaattacaagagaggaagaggtgctccatagattccttctcagacccacaaatatgacacattgcatcatcagtatggaattaagcacaacccgaatagggagggcgttggaaaggatgcaccaccaaagaatcttatgacgctcttagattttgctattccaaagcttggtccaaagggaaggggcaacctcacagtgaggagttctttgcaaagcttaaataaggtaagttgatttgcacgagaaatgcccattgctttcttttatccagatccacttatctctaccctgtccagaaagtcttccccctttcaagatggtagtaatagtttatttgtcaaatagaaaattcaacttatgagcatcctaatcagcactcacagttagaagatttgccactttacttaacccaaactcaagtgacccattaagtttcaaggaaaaatctctaccatgagacacccagggatcatccaaaaactagtatccttcccatctgccaccattttgcaaaaccaagaatcaaagtctttgtacttgtaattagggaaatccttccccttcagatacttagcttgcaaaatttgacaacataacgactggtttccaattaataagttccacccccacttagcccggaaggcctgattcatctctctagttttctaaaaactaagacccccacaggatttggggaggcacatcatatcccaagccttgaggtgaagtccatggttttttttttcaaacccccatcagaagtcatgggacatgccatcaatcttagccccaagacgattcgatagtttagtagtttgcatagcatacataggcatagaaaaggcccacatatctaattagggtagcacgcccaaccttcgaaagtaatttagctttccaaccttggagcttagaggtgagatgatccaaaatgaagttaaaatctacatcattttgcctagatctgaataaggggagacctaagtatttaatattgccttttgggttaccaatccctaaagcatctttgatccctcttttcatcccatcagaagtattattactgaaaaagattgatgttttgagtttattaacctgttgtccaaaccaagaacaaaaattctcaatgcattgcgaatatccttttgcctcctccaaagaagctcttccaacaagaattaaatcatttactaagaagatatgcgagagaatcgaaccccctagacatagtttaatgccttgaatttcacccttccccggggcttcctctaaaatccttgacaaaattttcgtagcccaaataaataggtaaggggaaaatggaggtatattggtagatgagttgattaattcatgcaattagtttagaaaatcatcatttgatttgatccaattagacttcaaaatctaatccaattcaattcaaatactaatcaaattggatgggttttttcaattggatatacacacctgatttttaatattaacttaaaatatgaagaaaaatacgtaaaaattaaatatcactctttatttaagtttaatactctataaaaatatcattgatacaagtgtagtgcaactaaaagtttaaaataactaaaacaacaacattactaaattataaaatataacaaaacatcatgaaaataaatatacaaaacaaccaaatatcacaaattcaacacaaaaaaatccagtttaaatataattaaaatatgtatattttattatacataaataagtatagatatgtttttaatatatataaatgtaattagattagatcggtttttaattaaattttgagaatgacatccaataatcgatccaatccaattagaatctaacttttaacattcgatccaatccaattataattggacatttaactttttataattgaattggattggattgatacagttcaattggattggacatacaaggcaactatagtatgtgtataaccaaattcaaattttcaccatacaagacctattttaattaggaatgtcaaacacatacataaattacacattttttagggtaatttgcggctaaactccctaaactttgaagtttggcacggtcaaattcttagactggaaaaattatggctgaactctcaactccacaatcgttatgctctgtactctttccgtccactttggtctgttaagtgccaaagtggactcccacggtatacacaagtgtacacgtagtaaattttcattggtccacgtaatattaatactataaatattaaaaaaatt

SEQ ID NO: 119977 - DNA, 1548 bp, Cannabis sativa
  modified_base (744)..(749): a, c, t, g, unknown or other
  modified_base (1485)..(1486): a, c, t, g, unknown or other
acactaaattagtgtagattcaaaacccaacaccattaatagtatatagaatttgatacataattaatttggtgtaaatagaattgagtttaaagcttaacattgatgctactgtggattcagctacaaaaatgctaggtgtgggtgccattgttcgtgacagtcaaggtcgcgtgatagctgctctctcaaagccagttcaaggttgttttcgttcatgaaatggaagctaagaccctttttcatagccttaattgggtgatgcaagaatagctacatattactcatattgaaaccatgcccttagagtctctaatgctttaaattctagttgacaaatttatcgtgtttctcaaatttaaatatggatatgttcgttgtcttttatcttttttcactgaagctattatttctcatgttacgagaaatgctaaccaagttgctcatagtttaacaaaacatgctttagagttggatcaagactcgtgttggataggagaaactccttatcctatttgtactattgttgtaactaactcttgattttataataatagcgtttcttcaaaaaaaaaaaaaataacctacaaaattttgaggaattcggaataatttacaatatagaaaataatatttaactagtctagtttacacgagtataaaataaaaaatagtcacgcgtccaacacactatttgaacgtaatttttggcgtgttaaacttttctgaatttcttaaaatttnnnnnnatgtcttaaataactataatttacttgtccacgagaaaaaatttgactaaaaaattattttggatactaaaatagatagagatgtatcgatgtatccctttaagaaggtgcattacaaattttttcaaaaataattgagaacaacaaaaagttatttcatagagtttgcatcattttttttttcaattcaaattactttatcttgttatttatcataaacttttaaaatatttatctttctacaaatatgtttttttaatttttttattgtatccaaccaaatattttttaatttttgaattacaaaaaatattttatgctctcatttttaattaaaatataatttaaaaaaataaacacacacaaaataatgttaaacatgccctaaatttaagggcaatttttacttatatacaagtaaatctgctatattacaaaaatgtgtaaaaatataattacataattctatacaattttataaatatttacaaataaacatatatgtttacgattttagcatgttgtttagttttaatcatttttcttaaaaaaataaaatatataataaacgcataaagctaaatatataaatacataagttaatatttatatttttatatatcactaatataatatatttactaaaaatttaatatgaaactagaaaaaaaatacaaatatatttacaaattttatttatgtttttacaaataatgtatatctttatatattaaanntgtctatctaacggcaattcttggtttaacgattctttttttatttagccttacacgattaa

SEQ ID NO: 119978 - DNA, 820 bp, Cannabis sativa
tgagtttgattcaccacataggtcttttacactaatgcaatcaagaacttcatgttccttgcttactgaagctcatctacttagccaagaaaatgataattatttcaaattgacagcaatatatctcttgtaacatgaactaattattttagaatgactcgtaatttatgaccatcatgtagaaggatataaagtttgcacattaatcaatttgtaatgagtgatgtaacttatattcttacaagttaatgagtgtgccacacactctccatataggacattattagattgattgttgggtcattaatcctaacaagataaattcttgaacatgttctttctgttttttcatttccttcatttactgttttggttttacattttgatgctccaggtgaatccttttaaacatttgataactttctttctttgtaacaattcctttgtaaacccataaccacaccaatctattcttaaatcttaattatctattgcaatacctatgattagatcatcacaattataccatctacttcagaaatagtgatctaggaagaaaagtttagtaaatcagaaatacatatatatatatcataatataatttaataagtcggtactgctgcctaattacaatgctcaatgaaataagtctaaaaaatgttctaaaatatttttaaccaagggtaatgcaaatctcgctaatggaaatgccaaaagatactgtctagcaccctccaaggtgtaatatcacaattaagtatcagatccaatataatttaatataataacttttgtagagtattgctaactaatcgcaaa

SEQ ID NO: 119979 - DNA, 1736 bp, Cannabis sativa
  modified_base (27)..(32): a, c, t, g, unknown or other
  modified_base (1687)..(1696): a, c, t, g, unknown or other
aaaatagattacattgaaatggagttnnnnnnagggcataaaacctaacacaaagacgtcgcgaacttgacttgcgcgagagattaaatcgaaggcagcctgaccttcatgagcacctaaatcaaaatgcacctgatttgtgtaatcaacttaaccaaaatgtaaaccagcaaccagtggatcctattcaactacgaataattcaactagaggataaatttagaaaatatcaatatggagagcatggcaaatttttagggtacgattctgatgaagaaaccgagccattccatcaagacatcttaaattctgaatttcctcagggatttaagaacccacatgtctcgcgtacgatgggaccagagacccggttgctcatctaaataactttaatactatcatgctagccagtaatgcttccaataatttgtgttgtattttatttccaacctccttaacaggagatgcgagcagttggttcgataaattcactcatcattccataatctcttgggaacaattgtcgagggactttaaaaagcagtttcaagctccgagagaccgtcgactcgagtcgtcgtccttaaccaacataaaacaacaacctgaggaatctctgaaggcatatttaagttgcttcagcatggccgctgcaaaactcagaaaccttaatgatagtattcaactaagagcacttcaggcaggaatcacaactgacttgtctacaataggaggtgagttatgggatgatctcttgggtcctctgtgaggaacaataatgagttcaatgaaagagcacaagtctttgtgcataaagaggaagcaatgactgaaatgaagctgttaaaaactggatcgggaggtaaatccaacataagtacggtaacaccgagcacagtcaccacgaaagtagacaatcctggtggatcaaacacaaaaagaaaggatgactcaaaagaatcatccaagaacaaaagagacagaaaaaacatgacaagtatgtatcaatttattcggtatacactgagttgaatgaaactcatgagaatatcttccttgctaatgaaaatagggttgcattttgcaaacccgagccaatgaggcatacgagaaacaagcaagattcaacaaaacactgttgattccacaaggatatagggcataccactgaggaatgctgataattgaaagatgagatagaaagtttgatctcgcaaggatactttaggcagtatgtgagatattaaggaaatgcgcataaccagcctaaaaaccctaataacccgaacaatttgagattgcaacctcctccttttgaaggcgatgatatcttggtaatttctggagggcctcatctcgcgagaaacagtaacagtgcccaaaaaagatatataaatgaagtaaaaagtgaacaatcggcattcgctcctgaaccattaaagaaagagaagttgaatgaaccaccaattatcttctccgaagaagatacaaaacatgtgtgatatccacatgttgatcccctcgtgataacagtccagctcgccaataaaagggtgaaaagagtgttggtagataatggaagttcaggcaatattctctacaaagacacattgaaaaagatggggttagaggatccaaagttaagactgtgcatgatgagcctattgttgtgttttatgccctaaannnnnnnnnntttcaatgtaatctctatcttttaaatatcaataaagaaa

SEQ ID NO: 119980 - DNA, 2239 bp, Cannabis sativa
aattctctgcagtgcagagtacagcagcctcatgtgtactcctctgcttcattttctttaacaggacatggattctaagcatgttttcttattcattctggggtcttgaagaaaagtttcattttcagtacacctgacagtaagtgtaaatgagaaattattagtcaagtttatgttatatatatttgaagctaaacgtaagggttacttaccaccgcctcagtgtttgtactttagcaacatttggattgatcatgagagagctgtctatctttgttgataatgagatttctaaaatacaaaatatgaaatggtaaacatgataatacatgtaaatttggaagataacaataacgtttaaaacaaagtaatgggaaatcaaagaataaaatgagataatgatctaccattaaatgatgtgactttcagacgtctagcaacaatgataggcgtagtagctattaattttgtaattgtagcacattcattaacaacaaaatgtccccagcatgtcaggccaattggttttttcctgtataatagctttcaattattaacaaaaataaagaaatgtaatctaaatgtacatgaattttgttttgtaatcttactcttcattaacaactattagctcttgtaagtcttgcaaacaattactggtgtatatttgcttcttaggattcacaataattgcaactgccatcaagtctgtataaacaaagaaaccaagaaaaaagttattaatattttcacttgtatagcaatatgttaatataagcaaattgaaaagagcaatataattaccaactgaagttgattgatccatatgatctgagaagctaacaaaaggagtgaaattgtattctactaaagttaacattgagatatcttcctgtggcacattttcaactaaagtacatctactatttattacccattcatatggtatctctagtacttgatattgtggttttgtaaatttgacataggtgtttgatatttagtagcatccgtgaacagccaaggtattttggaacttctcgatgtcatcatcatatatagtggtctggatttgtgttttctatacaagagtgaaataaattttcagttagcaaaatgaagagaaaatgagcagacattttgcgtataatgaaagctaggaaataattaagttgaagaataaatagtgacatctaaagaataccgtaaatgaacgaaaattagtagtaaaaaatgttaaaaattaacttcaaaatagctatctattatcttcaaaaatactatttgagagaagaagaattgaacaagaaaaggagataatatgtttatcagctaacctgcgaatcagatagtagcaagttttgatttctttttgtagcatttcgagcagttttcggcattcctttctctagaacaatcactttcaccctccattttgtttctgatgggtgaatatctttaataaatttctcaattgttgccattaaaacctgaaatgaatagaaatgattaaggttcgcaaaagaagtgatcaaccaaatagagtcatattgttatattgtgaggtataatctattatcttgcagcaaaatcatgccaaaaaaataaaacagttgcaacattaaaaaacaatgaggacaacaagatatgcaatatttgttagaatggaggattactctcacaatagtgttattgatataaattcaacttggacatgtgtaaaataagtaacaaagagatgctccctaatgtccatgagagctaaaagtttgtacctcacactacaacactatcatatagtatctgtagtatacaaaatcatagtgacatattattattaatttacaaacacaagtctatttttggtttcatttagaaaaagaacaaatgggaactgaatctaacactgataaaaaaaaaggaatttataaaatttcaattgaaacagtaaatattattagctatagaattgtaccaattttatttcaatacccaatcatggaaaccaattaccaatcgaagttgagaaagaacaagataacaaagaagaattgcacgctgaaacagataaattataaggcaaatcagtataacattgaagaaagaaaagtgcattaagttggctagtgtgaaatgacatgaaaacattgttaaacatgagaaaattcggtctccgtgtatgtaaagctcaacaaaaagtttagaccatactttggtgtacctcaaaattgttatcaaa

SEQ ID NO: 119981 - DNA, 1646 bp, Cannabis sativa
tttaaaaaaaaaaattaaaaaaggaactaattattaattaagagagaaaagggaaaaaaaaaataaaagtaggcacacgcgcactagtgtagtttattttaatatttattaaatttagtaaataaattatagattagagtaatgtgtattccaaccttagaatatgtttttaagaaagaaaaaaaaaacagaatgttcgaattttgattgaagcgaacacaattacatattttaatttttaaaccactaaaacacaacttaaattcatataatagttatccaaaatctaatttttatatttgggtctctcaatcaaaacgtatttttttttttttcattttcattcataacaccattgttattgtttaactctattgttgttattttaaatgtggtacacagttattctatacgtgtatatacctacctactagttagggaattattcaaataattttttttaaaaaaatgaaaaaattaagtagtgaataaataagattaatgagagagattttaaagtgacatattaaggtttcttttttatatatatagaacactttttaatgggtattaccaataaattgaaatataaatattaatttaataatattaagctattaaattttaattacatagcgaataataaaagaaaattttgaatttctatgcttaaattagctatttaattaaaaaaaaaaatatatcaaaaaaatacctatttttacactatatcaaaaaataagttaacattccttaaaaaaaaaaaagttagcatgaaaaatatatttaagtcaaactcaatatttttttattatatttttatcatttgtttttattattttttagcgggatggaacaaccctaatctatataatgtaaatatgagatatttttcaaattcaataaaaaaattaaacataaaaattcaaatttttttaatattactcatttataagtaatacccattaaaaatgtctagatagatatataaatttgattgcatattatccacctaatatttagttaattgattattaagggacacatatgatggatcattttttttttttttaagatatgatggtcttcaaaaatttcctttagtttccgtcgggcctaaataccaattttgtattgtacatgactaaccgtacgtggtacaagtcaattaagtatggaaaatgacagttgcatgcacctaatcaaatcgaatagtaattaatcagtacacaagttttggccctaccacagtgctgagcaaaaggataggaaaatagggcatgagtttcaactcaagcctcctaattaaacaggtcgacccaaccggtttggagactttggataaaaaattaaaattggatatattattaaaaggaactgtctcaatcaatactttttaaatttaatttttttagaaaaaaaaaaagcaaatactttataaattttaaaatagtttgtattcggatcacaaaatttatcaatttttttaaagacatttttaattgaaatttaaaacattaaatatagggggcgtttcgtatgaggtgttcaaaataatttgattataagaaatattatgaaggagaatatgattatagagaaatgtgtaaactgtgtttggctgtagggtaatatgtaatcatatt

SEQ ID NO: 119982 - DNA, 1611 bp, Cannabis sativa
aaaaaaaaaaaaaaaaacctccatgaatgatggcagacttgctgtgaaaactttaactaaaatattttagagtcaaactttttagtatattgataatttaagcaaatgggaaaacacaagattacaggaataatatttctataataaaggttaaactttatatatatacactactacaaaatgtgtctttagctgcttttttttttcaatctactttataaaaaaggaaactaaagagtgtaaaaatacttgtttattaaaaattgatctttagaggcaatttttttataaaaaccgtaggtatagaattgcattataccatttgaagttggttggaaattaaaagatattggattttatgaaataaccttatggtgttggttcttatataggaaccgacgacatagactacacgcttatttgacacgtgtaccctatgacattggttcttacataagaaccgacgccatagggtcgtcaaaaataaccctatctatatagcatcgtcttctttctcacaacccagcataactcaacgaacccagaaaccaaagaaccctaaacgttcgccaaccaccacttccgtcaccccctttctcctccatttctcaattatttgagacaattttttttttaaatcttccatatttcgatacttaatcccatacacctaaaaagttttcattttttaccttctttaagtgttatccaaacccaatagaaaattgtgggtttaacatccgatcaccattatttgttgagaaaacattgaatctcaacatcctttaaggtataaatatagtttctattcatttttataatgtacattgttttataaatatttatagttaaatttgtttggtaaccattcatagataatacccattaaaaagtatttcatatatatatattgattattaacaaaggtagacatacataagacatacatgtatgatatcaattaatttaattttattataaagcttaataataacacttttcttattattaatcaatacaacacgaatagcacaaatatttcattaataaaacagaactgaagtgaaattaagcaatattagaatctaatacaataaacaaacatgaatcgacttgattctaatatcaacttaaccaagagagagacatcaaatcaataggagaattttaaagcattcaggtggcattttacaatcaattcattctatctattcttttttgttaaaaatttacatttttatctattttatatttatttataaaaaagtacttaataataacaacaataataattcaattgcacattttcacttattcataaccttcctattattattgcatatttatcactaagataaataggtaaaataaaaaaaaaaataataagttacaactttttcacttccctacaactctttgattcttgcatattactcattatatataggaatatagatttgaagaagatgtataatagtaagtggtaataatgaccacaacaaaaattaaaatacaaaaatacatatttctattatttttctaatgaattattatacataattcatatatatataatcatatcataataacaaaagttaaatacaaaaatac

SEQ ID NO: 119983 - DNA, 612 bp, Cannabis sativa
tattttttatttggacaacttagaaattaaaattaattaataattggagcattcataaatgtgggtaatccaaaatgtgcttagcatattcaattagtgatatgtgataaaatatgcaagttgttaaattatcttatctttcgtataattatatgtcatatttcattataaggaaatgatgactccatctatctctaaacaaactaattattccatttttctttcttataataataagctctctgtcacaaattagttttttgttttcattatttattagttattactaaagctatatttagaagttaaaatttagtgaaaaaataagaaaattgtagaaaatgtataatggtatgaattttttattttatttattaaagcgtcttatattagagttatacaacttgagattcaatctcataatccccacaaacacatgcacttgtgtatcccttaaaattaattttatgagaaattttattaaatcaactacttttccaatataattttgatttttctttcctactaaaatcaaggggaattaccctatatattatttttttttaacttttttttttcaaatttacggtctggatttctaaagtggttgca

SEQ ID NO: 119984 - DNA, 954 bp, Cannabis sativa
attaaataaatttttagtaaaaaataatttattatagaatattttaatcaaaataactttttctaaaagttgggttgtaccagctatagctttaagttatatctttttcataaatttttcaataaattttttttaactgcttaccaaacaccattttgtcacatcttttttgaaaatcatcttttagcttttccaaaaattatgctaaacgggtcataagtgtaaccaaacatggatagggaagtttcctttatgtgcatgagtagttattagtgcaaatttgccaccctctctttaacttcttgagtaatgaaagttctttttttaagaaaaaaaaataaacttaataaaactaatcagataaaaaaaaaacttaataaaactaatcagataaaaaaaacttaattaaagaaaacaaagtgattgataagaaatataaaagtagggaaaaagacaagctttacaatgaaaaagaaacaacaaaaaaaaaaaaaaaaaagaggcattaaaagtattctgtaattttaaataaaagaatttataatacttttgagaaaagttttttcagccccaataaataaaaatggttagccttgtaagatttttataccccaacaaatccattgttatgctcgatcttgatttctttaagcaccttaaaaatagtcccgaactatttctagtattataaacatgtggcctcacatgaatgtttagatattgttcaccagcactaagtgtgcaacataaaataaaaaaacaattcactatgtgtagattaaatatccacatgagcattttgtaaaacgtgtcaaaaaacaaaaaagagaaaagacacttgaagtgtttaatagccatctacctgttaaaattataattagtttaattaagtatggagttctatatagtttaatataataatgaaatatctagccaatcgtaaaacaataatgt

SEQ ID NO: 119985 - DNA, 1279 bp, Cannabis sativa
ttgaaaaataaaagtggttacagaatgcatttttatttttcaaaaacaaaatttttaaaaacaaaaaatttactttcattttgtgattaaaaaattagaaaacaaaagtgtttaccaaaccctaaaccctaaaacccgaaccccgaaaccctaaacctctataaccacttttgtttttcaattttaaaaacgaaaaacaaaagtgtgttctgtaaccacttttgtttttcaattttaaaaacaaaaaataaaaatgtgttttgaaaccatttttgtttgtcaattttaaaaacaaaaaacatgaattttgatttttttgccttttctaaataaataaaaaagatgagataaaaaatacgcattagcaaaatcagcaaaatgttttacttgattgatatattcatgatttgtaatttaggatccataccacaaaacacaaatcagcaaaatcacattttataattgtttgttctcacaagaatttctctagattcaatcattctcaattttctcagaataaaagttcaaaatttcacaaatggctgcccgtggaaaatgttgaatcaatatgacaaaatagagattacaaatttctcttcttcttctttcaattaaacacctttcatctcaacccaaaaatacccaaataacgaattataaaataaccatcgagtacaaagtttcaaaacctcaataccaaaagaaaagaacttgcagcaaagtaaatcataaaacacctatacaagattctgaaattgaattaaaagaattgaacactaaattctccgatcattaacgcaaaatcaaatcaaatcaaatcatttgccacagaacactaagatcaaatccatacataacgaaaacaaaaaatcaattgattattaaacaaagcaaagcaaaaaagatgtgacctgagacttttagattggtgatggtagtcggcgatgacgagagtgaggagtctgggtacgggagaacgataaagataatggggagaagaagaggaattagggatttgttttaggaatttaggttttttttttaaaatctgaaccgggtagggatttgggttcatatattgctcaaagaggccactataccaagacaaagtaactagataattccctatgacatgataattaaatcgagctctcaaaacccatccccttctctctagtccttctacttttgaaaaacccttccaagactattccttctacttttgagaaatcccttccaagacaactcatatgtctttttttttttttttgagtgtagc

SEQ ID NO: 119986 - DNA, 1121 bp, Cannabis sativa
attttttagttataatatatatattttttttttttgactaaatgtgactttagatataaattgtcactaatttaattttaactataataattattatgactaaaaaatatactttcacaataataaattatgatttttataactaatatttttaaccacgtaccttttaataataatataagaatgacaatttataattaataacaaatgtaattataagtaaaaaaaatttgtagtgttcatttgtcaatttttttttattatatattttcttagttgacagaaaactcaatcaacattactatttacattggagcgacactaacactaattgggcatgtgttagacgaccataaaatatcaatccaatagctataaaatttgcgagacgatcctattttgtaataacgtgctacttctaagtaaaaaccctacttcggcccgaacaggattgatttttgtagggctttcgcagtgatacaaaaactcctgtcgatcaacataaatgacttgtacgatcatgtgcggttgagttttacctaacttctaaggccatctccaatgcgcagacaacgtgtaatgctatttgtctggccactaattattttttatacaatttaaaaataacttatttaatatataagagataataataataaaaaaaaaagatagcattattgctgctgttaggccacaatacccatatatttgttgaaaaatgttgaaaaatcaaatatttatattgtgtaaggtcccattctctgacaagcaacttaaaagaaatttgcattggagatgcactaataacgctatttttacaagatcatggttaaacttttgtgtcaacttttatgtacgtgttgtggtagggttttagaccttcatttttatttataatttttttaaataatttttttacgtgaatcaataaaattgtatcacgtgtacactatgtttacataaatatacacatgaacaattcaatatagtacttattaacacctaaattattggatatataaaaactataaataactaacgattttctaattttagaagttctactgctaaaatttgaattttaagagttaagtgcaatgaaagtgtgacagtcagtagtc

SEQ ID NO: 119987 - DNA, 1258 bp, Cannabis sativa
actaaggatagttaatgcttgaaccatgtacaaatcttttgcttgttattgagttattcataccttcattacttttttaagctctaacaattatttggtttccaaaaaactcagtaaaaattttggtgctgtcattgagagctaaagaaagagatatgcacggcggctaccggtagaagcccgtctacaagaaggtccatgcaagaaaagaaggaagacttcctgattgcttgtcgaggtttggctgaaggttaaaaatgtgcaaatccgcggtgttgcccagaaaaagacttgatgccacagttttcccaagaaaggtggtgaaagcaaacacatgcattcttaaaatgcctactgcactaatacctatccttaggagctcaaatttggcaagcaaactctgtaggggcaagatcaaccgctgatatcctcaggttcagatccctcagcatatcactatgtgcaaacagagcagtgcaagaggtactggggtcaggcgaaggagctacggcctaatgcaattacaacgactaactcaaaaagggtcctcaaattcaatgactctacctagctataaactccaacaccgacactggtgcgagggctggagctgtctcccaaagactacttcccgtgccttttctgtaggtggtaaagtttcccaaaaatagatcacgcgacgatagttgctgagatttgaccttcagtatcgtcggccgctgctgggttactagtgaggcctagttatggtacttttggtagaagtagataacgtttggcaaagtttagtccatgccattcttgttgcctggtgtagctgcaaccccggagttacaacaaagggaagcaactcgagacattgtaaaccatttagggaacccttgtgaaatgcttgtcccattggaagtcagtgtttccactttaaagaccctcaaatggcctgcgctttaccgaaggagacaaactacccgagaaatcttgggggtgtgaccatgcacatcctaaaccttcctcgggctcaagagaaacgcgctaacctactctctgtgtgtggaagatcattaggagtgtcgcacgccttcaaccatctttcctagaagggaaggaccgattgaagtatgctttactcccagcgactcttccgccctttgatcttttcaagtgaaatctaagcttgaatttttatacaacttcagccttcctttcaggaagtcgaggcttgttacataaaaattcatcatgactctcgcaggcacat

SEQ ID NO: 119988 - DNA, 1676 bp, Cannabis sativa
tttcatgtaattttcattttttttttcttttttttgtatttttctgttttattccctaaataataataaaataatagaaattagtgctaattgtcattacagcttcactctctctctctctattatggtattttcagtgctattgatgttatctccattagagatcaaagaagctgccgtggctcgtggttgtatattcctcatattaggttgggattgagtatccattgtagagtcaataacattgagccaagtagcgtatgccagatagcgattgaccaggccatcatccatcatagtggggaggtaagtgtctaggctcttaatttaaagtgatgccttattattgtgtggccatatggcaagtgtcccattattaattattttgatataaaggttgtaggacatggttttcggacggagaacttgcctagtaaactgccgctagagttaagacacatttgatttgattaactgaaggttctcctacacaaaaatgatttggaccgaaccattttcaaatttaaatttactaaaatattgaattttcttcaatatttattacttaatctctcccataagtgatggtatttattgccgatttgccgtttaatgtaagatatattaatctctccactccacaatttgtcttctccctataatattttacattatcattattgctattgattttttttttaataattaggtttcacattaaattaatgacaactaactactcaaaacatccaatatttattgcttgtatacaacagatatatatatatatatataatttgactttttcatattgcagataaagaatatatataataatggaaagatttaaaattaggttaatgaagattttttttttacaaattttctatccaaatttttaaggtcactttaaagtttttcttaaatgattgaaattgttgaatttagaaattttatctaattttattaaattttactaatatgaccgattatttttgtaccaaattatatgttcgaaattttatatatatcaagtcgtgctctcgaatttttacatgtattaaattatacaccttaaacttttatccggtcagacttccgttagtaaaattaaaagaaaattttgaatccaataatcttaatagtttaagaaaatttttgaatgtgttaaaaaattccgaagacataattaaatacatacaaaatttttaaaaataaaaatcttaattaacgcttaaattttttttatatatatatttttatatatatgtacatggttcgtgacttacgtaccttctaatttattcataaaccaccaccaaatataattaaattaatgagacaaaatttgaagacaaatatatcgaattaaattttaaacctatatatattagatatttataatatgacttaattattaatttataatattaataaaaaaattaatctaatacagtacttcttatatatatatatttaaatatttaaaatataattttaaatttatttataaaacatatatatatttaactaattttattaaataataataaaaaaaataaatataattattttaaataatataattaataaattttttataaagtattaattgattaaattaacgtctaattcaaattaaaattaaaatttatataaaaaagatcggaagagcg

SEQ ID NO: 119989 - DNA, 1228 bp, Cannabis sativa
aaaaaaaacctacatgtgacctccttcaataattttaggcctattagcttgtgtaacgtcagctacaagattattgccaagttgttggctagttggctacgagggatttttctaaaatcatctctccaaatcaaccagcctttgtaaaagggtgctggattacaaagaacttaattattgcttgagatattatgcatgagatgcaaagaaaaaaaagggaaggaggcctttgtttggaattcaatgtgatatgtccaaggcttgtgatagaaatgagtggagtttttttgaagaaggctatgcaagcatttgggttatgtgatatctttataagcctcattatgaagtgtgttagctcagtaagctatcaggttctgttgaatggtgtcccaatgaaatctttcaagccgtctagaggaatgaggcaaggggaccccctctcaccatattttttatcctttgtttagaattgctttcccgattactgcacttgaaagaatcacaaggaatcatacaagggatcaagatttcaagaggtgagcctgctattagccatcttatgtatgcatatgacacaatgttgtttatgaaggctaatttggctaatgtcaatacaacgatgcactgttgcaaaagtactactccttatctggacaaagattgaataatcgtaagtccaagctgggctttttccaaaaattgtagcccctgggatcgggagtcaattactgattggcttcattttgagttaatggatggtagagatcgattccttaggaacccacttttcttgaggaaaaatagggcgtgcaatttctcttttattctagagaaggtgaataatcatatggaaggatggaaggcaaaaatgttatcacaggatgcccatactgtgctaattaagaatgggatccatgggattcccatatacatcgtgtatgtcttcaagcttcctgctaagatcaatctagagctggataagttggtgcggcagttgtggtggactagttccacataaggtagaaggtttctctctctaatggcttgggaagctatctgtaaaccaaaggtgtgttgagggttgggcatcaagaagtttggtgacttgaatttttgtcttttggaaaagcttgggtggccccttactaatggcaatgaggcgttatggactacgattttgagaaataaatattgttcccaacatattttttgccaagttctattccat

SEQ ID NO: 119990 - DNA, 1914 bp, Cannabis sativa
catttagtgggatttcctgggtcgagagtaacctcctccaattcttcaattggttttagtaggtttctttcatcttgaactcagggatcaagatcttcatctttcctctcgttttctcctacaaagatcatcatcagctgatgaacggcttttctatgttgcagctctatgcgataataatcgtgagctagcatttggtcgccacgcaccactaccacgccatctggggtttggaactttaaagacaggtgcttgatcgagctgactgcccttagtccgatcagtgctggacgacccaacaatatattgtaagccgaggacaggtcgataaccaagaagtcttgcataacaatagcagttaaaggtgcctcgcctacggttaatgcgagatcgattatgccaaggctagcgatgctatccctagtgaatccgtaaagattccccatacaaggtcttaacttggccttttcgagccctattttctttagagtttacttataaatgatatttaccgagctcctattgtctattaacactctcttgatcctcttattggcgagttgaatggttatgaccaccggatcgacatgcgggtatctcacattcttctcgtcttcctcagtgaatgtaatggggggttcctgggttttcaccttcttggaaggttctggggcaaagaccgactgctcgttctttatttccttcacatatctcatctgattaggtgataggatatattggtgtcaagttgttgcacgggctcacctatattaggtggtgcagtgatattatatatgatattgcattatggcacgggcttgcttgattaggaaatacatttatatgagcatatctatttctatgtatatggctgattatattacctacaaatgttatgttttaatcaatttatgataatgaaatgtaaaattagctatatgatgaacgggtgctctgtggtgcaggtaagggcaaggaaaagttaaagaagttaaagcagccatgagacgacagtcttctccagcaatgtacatattgacctcaccagcctgcatgtcgtactgccaggagtaattttgggttgtatctattgtgtgttttggttttatgtttttgacacaactacaaaaagtactatttgcgtcggtgaacgcgtctaaccaaaatggttgaccgaggcaaaaaataaggggagattttatgcttcaaagtgtgactatagctaaaaaataacaattagcgtcggcttgtaccccaacgcaaaaagtagaaccgaggtaaaataatacaattttaaaaattatcttttgcattttgcatcaatggaaaattgaggccaatttcttttgcttcgattaaaaattgaggttaatatatttgtcgcggttgtccatcgaagaaaaaagtttatgcatttgtaaaagtaaatttttacaaagtgtaatttcattttcacgcatcctatatccccaattcaaaaccctagcagacccatccccatttcgaaacccagccgcgccaaccagcatccgtcgcgcattgtccgtccgccgcccaccgtccatcccctacccttctctctatctcggtacgcacctctgaaactcgctctctctctctctctctcaagcgaagttcatggcaagtcaaaatttggtccttcttctagtagaaatttctctacatccactgctacctcaaatagcctaagcagttcctccttcaagtctaggggatcctcaaactctggaacaactcaaggaagcaatttaagctccaacttagatgcttacaaacctcaaagaaagaggagaggctttgtgccctaaataaaactccatttcaatgtaatctttatgatttaattatcaataaagagacaaaagtattttcatcacttatttagtgtgtcat

SEQ ID NO: 119991 - DNA, 1921 bp, Cannabis sativa
aacaatacgacttaatacgacgtttcaagcaagtcctattagtacataagagagttttgtatttattttatctagtttatagatatttaacatcatttaaaaagttttcaaaaaatcactatatacatttgtaatttttctctacttttacaattttattttattttatattattacaatttctttttttatttttattttaaaattcttcttttttattcatttttacggcaagattttttttctcttctataagctttcatgaaagaccatcaaagatcaggccataagtgggtgtgtgtgttggaggtcctggattcgaatttcaagtaaaacatatttgtaatatataaacgcttaaatatatatataaaaaaaaaataaaaaaaaaaaagacataatcggagacaatcattgtcgatctctacatattttcttttttcttctctaagtttccatctaaagacataagagacataattggagactaccattgcccatctttatctccatttaaatctatatctttacccaaattaaaaataaattatgcaaccctaaattctcatctaaacccacttcgcaatattctcaaaatcgaaacccaatttgtagaaatcactacttacaattgaagcccaaatcacaactttgctaatattgagtctctatcattgcaactcatttcatgacttcttctttccctttttaaggaaaatcttttttttttccttttttttttccaattttcttgccaaaatcaaaccaatcttcttctctcattctcaccatttcttctatcattcatctttgcaaccttaaattgcaacctgaatcacaaatcaagtcgcaactctataatcgtaattcaagatgcagcctaaaagatatagataatgcttacaccaaactgtagccttagtcgcaacctaagtcgtaattcaaattgcaatccaactcaatttgcaattgaaatcgcaatttcagtttcaactcaaatcacaattcgaatcgtaataaagttgcaatataaaatcgcaatcaagtcataacttgagcaactcaaattgcaatacaaattacaacccaagctataatccaaatcataactcaaaagagatagattttgtgattgtggaaggttattagcttcaataataattgccaaagccataagtcgagaaacttgaaaccatattttttttttcttttattttaatttatttaaactgtgtaaaaatagtaccgtttctaattttgaaaaaaaaaaaaatatgcaaacatacatatgtatatatttataccatataaatggttgagtttattagtagattattaaatttttaactataaccgtattaagaaagaaagcactaaactgaactattttttcaaaatacctaaacaaataaaaaaatgtaccaagttattttaaaggtgtactataattttttagtgtactaaattaccaattaaagtgtgttcaattcaaattatgaacttatctcaaaaaaaaagaaaaaaaaatcaaattatgaacagttgtttgacttttaaacctattccttaaaagctatcaaatcttggggtcaacacctttcacctctttggagattaaccgcattgaatcatttgtcggctgtgggacccatcaaagatggctacgtggcaatcaaccacatgggcttgatggagacacgctttataattttcttatccaaactctctacccaaaattccgagcttaaaaatcattgaacagtattaattggacccaatacacacaacaagttcacactggaaacctctttatattctttgtggaataagagcttgacacctagcgtttaaatatgttggaaaattctgtattatgagtcatttttgcttctcctagtagtaatatttttgtattcgacac

SEQ ID NO: 119992 - DNA, 2142 bp, Cannabis sativa
  modified_base (2106)..(2116): a, c, t, g, unknown or other
tcagaattcaaatttaaatataaatatctaataactgaatatcaaatatcagtagatctttaatttttataattatccttttaattaaacaattatctaataattcatttaattaataattaaaagataattaacttaatttgacttaaattattttaacttatgaaataattaaaccaaataaatcatgagcctttatatgtcaccctacacgtgtagaatgggcctacacgtgtggaccatattttaaggtccaaaaataatttcttaatttttccataaataaatttattatttgttctgctaataaatgataattgattaataatcattagtctcttatttcacaagaatcacaataaatattattttctttaaaataatatatttctatccataatattatataggaatactattatatttaactaattaatatagttttatctaaatctaaatatttaaatactattaattatacaattcataattgtcataattaatcaaaaaataattttgcaaattactattttaccctttagaatttatttcccacataagttaattctcgcttgaaatccattcataaaattaaaccttttcctatacagtgttgtttagaggtgactcgagaacaatagacctatatttcaaagctccaataaatcaaatattactatcaatctcataaatagaattatttggtttattaattttattattacaccactataaatatatcatcgcactctttgataatagagaattatatttacagaatttttacctttctaattatctcttgattccttatgtaccattaattcaaatgtgaatagttaatctataacatattatagatttagatccaactattaacacttttagaattaacaatataagggaactaatattcgatcaattaggaaatcttggattttactattatataacatgttcctagccactcatgttattaagctcccaaaataaaagttgtaagaatcttcttctttgaaaaactttaacgagtgaatcaaagaactcaatgaacacatataggagttcacgtatactcaagattcaggttgatctactaatgatcatcattgtgatatgaataactttttacatggtaaacggcaagttaacgtaagatatttattacatatcggtctagtcatgcataatctaattataaacagtacctttagtacatgtccatctacatatgtgatccgaatcaaaattacacacactattccatattaaagattccttgaactttaatacactacccacttgttttattcatatcatataatcttaattctcttgtacatccttacaagataataccttccccatatgaataagtaattttaagatatttaataattatactcttataattaatacatcatttatcttataaatgtatttcatacattctctaatatgttatccattaattacttgcttttagggcataaatcccaacaactttcctgttaggaaagtcttgggtggcatggcaccctgagtcagcctgctactgacttccctcctatctaggcttgtcagacagcttctgttaattttatgaagcctcaactcgctctaggaactctttcatattattcgttgagatcctcctaatatctttccaaaagtcacttaatggaaggatgacccccaatacggtcgtataacgaccttattcaattaggcctttgaccttagtggcctcggccatgaacctttaaatgtaatccttcaaagtttcaccttatcttttctttacctcgacaaggtcttccaattgtgaccgtatctgcctcagggatgagaattgtgtgtagaattctcgagagaattcattttaagaattgaaccttcctggggctagcttgaaataccattaatggcctattttaaataaagttgttgggaagatccaacattgcacatcctgagtaacttcttagagatttatttgcatctcaaagtactttatgtgtgctaggggatcttctcttccaatatacatcttccatactagcatcttgaacttaggtaggggtatgtgttggaaattattttacnnnnnnnnnnnatctactcacaagtatgttaattaac

SEQ ID NO: 119993 - DNA, 2315 bp, Cannabis sativa
  modified_base (44)..(81): a, c, t, g, unknown or other
  modified_base (2288)..(2289): a, c, t, g, unknown or other
aaactttatatgtgtttatttgattgttttagaaattcatattnnnnnnnnnnnnnnnnnnnnnnnnnnnnnnnnnnnnnncctggtaaaatatttccaacatggccatcaagggctaccttcaacttcccctcactccttgcaaggttagtctccaacttggagatgtcaccagcttgcaaggtgttctcctagttcctcgtgccgagtatggcctccaaacctaaaatcatgtttcgattttgcaggccaagaccctccatatcagctaaagcctgtccctttgccaggatattagcctttaaggtgtttatctactcttgaagagatctcaaagaccccctggagttgccatgcaaaaatttcagcttcataaaggcctaaaaacaaaataaggtcaagattagtgccaagaacaacattgaccaactagctcctatatggtgcacccaaggccggccaacccctccaagacagtactcatggttggtcagctttctacagtagcccctatggccagacatcttgccataacacagagaaaagtgagcaaagttaaatgtgctatttaccaaggccaacttctgaagacctacagaagagagcctctctagctcaccgtcaccaagctcccacagctcacatccacaataggacaggccctatccatgtgcctgtgagctgcctccatggctctttgccccatggctaagcctgctccccgactaggcctcggggtgcccctacccgaaggtcgttccctcctcactagagggtcatccatcatgggtgcccaaccagtgcaggtcttggagaaggaggaagaagagatgaccttgcaccatctttagcacgggtggtccgagccaccttagcccttggatgacctgaaggctcctctggaggtccaccagttagacctctcaacctggaagacatatttagaaggagaaagtaacaaagtcataatacaagttacaaatattcaatgcaagcaagaatataaaagatggtgcaatcaactatcaaatacaatcatactcagaagaggcatcatctgaatcctcgatagctgccttcaccttacctctagatgaaggtaaggggcgagtaggccttataatgatctggcctctaggcctaatccaaagagtagcatccccaactgtgccctcgtgagccagccactggcggagggccatctcctctcttctttagacctagagttatttgggatagaggcacatcgtcatccatgtcaggaacatgtcctccaccaagacagacctcctaaacaactagggctccatccacacaaactgataggcccttggcccccataactccagaagcaggaggatacaggtcgtacttctaaaagttggctacactggccaacctaattatgttcttttttgccacggggagtgattgtatatcggcactcattggaagcggtgatgtcaaatctcatggatatcccaggcaataaagtagttccaagcatatccaccaactttttacatgggtgtgttattggtgtcccccaaccactgatggccaacctgactgaagtagaagtaccccgtctagttttggttggaagaagatttcaaatcaaagtaatatacaatcttatacagagtaggttgaggctaacctagctcctcatataaaacaaacatcactgagaggtattttatacttttttaggtgattcatgttggacatatctcgaagtaagcaatagtatctcaaaagtacgggtgcaacggtaacaccaccccttgctaaatatggcactttgaccatgccattcaattgagggcaagccggtgtgctctctgatccctcgtgggtatctcacactggatgaccatcactaatccactggctagtattctgtcaaagtctcagtaggaataacagatgggtgagagacccacatgtctccatatgatagcaataagaacatgaggctctgaagagacccaaaaccctaaaccctatgatccagacctatcactgaaggttggcctagccttttcaatggttgcccataaacatcatatccacccaaaggatagttggggaggacaacacacatttggtaagtcctctttctaactggcacaacctcctccatctcagacttggtgttagaactttcagccccctagtcaacctcaagtacctctccctagttcattttcggatctacatcatcatggggctatgtggcctctattggattttgtgccctaaataatgttggattttatgccctnnataaaactctttacaatctgattagt

SEQ ID NO: 119994 - DNA, 3358 bp, Cannabis sativa
aatatatattattcacataatattatatattaccacattttaatctacatattattatattaaaaataatataacatttttttgtacagccctactccacatgatatagcactagatcccaaagaccaccacattattattgaataaatatacataatcaaatttttcgtatatttagtttattcatccttttatttcttctaggttcactttgtttgattaatcacttaatattctcaatattaaatgtaggtatttatttaaaattttagttttgaaattgattaatctagaaccctctattagtgacatctatttaattatattaattatgataattaatgaattcaataaatcctatggctaatcaagttgaatgtttagaatgaatctttttatttcacatccttattagtctttgatcacttgtcataactaagtgattctttttggttaagattatataattaataagaatatttattttttggttcgtaaacgatactataatatatattcttcaaatcaattatctctcataattttaaattccaataaactttttaaaaatggattcacttcttaaatagtcttttaaatacactctcaatatatttaatactctcactcaattagagagtttcttatgaatagtcttttaaatatgtttcaagtatacttaatactcttactcaattagacaattacttatttgtccattgtctatgatatgaatatttattacttatttttattaagattattcttaattcatgatctcaagtttattacttgtttaatctcattgtacaagtattcataaatttcaacaattaaacaattatgatattcaaaacttgtatctcatacttttaacatctattttaaattgtttatccaatactttaataacatcccctatttccatattgtattattaaatctacatctaacaataattttattagtaattattaatgatagatatctatcactatattatccaagaatatgtgatatcaaataattactaatttattatattacttgaattcaatctcattgtaattcaaatctgaatataataatttaaatgtctagcttatgaagtcaatgacctagtcatccttctctttatggatatttaactgaactatcttatataccattttattgattactctaatcaatacaattttaataaaattaaagtttctcaattatgaaaattcaatgttcaatatcatcttagtgtattgaataattcaatgagactattaatgcatgattattaaacaattatatttcgactccaaagtttgaaattagaaagaattaacatttttattaatttctttttcactaaggctttgatattccatatatcaaaatgtttactaatttaaattagttggattttcaaaccttaccttggtatatcttgtattttgataaatctcattcattgaaatctttatagttctattagaaatcatgatttagaaacactaattattgttatgaagaacaatctaattttttcaaaattatcttgtattttaatgagtagtatactcccactaaattattttattactgctaaatttaattgatggtcatgactattaaaatttaatttcgactctttaaaattatcctcattttaattgtcatctttattgagattcaattgtatgaattctttctatcaattattctcaatcttgatgtagtccaaccactttcattataactcttttcatgtattaaaatcatatctcatattgatttaaatagttagttacaatctattacaattaataaactcaactattgaatgtttaattgtgagttcatttcaattagactatctaattaaatgaatatgattctactaatgattgggaatggaattccatatccatgtatatgtttgaatagtaatttaaactttctgattaaatctcatttaatttttaagtttagtcatatagaattaaaatcatattttaactcatcttaaacttaaatatagaaacatttataagtccctaaagaatataattacttatttattataaataattaaaatatttaaacttgattttagaattatactatgagtattgaagtctttagttaactttgcacacataagtttgaatatcaaataaactttattgaaaaaatataaagtgttcaaaataaaattatttaattaaaacaaactttaaatatataactaaaatttagaacaataaactaaataaattatcttcaaaattttaaactaaagttgacttcttctgctcttctaaaatcttcttccatcacgaattttgtagaagtctcacttcttcgaatcatcttcgtcttttgttcacaaatctagaagcaagagagaaaataatgtcagtaatttagaacaattcaatccaccattatttaataagacagaaagaaaagtaaatcatatttaccttcctttccagcttcgcaactctatcaaaatatccatcttgttaggatgagcatttctctcacaggccaattggtcatgagcgacagtgtacttgttatgtactgccttccagatgtcacatacataaactaaacagtcataccaatatcttatcttttcattaaatgaagccaacatgatatacctagcacaatcattatcaccatgccatcggttaaaagttctcctgacagcataactagaatgtttacgcatttctttccagggagtttcaacaaagacaaggtgaaatagattttctctttgcaagactatttagattctccatttgcattggaagttaccataaagttcagttacattgtaatagggatagtcattcacaaaatattgttgttccattttatattgttattagactaaaacgaaagataaataatgcgagaaataagcaataggatataaatacaatataagtaccataaataaaaataaatatcaagtttggaatctaaatatgatgcatgagcacacttaacaaaatacataaaataatttagaaatttcacggtaaaattatgtaaaggttaaagttccaccttagggtcggtcaaattaatatcgaataatctacaagacttgttcttgtctttattaattacaactaaaacagctcttattttcattacaaaataaagtaccgttcatttggtcaagttatatcccctagtgtcaaagacagggacatgactttgtgagtgtaacccattattttggattctatgacctaacttagtagcatcccttaagggtcggtatcacactaaaatatatcactttgtcctatccataaaggaagccaaccttaataatgta

SEQ ID NO: 119995 - DNA, 1311 bp, Cannabis sativa
  modified_base (921)..(921): a, c, t, g, unknown or other
tagaactacagagaaaacagcgacatgacacactccattttcattggcgtttggcttggaagcaatgttaccagtagaagttaacattgtgacccataggcgtgaattctataaccaataggaaaaccaagaacttctgaatatgtcattggctctacttgaagaaagacgtaatgagtcgcaaataaccaatgcagcttataaacatcgaatcacaagatattttaaaagagtctgaaaaaagatttttaaagttggagtgttagtattaagatgtgtatttgcaaatacgtgagatccagctgctggagtgtttaatcaaaactaggaaggtccatatgttattgaagctgtcgtaggaactgaggtttacaaattagcttgacttaatagctcgctaataaagaactactggaatagtaagcatttacgaccgtattaccattgaatttaatgtgtaaatgttttatctatctctgtaatgatttatgataattatgagtaaaattacaatttgttcaagtaattacaaagtttttttcctttaaaattacttgaggcatatatatatgtataataactacagtccacctagaaatatatactatatgcgaacctaaagattaaaaattttattttttccacaatagaaatgttacttgattaaaattgtctcttgacaatataaagtcaagaaattgaaaaactttttcttctagaagaaaaattaaaatagcagttgtaagtgagattatctcataaaataacagaaagatatatgcgaagcctgaatacgtaacggctcgcattattatggcatgtattatgaacgagacacaaatgtgccttcaaaaataatacttaagctaaatatatgaatagaggattaactatttatatgagcaatcaaaagatattcanaatagttcctaaagtgaattattcaaaatattttaagattgctctaaaaaatgtgtagcagatcatcaactgctcgcataaaacaagactagttagaactgctcgcgtataataaggcagattagaactccttacgtataaacatggcaaattgaaaattgctcgtgaaagacatggtagattattaactacttttatatctcaaagaaaaagacaatggaaatgcatgaaacttaaagtatcttaagctaaatcgagagataaatgtttagattgtgaaataatacgcaataaataaacatatttaactcaaaagcaagatgcgaggcataaaaagtaaaaatatataaataagcaaagttggtcatgttggaatatattttaccacga

SEQ ID NO: 119996 - DNA, 562 bp, Cannabis sativa
aactcaccgcctgatgaaaaccatatcgattctactcgcaatgactcgcctgagagggacgagttcggcgattctgatccccacaagtccgacgaagaactcgatccaggctcgttactttaagtagtatttgacaggttcctatgatttaattcaattagtacttatatttagaaaattattatctcctttaatttaattagaactcaaaatttaaatggatcaaatgaattagatttgatcaattatataattagatcctattatacacttaatttttaatattgatttaaaataaaaaaatatatataaaaactaaatattacattttatttaaatttaatactatataaagacctcatcttttcaagtttaatgcaactaaaatttaaaataactaaaacaataatattgttaaataataaaagagatcaaaacatatgaaaataaatacacaaaataataagtgttacaaattcaaccaaaaaaaaaaagattaaaaatataatttaaatatattttttttaattttttaatattttttattatatataaatatata

SEQ ID NO: 119997 - DNA, 857 bp, Cannabis sativa
aaactccaatagccagtagagttttccattgctacaagccacgaatgtactcccccaatccaaccaaacatctcgaaactgtgatggaaatttgattgacaaaattgactccttccattctcctatctcagaagaaaatactgcaatacacaccttttccacatcaaaaagcacaaccgtgtactccatgctagtatgctacaatagctatcgttaaatccttctatttcccctaattgacaacaagacttgggcatgcaaacaaatccaaccctgcattcttcatatgaagatgactcggggagtgaaacacaatgctctttaatgggattgcaaatgcagatttgtgatcttggtgatcttgtttgttaaataatcggcttaaataacattgggagcctgaaattagagatgaccatcgcttgcatactagactgcactgcattacagaacggtaatcagggatttgggtcaatatcctattagaaattaaatagacttccacattccttttttagatattgttcaccatttgtatttgtggttctttctcattccaatcaattatatgtgtggaaaaatctttcccaaaccaacccacagacgattcaattttttttctaatttgaatttgttaatgctctatttacttctttttaacaatttctaaaatgcattcaatcgaattcttaaactttttctctggacagattttttagaacaatggaagaaatggatttaagaaagtatgacatgattggatcatcctgttagataaattaacaattaacccaagatctatttgtatataacatagaacacaataataagatataataattaggtatgtgtacctg

SEQ ID NO: 119998 - DNA, 668 bp, Cannabis sativa
cagagggtccaaaatggtattttcacacacaatttcctttttcttttatagttaaggaatagggatgcacattttccggtctataaatgggcaacggagcaggaacgaggactattttttgtcatcgaatatactcgtcccgacaaggacccgtttagtattttatcttacatttagtaatattttataatttataatttatttttacactttttttagtatattagtatttttttatgaattttaatttgtgttttggataatgtttagtatattaaataataattatgtgtaatattttatttttttatatagtttaatatttttgcatattaaaaattttattgtaaactgtatttttctattaggggatttgctgttctggtctcgttccattaagtgatttcctgctcattcttaataggaaataagcgaggattaacggtggtaggaacggaagagcactccttgctaattctccaccacgtgtgcatattaagaaatggaatgttgtccttagaaaagaaaaaagaatgaatgtcgagtttagtcgatttgtatacgtactgatttattagtcgtaattaattcacctatatttgtatgtggacttacataggacatggttttagtttacataaataaatatatgggtgactattcaatgg

SEQ ID NO: 119999 - DNA, 3287 bp, Cannabis sativa
aagcttccattaagattctataatgcaaaatgaaataatttttattgaatttatgattctataatacaaaataaaaataacttataatagatctatgaataaatcaagtttattagaaattttacaatgcaatcttcacaaaaaacaatgtctaatttctacatatatatgcgttactcaatgatgagtacacattatttagctttttttttttttttgacgaaagacagggaaattacacaactggaacagatccattccagctcaattctttgtctagccccaatgccttctttgctaagagatgagcattattgttatttttcctgtttacatgatgaaggctagcattagggaataaagacaaagagcttctaatatcctccactacatccgacagtacagaaaggtctcgcttgcgcccataaatccgatcaactagaagctttgaatcagtctcaataaccgcaatcagaattctgatatgataacaccagttaagacttgctctaagtgctaaagcttcagccattagtgggaaaagatcaccagcagaaggaatagaaagaccagcaacaatcctgccatgccaatcattaataacggccccaaaaccaagtttgccttgagaggagcacaaagccgcatcagtattaagttgatagtaacccggattgacttgcttctgttgtccatgaacatgtaagatttgggatggactaagcttcctcatatttagttgtgctgcattgtaatctgaaagataagagttaatccaatcaataacatcagcagaagacatatttaaatttgcaaacagttttttatttctaaggttccatatggcccaaacagtggtcaacaacagtgttagatcctctttgttaagatgtgaataaccagaaattaaaaactctttaatgtcaacatgtctatgagtaacatagaagtgtttaagaggagaagctttccaaatcttagcggcgctggaacaatctagcaaggcatgagtcactgattcagtaggacaacgacaaagagaacaacaaggacttaggagagactttttaagaaagaggttaagagcagtaggtaggatgtggtgatacgctctccaggcttgatttaaccttaggaggaagattgagagtccaaagtgtagtccaccactttttaatgaaagaaaagttagaagaagaaggaggaagggacacagtgtgggcaagatgatagcccgacttaacagaaaagatgcctgtgctgtccttattccaaatgagatgatcttctttattaaggccgccaattgggactttaaggatagaggaaacaatgtgagggtcaaaatactgatcaagcttagcacgggtccaatgaccattctcatcaataaaaaaactgactttatccgaaggaggccggcggatcactggctatgagctgaagaaattgtgaatcaaggacccaataatcttccaaagttcggataaaacatccattcccaaccttccacatcaaaccttgactaaggagatccctaccccaaagaagactagaccaagtgaaagaaggggaatgcccaagcctagcctcatagaaaccagtatgtttaaaatacttggctttgagaatagcagcaagagtagaattaggattagacaaaacacgccacgcctgcttggcaatcatggcctgattatgatgaactaaagaccggaatccgagtccaccaaagaatttggaagtgcaaagattattccaagctttccaatgaattttagaacctttacccatcgaaccccaccaaaactaagccatcattttttcaatcttatgacaaattgaaacagggagttgaaagcaagacattgcataagagggaatagcctggataacaactttcaaaagcacctctttaccagctttggaaataatttttcattccatgctgagagttgagaacctatcctgtgaagtataaaatcaaaactggattttttagaccgaccaaaacattgcgggacccctaaatacttgctaatgaaaggtttcgcctcaagaccaagggtttcaaagaagtaagaagatacggcaaggggtattgagggaaaaaaggatagaagacttagtgtaattaaagttctgtccagaagtaaggttatagagagtaagagcctctttaagagaattacaagatgcaaaagaagcagtggtgaagataagggtgtcatcagcaaaaagcaagtgtgagacagcaggggcagttcgagcaatagaaatacctttgaacaatcccaagttttcctgaatacgtaaagctgcagttaaaccctcagaacaaagcaggaacagatagggtgataaaggatccccctgtctgatgcccctggatggaagaataggatcagtgatttgcccattaatactaaaccgtatagatgttgaggacacacactgataaataagattaataaaatgagaaggaaactggaagcgatggagaatagccatgagaaagctccactcaacacgatcaaaagctttctccatatcaagcttaagaccaacccaggcctagcttaccatgcttacgatgcttaatggcatgaacaatttcttgagcaatataaatattatcaaagataattcgctcagaaagaaaaacaccctgattagaggaaataagatctcctaagacaaatttgagcctattagcaatggctttagcgacaatcttatagacagttgagcgaaggctaataggcctgaagtctttaagggtagaggcattagtttttttggggatcaagacaatgagagtagcgttaatagaggaaaaatcagcattaccattaagaatatccagaatagcagtggtaagatcaggaccaatgatagaccaatttttctgatagaatgcggggttaaggccatctaacccaggagccttatctccagaaagctagaagagagcttgctggatttcagcatcatcaaaaggagtatccagaaaacttatttgttgcaaagtcaaagttttatcaagggcagcaagaatgaggttagtagtcgtagcatcgaaactttgagacttgaacaggttatcaaaataagttcaaacctcatgacaaatgtcagaaaaggaagtaacctgcctcccatcctcacatttaagtttttggatgtaattagtctttttcctagaagtggcctgttggaaatattttaccaggatctagatttactagcaagtatgtttcattaacatcctaatataaattctaaaa

SEQ ID NO: 120000 - DNA, 2274 bp, Cannabis sativa
  modified_base (972)..(980): a, c, t, g, unknown or other
caaggaaattggagtttttagagctgaaaaatacttcaataaagtaatagacgaagataccaattccagaatttcaagcattagttctgtaagaagctttaatattaaccaccagtacaagaataatggtgatgattgtcaaattcatcagtgagtccctgatatttagcaaattcaatcaaaaattcatctcttaactcctagtgttcgttccaaatcgagctgaaatagtcaaagcaagttactacaaagtagtgaaagaaaataaactcctcaagaagtaaatctagtaagatgaatagaatgaagtttcttgctagttttgggtgttcttgcactcataaagactctattgctagtaaagacgctggtgaaatatgttaggtttggtaccctaactgaaatttcattttagtgtaacttcattttcattatcaataaaaagaatgtgaatttattacttgtttagtttaatttttggctcacatgtttatttcatgatcatatgtttgatatatataaattctagtaaattctcatcacattgctattcatgattattgtgttgtctacacaatagaaaatagtcaaaattatgtgattaaactaattagtcccatgatttgtcagtacacctggatttacactgatatgattatatcaacaatttagtttacttacacttgtatagtggaatgtcttttctaaggcattggcaaagtaagcttgtattgcatatatacttatacatcagactggatagatattcatagtggaaaagatatcataaacttaccgtaatatcttttctaagtaaatatcacttagttgatcttaaatcaatgatctcaatccttagatggttaggttttggcttatgtgtattacatgtgctctttgacttgtttgttaaagctaactaattagattggcccaatacttacataggaacacgatagtacaattgagtgnnnnnnnnnattatagatatggaatctatagcttctataaatacataaaagttaaatgatagtttccttagaacttagctaaacgagtttaaacggtggagtactcatttcaataattatatttgtttactgaaatatcatttacaagtagctaagtattttttggataaaatacattaaagggtaaaatggtaaaattctccctactcgatttaaatgatcaaaagaggataattgcttatttggattgaaataatagataatttatagcgtatttgtacttggtatagagcgttctttataatcaggggtgtaatttcgaatctatagtggagtaaagaggaattaataaaatagaaaatttacactgtaaattttaaaactaattattgtatgtagactcaattaattgattttattaatcgattagaattctcaataagactatgccttgtttacgagtttcactaagcaaggacttctttgagaagaaaaagagaattttttgtttgtttattaattaagagacattgaaaggtctaataaaaaaataacttaagtagcaactttattttataattaattaattatttaacagatagaattgacatttatagagttagaattaaaatatggcatttgtgaatgagttatttcccacacaattcaagacaatactgaagatagtgtggaagattgtgtagaattttttcacttgaacaagaatctaagtttaggttttgatcatactctgcaacagaaaatatcaaagattagagatctgaacaaaatgagtcatattattttgctcccattaatgtaaggttttctgtaactttatgtgtttaattcattgattttaggaaattcatttttaggatgttaaattatagaattataatcaatacatgtagtaattagatcctcgtaaaatattttcaacaagcctcagagccatgttaatgatttattttcatgaaaaatggatttaaaacaatttttaatttatttggatgtgttcatgttggtttatgtatttttgatgattgattgtgatattacaaaatcttctatgaaaaataattttattttcgatcagatattattttatttggatagctggttaaaaattaagcaaactagccttttatagaactaaattttgattaaaactgaaaaagttatgatattttaaaattttgaaaatttttgttagggttttccctattgaaaatattttagtaggatctagatttactaccacgtatgtttcattaaaatcataatatgaattctaaaacaa

SEQ ID NO: 120001 - DNA, 2849 bp, Cannabis sativa
gtatctattgatgtaatttgtgggctgattttatgtttttagttgggttataattgtgattttggctttttttttgttgctggaaaataatgggggttttatgagttgaagcttaagttcttgagcttgagttcttgttggtttaaagcatgattttgagtttattgtgcaatctgaaattgggggtttatgttgaaatttaatgcatgatttatgtattttaactctctaatgtttgctagtagctctatgttgtaatttgagagttggattaagttttggttagcgtgcctgataagttagggcgttacagcaacccactctcaacttacctttttatcatctatgctgaagggttatcttctttgatccaaaaatttgaatcaaattgtgttttacaaggttgccgggtcgctcatggggctccttctattactcatatgttttctgtagacgatagctatctttttggtcaagctaccataggggttgctactagtgtgcttaatttgcttcattcttttgagcttgcgtctgaccaaaagattaatgccacaaagtcaaatattttttttagtctaaacatagagcttgctcttcgtaatcgtatatgtctaactcttggcatggtagaagcgtctgaagggagcctttacttaggcttacctaacattaggctttctcaaaaataaaattgtttatcaaatcaatagttggcatggtaagtttttctctcaggcaggtaaggagaacctcctcaaaactgttattcaatcacttccaacatattccatgagtgtatttttaataccaactagaacttgtcaagaactagagaagttagtggcagtgttttggtggaaaacaaattcaagtaaaagtaatggcataatttggatgtcttgggatcgtatagctactcacaaatattcaggaggcatggggtttcgccattaacatgagtttaatcttgcaatgctagccaagtaatgttggcgtcttttatgtaatcctaattctcttgcaggttgagtgtataaagcacagtatttttcccattcaaacttcctcacggttgagctaggtcacaatcctagctttgtttgacacaatatttggagtgctcaagctctagtaaaactcggggctcgacgtactgttagtacagatacttccacatcaatcttgcaccatccttggatcccgaacaaggtaaagccctttgtgacttcttccaatcctagtctccataaccagcatatttgttctctatttgattttgatttgcgtagttgggactttgatatagtacaagacatgttcaattatcgtgatgtaaatttggttctcagtatacccttaagtttgaacattgatgacgaatgttggtcctggtctggtgaaaaacttggccacttttctattaaaagcgcatatcagctgttggaagatcaaaaggcatcacgaccaagagtaaataactcaagtttttgaaaagatttgtggcaacttaagatccttccaaaggttaaaaatttcctttggggtgttgtgactgaatgattgccgacttgcgttaatcttgtcactaaacatgtgagtatttcccatctttgtcctatttgtcaaggccatactaaaactacttcccatgctctccttgatttcccttttgctacctcttgttggttgaattttggtaatattggcacccgctcttttcttacgattggtacctggttggagaatctattttcataggtagatactgaaagtatctgtggggtgactattgtgtgttgggctttatggaaagccaaaaataaaaaagtttggaaacagaagtcatcttctattgacgaggtacttatatcacctagcaaaactcttgatctgaaaaaaaaaaaaaaaaaaaaactcaagataaatctattctatatatcatctttgtttcttggagacattgatgatcaaactgagctttggataaaattggccactaatcacatcaagaccaatatcgatgttgttcgagaaagaaaactcatatggctttggggttgtggctcgagatagctttggaagacatttacacattaaagccgagtactatctactcagcaaaagttgtcgaagctatgggcatcaaagaagctctaagttggatcaaacacaagaagtgaaaggatgtagagatcgaaactaatagcatgctcgtcgttcaagcaattcgtagtaatcaacaaatatcctctgtctttagtttgattattaatgattgtaaaattttattttcttctctaccaaatatttatttacattttgttagacgatcagtaaatcgagttactcattatgttgctaggcactctttgtacttatctagtcttagcattcttgagcatgatgttccttctaatctttagactcttttgtatttacaatactaaatgcaatgtgatataataaataaaatattttctaaaatgttgtataaaaagtaaaaaagatattttcaaattttgtaaatttttttaatagaaactagagttcctaactaataaaacaaaattcctcattaagaacttatcaattaattaagccaaagctaatatcaaatcaaatgaggtttaaatttaattacatatataataattagccattttattaactatatatttatcatacacatataaatctgctgatcactttaaaagaaaaaagaaaaacaatttgctgtaaatttgacattttaagcttaaaaatgactaatggtgtttaattataccaccctcctaaaaattttgtaactatcctaatctttcattggtgaccccaaaatacccctc

SEQ ID NO: 120002 - DNA, 1977 bp, Cannabis sativa
  modified_base (294)..(324): a, c, t, g, unknown or other
aaaacaaaaaaaaagtcacttttaatattttttttaaacagtttttttttcttaatcaatattttagactccgacgagacctgaacccaaatcctccctctacggccctagcgttgaacccgacctctgacccgaacccgaatctgaccccaaacctaaacccgacttaaataaaataaaaaaataaaaataaaaatgaactttacagaacacacttttattttctatttttaaaattaaaaaataaaagtgattgcagaacgcgtttttgttttttaaaaataaattttttannnnnnnnnnnnnnnnnnnnnnnnnnnnnnnaaaaaattaaaaaataaaatgttaccaaacagcactttcagtgtctagatttttcaaattatatatgttcaatttttacttctttatggagtccatgtgtagtagttgctttgtgccagtatggtaactgatatgtgccatgtatgatagctgataagtgtcatgtttagtaattgattgtgccatatataatatagtagttagttctatcataattttagggtcgtcaccaaatggatatctcttttctttggttaaatagtttttattttcatatttaattagttttatagatggttaaatagagtatattaccctgtaattatttgtaatatatttttatttgtttaaagggacaataatttaagttggtgtttgtttgtggtacatgtaatcttttagcatttttagtggaagctttggctctttgcatgagattgaattgtgctttcacttttggtcttcatgaccaagttaatttttggattcattttcattggtttttgcattaaataactcttatatgtacaaacaatgagttatgagttatattttctgacattagagtattatcgtctaaacttttagggcatctcctttttatgttgtcgcaatttttaatattgtgttttatagattggattagcatgctctttagctagacaataaattttttattggagttttatgcataaataaaactcaattttaatatgatcttatttactatcaacaaaaatgtgaaagcatatcttaagcttgtcatatgttttgttcacatatttatttcaagattatatatttaatatataaaaactattaaatcttgaacatagagttattcgcaattatagtgatgtcatcacagtaaaagaaaattatgattatatgatttaaacttatttagtcctgaaatttttcagtgcactgaatttacactgacatgtggtttacttacactaagataagtgaatatctttttcagggtattaacaaaataaacttgtatcaaatgtaggctatacatcaaactacaccgataatgacagtggaaaaaatatcataaacttaccgttatatatgttctaagtcaatatcacttagttaattatagatcaatttatctcaatcctaagatggttaagatttaacctaattgtagcattaaagttctttgacttattcgttaccgactttcgttggactagcccatacttacatcttaggaactcggtagagtaattgagtgagagtgttaatcatagatatggacatctataacttctatgtttgtctagaattgaaacgatagtttcttttgagcttgactaaatacaataaatgatagatctcttactttggtaattatattagtttactaaaatatcatttacaatgagctaagtattttaaagataaaatacattgaaggataaaacagtaattttcttcctactcaatgtagactgtccctagaggatcattgattatcgtgatcgaaataattattatagtgtatatatgttggatataaaaagcgttctatgtaatcaatgttagactatatatatagtgtatgtaatatagcatatacaaatgatatgaaatgcggaaaataaactgtaatcatatcaataatatatgcaatgaaag

SEQ ID NO: 120003 - DNA, 4195 bp, Cannabis sativa
actaattcagaaaaatacaaaaataatcaaaaaccaaatctaaccattctaacaccgtctataagctgtgataagccacaaataatttactttgaattttctgagttacctaggtatttttttataattaagtttagaaataacataaataattcatgaaaaatacaaaattgactaaaattcaaatctatgaattttgtatcagtttatatctcataactaatcaaataaataaatttagatttttctaagtatttttcctaattaatttaataaataaatcaaataatgcataataaatcaaataattgcaagaaaattatgaaacattaccaaacatcctaaaataatatgtcgaatcaaaatctacagaaaaatgcaaaaaacacctcaaaaccacccagatcgtggtcgctggagttacgtcggcgaacccctcttctccagcgacggcgagcctccaattccttatgcagttgcttttcacgcattgttttgaatggcgaaacttcctacagtgcttagaatgtcaagccgaccataaatcaccaaataatacggtccaacatcgttgtcttcttcgttgccggtgtaccattaaaaatggagtccaacaatggtgattttcgttcatggccttaaagctttaattctttacgtccaaacgccttctacgagtcccttaagcttaaacacagtcttattttaacccaaaaacgactcaaacatgttcaaatctgagattgctcaagaacgtgcttgaatgtgcatgagaatggtggatttcgaaacttgctgtcttagcgcattttgtcatgaccattagcttccttagatcgtgtagaagattttcaaagcgatcaaacaaacccagaaactctctaagtgtttcaaaataaaaatctctctttctctctctaagtttcacatgaaactctatcggtctctctctctctgcgcacagcctcctcccttcaacttctttatgcattttaaaccctaaaaatatctcataagcatcctatatatactcccaaactctaatcttaaccctagatcaacatcttaaaattttaaaaaaataataaaatatatataaaatagtgtaccatatataccatatccataaaaataataataataatgttaaaaataataataataataataaactatatgctacaatatatttatccttattattattattaatatacttataatactatttacaaataattaaatattaaattatcttgaatatagtttaattatttatctaacattatacacactctcaaaataaaataaaagaaattttattgtcactaaaaaaaatctcatactacactatattgataaatattcaagatgataaattaattacccttcaagaaaagcggatattacatggcaagaaaataatagcaacaatcatataataaatttatcaaatattgtcatttatactcagacaatcagaaacaaacaattagacattgctcataagatgaaatctaaatcaacactcacatctgtcacaattaaacgtcaatatagaaatttggtaatataaaatcattctactaataatagaagttatattcatttaataattgttgtccagatttttgtaagtttgacacctgaaacctaaccaaggaagctgagataacaatcaactgggtaatgcctcaagctctagctcctgcgaaggatacttccgctcaaagttatatttatttaaaatagtactggtgcaatcttcctcatattatacgaaatttttttgaacctgttaacgcagattttcgttaactaaatttgagcctcacgaatatgattcaacacagaaataaaaataaggaaaaaattgtagaaaaataaaataagagcaccggggtttttacgtggttttgtagttataattctgcatagtccacgagtcaatcttattcagatttttgagtattttctttttctcagggcctctcgcgtaagagttttttttttctgtccccttttcttgagattgtctgccactatttacaattgcatagtgacagttaattacaagactgaccaaaatgtaattacagttatcatcccttaaatcgtgggatctgattacatattacaaaatataaacgcgatgcacaattttgaaagtcatacaactgtgattttcccacttttactgggtcagaaatatcgtgtattaaacgtatgtctttaactgttgattatggagatgtcttgacagaaacttaattgtagtgattccaatggtgagctggaaccattcttttatccgagatcgacaacatacggtgattgcagatataaggaaatctactaatttgccagggttgtgagtctcgcttccattagttggatgaaactataggaatttttctcatagcgagatggtcgtctcgtattattatactctgacctagttcgtcgtttatacttagtctgcttatttgtgaaccgaggtatgtgttattcttctttggtgcctcgctattctttttcagccacatatggtttttcgttaatactctaagtaccagttgtacattgattactcacctaagactttacagtcagagggttgcaaatatactctagtacttacacaattaatgagttattccataaaaagatacaacaccgattcacattttctttatcttgacatggtcctccagtcgaattttgggtataacaattgccccttaataagtttttttaatagtaaaaagtgctttttaataatcacggatggtattttcatcaaaatcctttcttggaaaggatgcctcctttgattctggcagttgtatggtttcgaagatcattatgaatcgcctattcatattctacacgattcccaactgttagatttcttaatctttggctttcttgtcaatgtgcttcgtatataaaagggcagctcatgcttgtcatttttcataaaccttctggctcttttagtgaaatccattttctgaatggattacttccctcctgtcaaaatgtcccttttgagtttagaagtttatctttccagggtcataataacaagatgcaccaaccaatttccgttcgttcctacaaactttaagtctcaactggagccgaaaacgatggattccaaggttgaggagcttccgactaatccaaaccaagggaaccccgtgacctgccatggccgatcctcataagtgattccagaaagtatagatcttgtgagcgatttcaaaaatcctccttaggctgatggagaattccaaaggaagattggcatagtttcaggtaaatttggggaggaagttggcgtggtttctatcaaagaaaccagcaaacttaagaccctatcctgtgctaggaaatctttgcatcagcctctgttcagtgttgagaggtttcttgaggctgggaaatagatctcggcttcaggaaatgggatcctctgatcatgtggggaatgaggcatgtgcagagaccaaggctctctacgtgtacccggtctttctcaagctatgcgtagtcggtcttttttcgagctacgtgtagacggtctttttcaagttatatgaaaacgatcttcctctcaacataagcttaggagaatgacttaatggtttgccccttatgtatttttgtaaagacaattttgtaaccagtcttaggtttttcttatcttaaatgccttgtactgtttttatttgaacttaatacaattgtatttgcttgcattattattcacaatgtaaaaaattatattttgatcgaatgtacatcacttttgggtttttccattgctcgtaatcttcttgtttaagtagttaataatctagcaaactttatgattttcaagctgttgtccattctgcttcgcagttgcagttataatctgccttaagcaaacttaaatatactttaaggattttatctctttgtatatttttaatttactcgcatgaatagttatattatctacccgttttcttggtttaagtactttatcaaggtgttgtgatgtctcgtttagtactttcctagctcgcgagaatcgttagtattcagttttatacgtgagttataacttttaattttccactcccgcggataggttataaatcaaaaattatagttgtttgatcccttcttcgtcaaaaaggtttga

SEQ ID NO: 120004 - DNA, 2271 bp, Cannabis sativa
aagctttggaaatacaaaaatggcgtcgattgggggcaagggattaataacgagagccagtaggatgaggtcaaagctccaatctgccttggaagcaagccttcttgagattgaagacgtttcctaccaacacgctggtcatgccgccgtcaaagccaaccctaacgcagccgccggcgagactcatttcaatctcaagattgtctcccccaaattcgaaggtcagagccttgtcaaacgacatcgtttggtctacgatgctcttgccgacgagcttaactctggtcttcacgctctctctatcgttgccaagacaccagtggagatcgaacgcgcctccaaatagccatagcaaagtatccctactctctctctcttatctttttatgtgaagattttgatttgtgttgatcgggttttgatacaatttgttaataattgattcaactcattattcataggaatctcacgtttttgatcgagactctttcaatgcagtgcaatgagaatatgagatgactactttcaaagactttgtttgaactgaacatggttaaacctatttgatgaaattatatatctatatttatggtcagcaaatatatctgtagattctgtttataagaactaatacatgcatggtttcagtttttatgatttcattgtgcatgactgtgagattactacttcttagttgttaatattgatatgtattactacgaaattcccatatgagatactaccaaaggttaaagttacataattagagtaaagacaatagacagtgcctggagtcttctcactgctagtttatgggactagtttgctggtttttcacttctgcttttagcttatgaagaatctctctttgttaaagctggcttctttcaattgagtttttcagagctaaaaaatagaaaccaaaacagcagttaaagtaactacttttagactttcagaaacccaaaagtggcttctaaaagcccagcaaaccaaaccccatgtagattatagattggcaacctactactgacatagaagatgactgaagtataatgatcagcttccataatcgtgttggtcagttggtgtagttactagcttttatggcctattaacaactggttgggtatagctatttttttctatcccatgaacccccccacacacacttcaataccctctatatggcttcttgttgtgcatagctatttagatacacgaactctgaatttttacttattgtttatttgttgttagggtaacctattttaataaataatgtcttgttaatgcaaggcaaacaatattcctcaccacaaagcagtttaatttcaaataaaccagaagaaccaagtctggctaaagtactatgccgttcgtgctgtagtcatcatatcatggtagtcccaagccaatggaaagctttgagtgtcaaaatattttgttgatgagatataataatgtatagacatagtatagaatgtggcagtcttgcagatttaagaatctgctattgtaacttccacctctgcactgcactgggtctgtttagacacttctagggagctgaagagtaagagtttgaatctcgtttgcgtggacactggagctgaacacaaagcatcacgtgtcgtggcaccatttgcaggggtcattggcacaattaacacatttttttaaggttattggtgttcttggaagggagagtgatcttaatcttgtgaatctgctcccgtgaatcctccaaaccaaaatagtttagttgctgtataatagattgccttgaaacacttttcatgtataacacctagcaatggtagacttctacttctgaatgggctacaattttggttgtattattttgttccaaagtaaaagtttgggaagatgcaactttttgttacttagaaccaaattacttttcagcagaacttgtgtattttccatgttatcatattactcacagaaacttggcaacaacattgttttgactacatagcattttctacttacaaaatatgaacactttgtgatgatagacatagcctaatgatggtttatatttttcttaacaaaagagaggttacgagtttgaattccgcttccactgtttttttttaaaaaaaaaaaattgaagacactcttagttatgtaagagtggaatatctacagtagttgatatttttatcttgctgaatcaggaaaatatttttacgatcgagtttgttatatttatttaagatcatttataaatttttaaaatattct

SEQ ID NO: 120005 - DNA, 1344 bp, Cannabis sativa
  modified_base (50)..(50): a, c, t, g, unknown or other
agagagagagagagagaagatttttgatcttttgcttatcatttatcttntttcttttaaatctctaatttttctttaacttagtagcattaggaatggacgctaccttttaaatttaaaaaactctattcctattgctatagaaatatcaaattatgcttaaaggaggagagaaaatatatatttatatcttttacttatcatttatttcttcttttaaagctttaaatttaaaagactctcaatttctctaggattaggagattgaactcacctttaagtaagagagctttcaatcaaaatttccacactcctcattcaagctctccatgcccaagcgttagaaaaagccttggaattttatcttcatcaagccttcaagtgtccttcatcctccaaggtagaatttttttttcttattcagtgttaatttttttttgagaaattttcttcttctcctccattgttgatcttgctctaaggattctaaaacttcctgaaacccttgaattcttttttctaagacctgcaaaattccaaaatactttcctagtgaattaaatttcctctattgaaattgcttggattttttcatagcccaataagacttttcttgagttgtaaggaacttgaaatcatggctaggatgaagagaagtagaaggttacctattgaatatgacccccatgtggctcagttcagctaagataattgtgcctatgtctaagaacttagacaaggcacatggttggaaggtgatggaaattgagctttttcaagctgccattgatagtgatgactcgagagattaggctttcaggttaaggcctcttgtgtttagtactcttactgaacatcaatcccaattgattcaggatgattattgtcttcatgaaactgttgttcggaagcaacgatatggtggtccgaatggctcccaaaatacttattgtagtgcttggtcaagattccacatgaatgcgggtgcttacttacctttggatccatggttcatatccatagttgatttcttcgaagtttgcctttactagataaatccaaatgggtataggatacttgctaccttcttcatattttattgcctaaggaactggcctgtctcaactccccatggaatgaacttcttttatgacttgaaaagaagtccaacccgaaaagaagaaggcttgttatatcacttcaccagtttagcccatacatagagaacattactaaaagtaactgcaacatttaccatcaggaatacttctatacccctaactgcaacatttatgagattgagcttcatttactttatcttaaacaacaattaccacattatat

SEQ ID NO: 120006 - DNA, 569 bp, Cannabis sativa
taagagtcattcattccgtgggtgtaaggacccaatagagacttgaagcggggacgttacaattatatctagaaattaataagcaaccaattatgttctattatatatgtgttgaagataggcccttttcactacaataattttgaattatgttagcctattctaataattgatatatacatatatttatacatatagtgccatgtcaaaacaaaaataatgttacaaacttacaatcacttattaataattcacccatcaataaatttgactgtaagagaaaggtacgtaactcaaaatacacatgtacctaatagttaatttatagataactatacgtagtactaacatatttttttgatactaaatatcgcgaaataatactgaattttatttaagtacttatttatacggtttttattaaatcggcaacatatatacatatatgggtgcactcttattaatgggtaatgaataaaattagaaaattttgagtttttatgtttaatttttctatttaattaaaaaaatctctcatttttatatcatatgggctgagattgtttcat

SEQ ID NO: 120007 - DNA, 1421 bp, Cannabis sativa
  modified_base (68)..(77): a, c, t, g, unknown or other
tttttaataatattatattattttctattaattataaataaatatttgggatttttttatttttacannnnnnnnnnattttttttttatatttttacgaacaataatccctatagcaattaaaagaacaacctaaatcccaactgaaatccgtatagcaactcacatagaaatcaccagagcaacttaaactgtaaatttaaaaaaaaaaattaaaatatagtatatggagtaatttttctaaatattttatctattttcaacctacattattataaaaatcacttttttttttacaaaactaactttaacttctacaataaaaaataaatagtttatatttatattaattaatctttaaaataaatattcatttcatatatttttattttttattttataacaatcaacttaagttatgtttaccttttatttatattaggtttatttaataataatatacttaaagtcatgtttactttttagatgtgctgtttggaattaagatgttacagtcaccacattagctagtaaaaataaaaaattcatttgattatacgtggtgatcactattactcgtggtgatcactattatggtatcacaccttcaaactaagggagaccataaatcattccaatccgaagagaaccgattgatttagcttaaatcgaccgtcaaatattaaatatttaattgaattggatcgaatgttgcatgagatatctaaaaatctaattacatctaattaatattttctcttaatttggataagtaaataaattttatgttattatatgtaaaatatatatggatatataaaaattaatattaaaattttactcctgttttttgaattgaatgggttcaatccagtccaataaatattgaattctaaaatattagatgaatttgctccgatctaagaaaaattattaagttcaaaatattagataaactcgaattaaattaataattatacatgaaatacatttaatggatagaacctttcaaatctaacatccaatagatgttggattgattgaatgactgaaattaattaaatctcatattaaacagtaaaatctaacatccaatatataattagatcggatctaaataaacttaaaaatattatatatgtccactgaacacccctacttcacacactttttataatgataactaaatatctcagcaatatcaatatatttttaatctttcactttataatattatttttatatttgatagactagtactaactggtttctattgagaactccaatatatatgggtacattaatgagtatcagtcatgaattggcagtactagaaaaatttgagttttaatacttaattttttttatctaagtagaaaaatcttttatttttatattatatgggctgagattgtttcatc

SEQ ID NO: 120008 - DNA, 3267 bp, Cannabis sativa
  modified_base (2268)..(2276): a, c, t, g, unknown or other
  modified_base (2600)..(2614): a, c, t, g, unknown or other
cagtttgcaagatctttaaccacttaccttaatggttttcaccattgctagaaattcatgaaatttctcaagcatttaaaatttcattattcaaggtataatctagagtgattgactaagaacttaacgataattcatatccacccctgaatgtacatccacatgttcgaatacaaatgatcctacttccaagtggatattaacatattttctctttgcagagactgattttgtcaaaaccactatggaaaagatgcaaatgccatagacatattattatggtttaatgaatcttaggtctagttacaacaaagagttcttagaatagtttaagtggattatggtcacaaaataaaaaaatcataatccatacattaacatacagtttggatccattgttagaaaatagatattaacaacttgtgaaagttataccctagtgttcaatgtattttagaaactaaaattaaatttctatttcgaatctaaaatttaaagtgaaagacttaaatttgtacaaaatattccttgagtagttattctagttttgaccaccactattattttaactctaagtttaatttgcctttagtaagcatatacaagtatgagattctaagatccagaatttatatcattagaggatataatatctagagtgtaatcatttgcgccactcaatttcatagaaaaaataaagtgacatcataagcacatgaattataattcttctttatccaatgatatattatctacgtaatttcttaatgaaaaggtgaagaagaaaacaaaaggattatttcaattataataagaatccaacgatagcacggaaggcgagagtcaaagttattcttattttataaacttttttattgtttcatattgtaaacattagtctaagttgtcattgtagggatgagtcaactaggttttgtatccacaaagacttatctgttgagatctaacactattatgatgtctaacggatgataatcttttggaaattgtcccattaaaaacaacaaaccaagttagaccaacaatgaagactcgaaaattatactacatgattaaaaacagaaaacaacaatgcaaatgcaggttcaatataaattcatacacaaattcaaaaattattaaacatttagcaagtaataaagacatatgaaaatacaaaataattttctctcaaataatttttaaggttttcaactagctgatatgcattgtctcgatatgcgagagtcaaagtatcatcagttgaatagagtagtcaactcatctaaaataaacacaatttgagcaaccatttattcgattaaaataagaatctaatattatcccggtaggcgagagtcaaggttattcttattttatgagctttcaccattattttatacttataaatttaattctaagcagtcaccgtagtgacgagtctaatagaaaaaaaaatttacaaagtactttatgtttcgagatctttacggtattaaatgttcaatgaaagaccatccataaacgggacgaagtctagcgtctcggtgtctcattgaaatactaaccatgtaagaccaacaatggagatcacatgttcttaaattaaagctcattattttaaagaattgtattttcatttgatatacatttcaatctatttattttaacattcatatatttatttaattaaaattactaatttagataaatctaaatataaattttaatttaatatttataaagttatatacttaggtagatctgaaaataaataaaaaaattattttccatccttagtattaatttttaataaatatcatgaaaattacttaatttaagtttctctaaaattaattaagattaattttcaaatcaaatttaattttctataaatatatgtatgactaaattcaaattccgttgtattggaaaattaaatacatttttgaatttattaaaataaaaaaataaatcttgaaaaaattattgtaattcatgttggtctaaaattaatttttatcatcaatgtaattttcttgtttaattaagaaaaatgtctaatatttatatgtcttgaacaaatcaagttaaatattaattttctatttaattaactacatctagaaatataccaaaagtctacttagaaaataactatctagatattttataaactattattgattttctaattaaaatataatatattttaatctatttatttaaacaaatcatttataaaaatttacttgatttaagttgatnnnnnnnnnattaataaattaatttttaactttgatctaatttttaaaattaaaaattttgaaaaatccacatttaaaataaatgtatttcaaattttcaattaaatttattaaaataaaataaaatatattctaataattattctaatttaggttgatttgaaattaaagttttcaacttaaaaataatttttaatttaattaaatttattaaaattgaaacaaataattaagtatcttgaataaaatcaacttaattattaattataatttaagttctaagaaaaatattctaattttagttggtgtaaaattaattaataaattaatttnnnnnnnnnnnnnnnttttctacttaattaaatattagagaatataaattagttactagaatttactatcaagaattttgtttattgaactaaatgtgtttattaaaattaattttaagggtcacaactcaatggttaaattttcgtaactatgatggttacatttttgttgacctgtaacaacaggttttccaaatggaaaaattcccttttagaattaaattaactttaattaactattttcttaaaataattaatttttaatttaaatatttaataagacccttttaagtaattattattaataatttttattttcatatttaagtcttcattatatttttttaacaattaagtcattttattataatatttacaataaaactctattattttataaaaattaaacttccaccccttctttttaagttatcgagaacacatgttcaatatctataaccaataacaattaataactttcaaatttgctcagggaaggaagggcctttcactgtctcctttgaatgatggggagcggaactgtgagcatttgattgtacctgcgttaaacaagattaaagttaatgttgatggggctttatttgaacaagagaggcgatttggagtgggctgtgtagctcgacatcatcatggaaccatggtagaag

SEQ ID NO: 120009 - DNA, 761 bp, Cannabis sativa
  modified_base (710)..(728): a, c, t, g, unknown or other
gagagactatttaaaacacgatcagcctcaagagaggattgcgctaaacaatgcgcaaccctattagcatatcgcttcacaaaactcaaaaagatattaccaatctcgacaaacaacgcaccttacattttgaaataatatggccataaagagaagccatatttttattactttgaatatcagctataacccttagacagtctgattcaagaatgaccgcactccattcattagcttttatccaactcaatgcttcttttatcctgatggcctcaacctcatgcggctgtaacgaacccattttgatcaacgttgttgcttggataaccaagccatcagcaggacgagccaccagccccactccaaatcgctcctttgtggaaaaatcacttcgtcgacatttactttgataaagggaaagctaggaggagaccatttctctggccaaaccgtttggtgcgcactatgaggctcaattttgaactgttgagcattacatcagtccatataatttacttttgcaacgtgaataacatcatctgtcgagtgagaaattgagctccaaacaacatcgttcctcaacttccctacagaccaaagaatcatggcaacttccacacattcagcatcactccattggaccatccagggacagacctactactatcaatgtggggggctatagccccactaacaaaaatattgccttnnnnnnnnnnnnnnnnnnnttttttaatttgataattataaaccaaaataat

SEQ ID NO: 120010 - DNA, 1217 bp, Cannabis sativa
  modified_base (1177)..(1188): a, c, t, g, unknown or other
tttttttttcttaattaatatcttagacttcaatcagacccggacccaaatctcccccatgaccctggcgctgaacccgacatctgatttgaacccgaattcgaccctgaacttagacccgacgtaaataatcaaaaaatataaatgaaaataaatttaacagaacacactattttgttttctgtttttataattgaaaaacaaaaatggttgcagaacgcatttttatttttcaaaaacaaaatttttaaaaataaaaattttacttttgttttctaattggcacctaagttttgagtttacatttattttaaagtttattgacattgttaattaaaacataaatgtaaggtttttatcaataataggctgttagatttgaaaaaaaaatgtgaaaaaattagaaaatgaaaaaattacaaataaaactcaattaggatgccatgtcatcttgcttagcaagagaattatatagatagatagatatatatattgatattgattagtgaatatatataaatgatagaaatgatagattttgattttagaatgttataggtcaatttttgtaattttttagtataaaaaagaaataaaaaatagaaagtttattttttttatctatatattatgattgatataataaataagattgaagatgatatatgaagggatatattattgttgtaaaaataaaaattattagcaataagcatatagtattggtatgatacatatatgacttttggtctacatgtagagagatacaaaattattaaaatattagaaaaagagaaaaataggtattgaagataataagaatcttaggcatgccacataaattctctaaaacattcctttttatatatatatactagaaaataaagtcgcgcttcatgcgtttttgaagcataatttaaatatatatatatttaatatcatatttatttaattaattataatattttaaattatatatttatatatagaaaattatagttatttaagacatcctgcaaaattttaaaaaaatcaaaaaaatttaacacggtaaaaactgcgtttaaacagtgtgttgcatgcacgtgtgactattttattttatacgcgtataaaacagtattgattaaacattattttttatattgtaaattattctaaatttcttaaaattttnnnnnnnnnnnnagggtcggccctaagcataggcgggctag

SEQ ID NO: 120011 - DNA, 642 bp, Cannabis sativa
aaaaattattaatttttttatgtgtcaaaagacaatataaataataaataatctagaagggtcattttgctaacagttttgaaatgaggacatttactaatatacttttataattttgggtcatttactataatttttcgattttctaataataattgagtagagtgaattaaaacatgtgtaagccaataatgtgaggaagactctaacttcatcaacatgatcaaaaggctttttttgtaaattaattgatggaggtcaaagattttgacacttttatatgaattggaaaaaaaagtattggtaatatttattataatttaggtagttttgcggaaaaaaaaatatttgaagaagaaaactctagaaaggccataaatttataaaaagaaaagaaaaaaaaatatattatgccaattccggcaataatgccaatttcgataactttttcagtgctggcagcaactctggtgactttctcggtgccagcagcaactccggcaactatgtcaattctaatgacttatttcagttaactttactgtttagcacttatatttcgttatgatttttcatagtgtcgaatctggtttcacagggttcataagttcgaaactggttttacaggttttaagggttctg

SEQ ID NO: 120012 - DNA, 1199 bp, Cannabis sativa
tatatatttttgaagggcatatttgtctttttttatttttaattaataaaaatgtaattaatataaagtaagttaaggaaagggaaaggtatttcttatgaaaatggagagagaacctttctctttgttgtgtgggccccactagttcctcccattccaaaatttagtaaacaaatgaatgggaatcaatctcatacaattgattcctattctcctttagtaaacatgtggtattatccatttaacacagttaagtactgaattgcttatgtgtatatttttgtacacgtgtcacatttatattgattcacctaatattattatttaaacattataaagattacttcaaaattcattttaaattaaaccaaaaatcataattaaactcataacccaaaacaccccctcatcttcctcaaacccaccaccatcgaaaccaccatcaccaccatgaccaacacccaccacctcaaatcacacaaaaaaaaaaacaaaaatacaacaaatttaaacaacaatatcataattgaaacaagaacatagatctaaaatcttccaaatatttcaggaaagaatacccaaaataattttaattatagttgtttattgttaaaatctttcacattaatcgttcgtctctcactaggaccccgtcgcgaaacccctatcgagaagttttccttgccattgaagctcaccacctcttgcgaagaggacatgaacagagaagaagatggcacccgcaagccacccttcatcagatctgaccgccgctaatgagcgtctcctctacgacgacaagtttggagtattggtcctttctccgatgatgatgctcaaagggcgcatcctctctctctctctctaacgacgatgagctcaaatttttggttctctctccgtcctagattcatgccaatcctagcccaaatcagagagatctcaatccagatttgatagaactcatcctagatctgtctaatgcatttccaaatccaactgcctttgcccgaaatttcaacacccctgttacaaatagaagaagaagaagagaagaagaagaagaagaagaattaaatatgataaattttctttgtaagagaagaagaagagaagtaggagaagaattttgggttggtctctgttcttagtttttttttagatgtctgttatgttcttaaatttagggtttcgtttat

SEQ ID NO: 120013 - DNA, 661 bp, Cannabis sativa
aatatagtaatttacataaatttctcaattaaaagttatgggaagagaaaaaaacttgggagtcttgccccctcctaagacatgttctaatactattttttgtgatgtgcgacgtaataatatttctcaaatataaataaatatatataaaaaaacacttgtaataataagtaacgacaatcttaattcaacaattttgagataaaaaatatttcaaaattaataatcaaaaatcatgtcaagaaagtattatatcaattaatactctgtttttctttttggtattattgtattatttcattgatgattacttaattttaccaactaattaattataattagtcagccaactatgacaattgaccactacataatcacaccaaaacttaggctcatatactattactattaattattaacaccataaacttttatcaattattttattctgcatatgataaatatatatttgtaatttgtattttttttttcttatattctgaaaaaaaaaatacataaagcaaattttgaatattaagacaaaaaaataaaaaatatattaatttttggtgtaaaattgtcttaaaattgatatataatatatatatatatatggatatgattttgtctcgtgatgtactttcacggaatgtactccgtg

SEQ ID NO: 120014 - DNA, 3780 bp, Cannabis sativa
  modified_base (2736)..(2736): a, c, t, g, unknown or other
gtaatgggttttatttagggcacaaaaacccaacaataatttcaaaatctaagtcacttggtgaaaaagttacagtgactggaggtaaaaacattgacctcgctaagggaatatcaattaaatttaggggttcaggccaagctgcttctctcaaaaagtggcacataccctcaattatctcttgtaagaatcgcctataacgactagaggtttcatcttgtctggttttaatgagatgatccctaattttctcatcatttacttcaataatggtttgaggtatatgagttttcggtctaaattttatggcaaaaatttgaggacaaatttattctaaggattttgggatcgtaatttctgggataaattgggacataattatgactaataatatcccaatttttggaaaaacaaaattcaaatacaacccaaaaaatctacgaattgtataatctaaaatttcctaaccctagagttattcagacaaacaaaatcaaaattacccaaacaacatagcaatgcagataaagaaatattaactaaggagaagaaattatgaggacagaaggaaaaataaataagaaaagagagtgtatcacttactgtcttgacaaaaaattttgggcagaggaaaacttcgcaatggaaacatcaaaggttgtaaaactgggtcttgatgatttctagaacgggaagtatgatttgacaaaatgtgcagaaaaaatgtaggagataacaagggcatgcaagtttggggagaaggtggttgggattttggcaaaaagcttgaaggtttgatagctaaaaatggcgaaagtgatgtggagtttcaattttatacctaataggtgatcaccgttcgatcaaaggaaatctgactaatgggtgggaactttacaagaatggaacagtagaacattaaatgaacaatgatgtgcctcgaagttttgaaccgtccaaattctaagcatacaatttttaaacgagaaaaatacgtttatacccctagagacatttaaaaagttctttttaattaaaaagcactttctaggagacaattgttatcccaaaatttgactattcaccaaaagttgacacatgtcctacaaaaggaatatgaatcagttcaaagaacataataattaaattgtattattaaatgtgatttaaataactcgttctagttcatcaaagttgatagaaatattcaaactcgctaactacatgagcatacgcgcaataagaataataactattgacaaatatggttgatgagacaatatgttcacctcgggataaacagattatacaataagaaagtacaagatgagacgttaaaaaacttacaactcattgactcacgtaattgtacatggagaagattacattcatctatcttgccatttacgctacctcgcaaataactttacgatatgaagaatagtgtgagaagaagaatatctatacttagcattgtttcctataaagacggataagaaggataactcacattcaccgagaaacaactttcttagtcagcgtaaccgtttaaagagacaaagagcagttgggtagttattagatattatcccatgtgcatataattgaaacgtggggaatgtccacgtttcatgagcagttgtaagtgaatagatctcaataaaaataactagcatcctatacacttataaatagggatagaatccatggaaaaaatgaggatgacatattaaagaaaaaatactattattaaattttattgtactctgtattcaaataaatatccctaataagaaggactagtggattatgtagattttaattacaaaaccacgtaaaatatctcgtattcatttattatttttatttaattttgtagtaaatttattacgtgaaaggctatatatttagttaacgaaaatctgcattaacattattgatccacatatttgcacgtggagagaataactacattcatccatctcgccctctatatgtagaagtaaccacctcgctaataccatcatggtaaaagaagactgcgatgagcattatatctatacttagtatttttcatacaaagatgataaagaaggataactcatacttatcgagaaacaaccttcataagtcagcataaccgtttaaggataaagacaaaaagacggttgggtggttattaaatattatcccatgtgcataaaaataaaatgtgaggaatgtctacgtttcatggacagctatgaatgattagatcctaaggaaaaataactgtcaccctatacaccaataaatagggacagaatccaaggtaaaagggacaacaaatttgagagaaaaaactatcttttacattgattgagaaaattgtactctgtatccagattatcatccgtaataataagaactcgtggagtatgtagattttaactacaaaaccacgtaaaaatatctggtgttcatttattgttattatcaattatgtagtatatttattacgtaaaaggcttatatatttagttaacaaaaatttgcgttaacaatatataataaaatataaactagttaaatatgatttaaaataaataatatatgatacaattaaaatatataaaataataattaaatatatgtagtatgtcaataaaattatatacatatattaaactgtttgtattacactaacaaaaatatatactactattatacataacaaaataaaaaataaatatcatntaagaataataatataccatacaacaaaatagaaatatactgtacaacaaattctatataccaacatcccacaacaatctataaaagtttaaaaaaatcgacataactttaaaatgaaaaagattttaacaaaattaatatagatatactataatctttgagtaatttgcttctcaatctaaaaaaatatgaaaaaaattattgatttttttatgttagaagataatataaataataaatagtgtaaaataattatttttcttacaaattttaaaatgaaaatatttacttacacaataatataatttgggttcatttgctataaattctcgttcaaaaactcaaaattggtagaatattaaatgaaggaaaaaaaaaactcaattaatatgaaattttttaactttgtacagcatatttataataaatgcctgctcggatgataaatgtaacaaagtaatatattttagtataatttgtaaaaacctcttttattctttctttattttggggagctgggtctgagtcggatagattttggttgtcactgccaacctatcagaataattgtgatattttctcttgcatatttgtcatattctgctttgaaaatatggagtttttaggtgaccaaatcaactatgctattaaattcattgggtttagttgtttcaatatatttgattacagttactaatatatttagttcaaatgatacatattagccccaatgttttaccactctctaatactccttttggcttatgaaaaaattggtattatacacattatgttctttgttattgttactggttgtgaacaggaagaaggctctcgaagatgctggtttttggtggtgaaaagctctccaatgtcaactttattttttcattttttatttatttacattcagtatttgaaaatcttggatctgtttatttgttttagagctcgtttggtacgttgtattagatcgtattgtattgtattgtattaaattggattatatatcatattttcatataatactaagttaaactttaa

SEQ ID NO: 120015 - DNA, 653 bp, Cannabis sativa
aattctaatatggtatcagcagaataccttgccccttcatccatggcacagccctccacacgctcacaagatggtcttcctccatccacaaatgagcacaatcctttggatctccatcccgaagctacttccgcaccagtagccaacaactccatggctccacaacgtattccaacttcaagatccagatctaacaatgaagaagacaactctgcaccagtccgttcttctccagaccatccaaatcacaacaactctgaacctgctgtagctacacgaagattgactccgcttgatcgattagctcacgacgacctctccagtccattctttctcagcacaatagatcatccagggctcattttggtctcgacagtcctcaatggtgccaattaccagtcttggaaaagaggcatcacaatggccttaactgcaaagaacaaatctgccttcattgatggttctctccctcgacctgtgattggtaacccccttcttaattcttggaatcgttgtaataacatggttatgtcttggctcatcaactctgtctcatctgaaattgcacagagcatcatgtatttcgatcttgccacggatatgtggcatgatcttcaagaaagattcaatgagggcaatggacctcgaatctt

SEQ ID NO: 120016 - DNA, 775 bp, Cannabis sativa
taataataataatagtagtagtagacaaggttatacgctgcagattgattattctctcaccaattacattttttttaagtaaacttcacgtccagcaagatgcggtatttaaaattaataaaaataataattatttaattaaatttttaatatatgacgtccttctattctattaagtctaatattgttggacataatacaaattttttttctaatctagtaatcctggacacaaaatttcttcaaaaagatttcatctccaacaccatttttgttggacatgaaaaagaaacatggaaagggttatttgtagtagtgccggtatggttgccgcagataccaccatgcacctcacggaggatatatagtcacatattcatccccgtcaatgcatttgagcagtggttggatgaagcttctgcgataaagtcttccattataaatggcatatcgagcagctcgatatcgcagttttcttgcttctattttgtcttcaggcaagatctccttttccaattaattcactatgggagtcttcacggattagtaccgagctatgggagtcttccatcgtaaaatttagtttttctaaaaaattgaattttaaatatattattttttatatctaaatgaattttttaataaaaaataaataactttttaaatcgatgaattagttttaatattttaattttttttaataattcaaaatattttttttcttaagatctaaattaattttctaagatttactaaaaaaaagtgttaaatcttt

SEQ ID NO: 120017 - DNA, 1562 bp, Cannabis sativa
accaagatcctgaactttatgggtgtcaccaggaatgatctggtgacctgtgccacatttcaattctaagagggcgctctcgtgtggtgggagttggtatcctcacctgagacgtcacaaaaatgacttgggaatagtttcgggaattatttaatcctaagtattataatgaggcaatcagtagtgccaagcggaaagagtttactgactttgtttagggagaaattatgtcggtattgttgggaattttaagaaggacttccctctgacaaatagagaagaatagaagcaacatgcaaagcacaaagctgctcgggtgtttgctattactcaagctaatgctgcgctagaccttttgagttaacaggtcaactttttatttatgactcctattttactgtactatttgactctggggctacacactcatatatggcatcgagagtaattaatcaattggataggccttatgatttcattgagatagggtttggaactttacttcctagtggagaattagttatctccataaggttgattaggtctatcccagttaggacttaaaatagggagtggagttttacttagtaaagttggaactaacagagtttgatattatacttgggatggattttctctccaatgtattcagccagcattaactgcaaacagaagatggcaactttctaaccggagggcaaatatcattttgtttatgtcagatctattcaaggttcttagatcttgattgtctcagttttaaaatctaaggatttattacacagtggatgtgttggatttttagtgtttgtcattgactccaataaacctgaaacattttggcccaagatgtcagagttgtaagagagtttcttgatgtatttcttgaggaattatcgagattactgccacaatgagagatagattttataatttttctggcacctgggcataacctgtatctaaggcaccatactggatggctccagcagaacataaggaactaaaaatacaacttcaggggatgttggatttagagtttagccgacccagtgtatcaccctagggagctctagttttgtttgtgaaaaagaacgatggatcccttcaaatgtgtattgattattggcaactgaataagctaatgatcaagcataagtatcaattaccagaattgatgatttgttcgatcagcttcagggtaagactatgttctccaagattgacctgcatttgggttatcatcatttaagaatttgggagaaagacattccaaagacgacctttcggactaggtatggtcattatgagttcttagtgaagtcattcgggttggcaaatgctccaacaacctttatgaatctattcaatagattgttcaaggatttccttgatatctgtgttatagtgtttatgggtgacatccttatatactcccagacgaaagaggagcatgagcaacatctctgaatttctttacaatgactaaaggatcataagttgtatgcaaagtttaaaaaatgtgaattgttgtaatgccccaatattttgccttattttac

SEQ ID NO: 120018 - DNA, 1207 bp, Cannabis sativa
catacctctactttagactcatgtcatgtaatttatacactattatttaagactagatctttgtacactccaaatgcccttagtagtcgctgacatcgaagaaggaatattaacaacaccaaaacaagaaccaaccaaatatttgctagataaaaccattgttcacaggttgtcatgcttagaggccatcaaccatcccagtttcacaatttgagagtcattaatatcaacaaatcgttgtattcctaacccaccacatgactttggtttgcaaacattatctcatgccacaagagagaggtaactaccaccctatacactcccagtccaccaaaacttctaaccttttcattcaaatcacttagaaccctaatgagaaatttaaaaatggacatcatgtaaataggctctgcttgcacaacacttttaatcaacatcgttctcactgcttgggagagaagtttagccttccaacccccctttttcttagtgacaatatcaacaacaaatttgaaatcttagtagcttagacaaaagggtttccaagaaatagctcatcttgctccatcacatagtagcctagatgactcaagatagggtccttaccttctttctagagtgttttgtagaaatagcttttatgaatttttttgttaccaaaataactttacaaaaaaaaattattagcaaaataactttatatggtcaccaaaacgaccatgaattacactgtgcgactataaaatgaccattatggtcgcaaacgactatagacttatggttgcattgagtaaattaagtgaggtcaattttgcaaattttagtacattgttagagcatctccaatagagattgcctataaagttgtttttgccacatgaaatgtagtcatcatttaaatgtaattttatcaacactattatttatatttggtaacaattatgtagtattattttattttttatttttaaaaaaattacttcatagtattattttatagcatttaataaaatttaatcatttaaatagtgatatgtgagatcagtggacaacttttagagttattaaccattagaattgtataaaaaattattaaatattatatcgatgagaaaaaaaatatagggtaattctacaatgcacccccttaaaatggatgtattgatgcaccctctacttgtttcggtatccagaaaaattttttagt

SEQ ID NO: 120019 - DNA, 1236 bp, Cannabis sativa
tttattttattaaattataaaaaaaaataaaaaatggatggaatgcctaaactattatttggtcattctagtataatgtagactaaaaataatttaaaaaactataatatagattctcatataaaattaaaaaaatattatttaaaattttttattttgtaaaaattattaattgaattttttattttattaaatgataaattagatattatattttctcaaatagtataaaataatattttaatctcaattttcatcatttatatatataattaacctcagtttttagtatgaatagttttaaaaaaaaaattaattaatttgatcttaacacgtcattatcaagttaatattattaaatttttaatttgacaaaaattaaattcatggtacaattttattctttttttttcttaaaaaaaatatagaatttgatttaataaaacagaatattcaatcaatattttttgcaaatatttacactataaaataaagagtaataatgttcaagaaaaatacaaaggtgtgactagttacttaaatgtgtgttaattttatataatttatgtgtgcacatatataattataaatttataattattttcaaaaaatatatatgtacgtacatgtatatgtgttatattttccacaaaccctcttcctatgattagatatgagtaccatctaccaaataggaatagggacgggctggccatgatgtatttgttttattgtaattgcaatatggatgattatatttatatattcgatagatgatggatccattaaaggcaatgcccaccaccttacgccctcatctattccaccttagcttttaaagtcactctgacaaaccatgggaagtaattgttacattattttatgggcaaattgtggcataaatacttaatatttcagattttatacacttaaatatcttatttttattgtcgaaggtaaaaatacccaacgttacaattctcttagatctgttattaccacttccgttaactcataaatatggacacctgaaaggttcagatgcattattttttttattattttaaaatttaatattcttaatatcagaactaaatatcacttgtttaaaaaaaaaatcagttttcataataattttcacatgatattgtcacttcaattcgataatcatgtgtcatatactgcactggttcactcagttatggtaatttagtataacatctctcttaacttttt

SEQ ID NO: 120020 - DNA, 1566 bp, Cannabis sativa
ctatgcttcccgagcagatgctccaagtggattctacgtgtcaccagtgcaaaaattgggataacaaaacccaaacttcatctatctccctctcttcctcttttttcgtctctctccctctctcgttcatctcgttctggttcgagatgccaccattggtccaactggaggccatggatggccttgctgctcttaaatccaaatttccatcttcgtcatcatcaccatccaaacaatactgatcaaatcgccttagagtcgctggccacgtcactggggtggcggaggagaaggtggaatggtggtcctttcaaggcctcggagttcgcagaaggctggaccaaagctttctgctccacccccttgaaccttccttcattgcaaggaacatgaaaaatttggttctttgggctctagtggtgggccgactggagattttatggtaggatttcaaaataataaataaaataatgaaaatatatatagatttatatatatatgatgagaaataggagattttctactattggatttttggcattctttctcctattctactttccccatccagcttctcacaaatattggggatggatttgatttaatttttttgtttgttgttatggaacttggtaggtttgatttatatcttggcatgtttgggtttgtttgattatgttgttgtgcttgagttagggtggagtttgcgatagttgtggttgttttagatttaaaaaagaggttacagtggtggttgtggtggacatttgtggtggatggtggcggtgtcgcatccgtggtggtgatgaatggtgaagaaaaaaaaatgcattcagaaaaataaagattaaggaggaagagaaaaaaaaaattatgatttttttaattaatagttttttttaataactgaaaagaaaaaaaaatgaaaaaaaaaatgttttttttttaatttataatttttttaatttcaaattaattatgttttaatttttctatatacttttttacataaaccaataaaattgtgacatgtgaacattgtgtccacgtagatatacacgcagacagtccaacatgacacttagcacctaaaatgtatggaaatattatattgctagcaaaacgtgagtattgagagttttaccgtcaaaaattaagttttggggttaaatgcaagcaaaataaaaatattgaaggttttgccgcaattaacccttataaaaaagaatcttaaaaaaaatttaaaaattataatataccttttaataataatgtaataaaacactaatcataagataacaatgtatttatactaataatttatttactggtgactattcaatggttatatttttatggtaaccatcatggttacattttttttctatctgtaatagcaggttactaataggtaaatattcatattttagaattaattaattaatattaactattttcttaaaataattaattaaatatttaacaagacttcttttagcaattaatatttatgaataattttttttatttatatttaaatcgttattctaattattttaacaatta

SEQ ID NO: 120021 - DNA, 2209 bp, Cannabis sativa
  modified_base (1691)..(1712): a, c, t, g, unknown or other
  modified_base (1928)..(1938): a, c, t, g, unknown or other
aaaaaattacattatttattcataccaaaaccatgtatatatattaagtagtataatatacattattcacgatggttaatgttttttttttcaactgtgtgaaaagtggttgcttttcaaccataatggtaatttttgaaggcatatatatatatttaatcatatatttaatgtattattcaaaaaaaaaatcatatatttaatgtaatgttcattttttttttcttgttcatacatctaagaaaacttagaaataaaatttcatcatgttgataaataaaagggtataataggaagaaggattattgtctttaataagaatctttgggtgaagcattcaattacgaatgagatacaacctcaacaaattgattaaaagataaggttagtgcaaagaagattgtatgtagggtaaactgtatgcagggtaagttatatattcagctcctataaaagcaaggttgagaggatatataaaggacatcagaagcaaagaagagtttctctctaataatcccagttttcatcattactccatatactcttcccttacacacaaccatcccgtctcatcaattctcttcttacacacaaccattacatctcataaaaactctttcatgcacgtccatctcgttcttaataactctctaattaatcacacctttaccattcgttaggttgcctatttaacaagcttctataaaaattaagctgcttatttcatcactttttataaaaaccaagttgcttatttcataacctttcatgaaaattaagctgcatttcataaccttccatgaaaaccagactgcttatttcataacttctatgaaaaccatttaagctgcttatttcataaccatccacgaaaactaagctacctatttcataactttttatgaaaactaaactgctcacaccactttccaacacatcagctcaccaaggttcttctacgaatcataagttcttctattcacgatcatttctttcttcttacaaacacagttatatggtctaatacacctcatttatctacaaaatacatacaaaaaatcaacctaatcttggtcaccacatatgcccaggattgatcatttttgtaagaagatagatatcatttgctcttgatctttataatatttcacactaataaagatgcacaactgactgtttgctaccgtagatgtaggcaaatataatttgcttaactatgtaaatttgtgtcttattttatttaaagcaataaatatatatgatatatgtgtatatttaaagtaacatatatcaatattattaaatgtttggctagaactcctgaacattttagcgactctgcttgtacattaaggtgttgagattaattgaaatgcacttttaattttatattagtacaagtgggagtttgttggaattttatgctctaaataaaacctatttcaatataattagatttactaattaataattaaaagatcaaaattcattttatgttgcatggttcacatgatttctttcataattatacgttaaatgtataaattctattaaatccagaacaaatagttatttatgattatagtgttgtcaacagagtggaaaataatcatgattatacgatttaaagtttaagtctcatgatttgtcaatacactggattcacactaacatgataatcagcgataaannnnnnnnnnnnnnnnnnnnnntgttatgttctttccagggcattgtcaaagtatgctagtattggatgtatgtagtacacatcggactggaccgatattgacattgaataagatatcataaacttatcgttttatcttttgaagtcaatatcacttagttgatcttaggttaatagatcttaatcctgagatagataggttctggcttaaagatattatttgtgttctttgacttgnnnnnnnnnnntgaccaattggatcggcccaatgcatatatcttaggaacatggtagtacaactaagtgggagcgctaatcatagatatgaaatctatagcttctttaacttctagaagtgaaacaataatttccttcgagtttgacttaacacgataaataattgaagccacattttagtaattatattagtttactgaaatattatttacaaatagctaagttttttaaggataaaatacattgaagggtagaacggtaacttgttaggttatttttagt

SEQ ID NO: 120022 - DNA, 2466 bp, Cannabis sativa
  modified_base (66)..(81): a, c, t, g, unknown or other
taagttctaaacttcaagctctagactcttaagttctaaagcactaactctctctctctctctctnnnnnnnnnnnnnnnnctctctctctctatctctcttctacacgcccctaacaatgtaggaaagactaaatctccctcatctcatctacttgagattgtaatcttaagagagccactccagaatccacaacacttgtgatctgagtggtattatctctaatatcaatacaagtaaaatgggagtaggtcattacctgctaactaagggggccaaacctctataaaaatattgtgtcattttcgctagttttaattgtgtacacgtggtgatatcagttataaatacaactccgttatctgttggccaaatctaaggtcaacaatttagtactttcattgagagtgttgtctactgatttgatctatcaccatggttaacacaaggagaactctggctgcaacttctgcctcatcgggtcttcctcaagaccctatgacaactgatcccaatgttcgtgttccagccaccactgtaatttccacaaacttaatggatgtaggcaatcctgctaacccagcaggcccaaaaaaactcaaccaacacaactgctccagtcgaccctaccaacctaacttatctcaatggccaggctctgccggtcagggaagatctgccattggaacgttttttcaatgtggagcaacccctgggcaccacaataactgactctggttctcggtattatgctggggaaatagggcgatgaatcggtgaaccattaattggtgagccacatgtggacttgggagaagactttgaattgaccagacttaaagaggttgcatgccaaaaaacttggtaagcaataatataattacaatttagacatacaataattatatataaataaaaatatatatagtttatatatttatttatgtagaattaataattttattctaaattgtaacacatatataaatattatatttactcaacatgattttattatgccatagtattaaggtttgtttattattattattgttacatttatatttttttggtgttttatttttttttctagtgtaccactatttagttttgatctctcaattagaatagaatttacttggtctcaagtaggggtgttcatccaacccaatctgcactattttgttcatagtgcgtccgattcgcactaatgagaattttatattttggatccaatccaatcaacatagtaactcaaatccaattcaatcaaatccgtaaaaataccaagaaaccagtttcaagatgaagaaatcagtttttttgtgatttttttagtgattgttccggcgacaatgctaatttcgatgacttttccggtgccgacagcaactccaataacttttctaaccccagcagctacttcgacgacttttccggcaccgacaacaaacttcagcaacttttctgacaccggagctacttcgatgacttttccggcacggacagcaaacttcggcgacttttcggttccgatagcaaacttcggcgactttccagttccagtgacaactccgacgatcattgtagttttatttgtttttttttttagaaaaaaatatgaaggaaagtttaatattttttatggtaatctgaagtggcatattccatatacgttaagtttttattttaaatgttatatttttttctattaaatttgtttactatatttatgtaaattagctttatttttttttttatatttatgtaaatatccttaataataatatatatatattttttttttaaaaaaagtactaattcagaaaagaaaaaaaagaaaaaaatgaataaaaatttacggaaatgttattttttgttttaaaaagtggtattaccaaaaagtttaaaatgtataaaataattgtcacagccgaacaacaattaatgttctagtctattatctattacaaaaaaaaaaaaaaacgaaaaaaaaacaaaacaaaacaataagtaaaaattgaactggctgttatataaataatatatatgaatgattacttcgtcacattgcataagcggaacaagttccggctgtgtaatgggggtgactgaatcgttacccatatactatatatgcgtgtcttatatatatacatagaaaataattatttttacatatttaatctcacaatatatatgtatattatattatatctcatcatatacataatacacataatctcatattcatactatacattatatatctcatatacatatacatataataacatgatataaattcaaatttcatattatatactactatatattaatatgatagaaacacataattgttagacatttatatgtataaactgaaatatatatgtttatgtataaagtgcggaattaaatcaaacatatatatactatgaataaggatcgaaatacctcaagcca

SEQ ID NO: 120023 - DNA, 1377 bp, Cannabis sativa
gttgttttagactggctgtgtctgctgtattttgaattgtgttttgaattgttgttgtatattgtcgtttggataaatcttttataacagggatccccggaaatcctttttacagccgttataatctccgttcttagtgttgttttagtcaagtttttattatcctcacaatttttaataattaattaatatattagtattaaactagttttagaaaatcacacacgtggcgttcctatggattagggcgttacataccccccggaggagcaatcccccaacaagtccctggatgacctaatggaagagtggacgtgatctctggtggaccccatataggagggaccaccagaaaagagttgaagcattatgctggggccataaaacacgatgaaatatgggaagttacccagctctcagcacaaagacctcggctcatggaccagcccattactttcacagaagaagaagccaagctggtgcgtttccctcaccatcgccaataaaattgtagcaagaatattggtcgataataggagttccgtgaacctgttgtttaaagaagccttcacaaccataggcctcacggacagggatttgtcacccagcggctcctagctcacatgattcaatgggacaacacttaacccaatgggaaaagtgagactaccggtcaccctatgcccggatactcctcagagtacttttaagtactacacctttgtcgtggtggattgccccactgcatacaatgctatccttggtcggccggctttggttgattttggagcaatcctctccatccaactcttatgccttaaattccctactcatgaagctggagtggggacggtgaggggaaatcaaggagaggcaagcaatgctacaatgttgcaacacacttgccggtactagtagtccgtgagggcagtgaagcaccattaattgaagatgagttggatccccgcgtgggatccgagaaaaccgtagaacatgtggagtacaacatgtggagtacaccgatgaagtgcaagtgtgcgacctcgaatccaccaacatcctctgtctaggaaaaaacctagagctggaggaaagaaacaaaattattgaagcactaaaggcggccatagttgttttcgcgtggtgtaagggggatatgaccggcataagcccttacatgattaccgatgtcctcaacgttaaccctggcatgccgccagtacagtagaagcagcgtccccttgatctagtaaaagcaaacgccctggaaaaagaggtagacaagttgttgactaacgtcctgatccgggacgtgtactacccataatggctagctaatccggtattgatgccaaagccaaatgggacatggcgggt

SEQ ID NO: 120024 - DNA, 1434 bp, Cannabis sativa
ttataagggtttggcattttgtaggataggagtaggtatcatgttaataaggtacaccattgttctaaatgcttcatcccaaaattctaatagacaagatgcttgagctaagagagttaagcctgtctcaacaatatatttatgttttctctctaccaccccattttgttcatatgtatggggacgagctagctcatgaactattcctgatgtttcaagtaaatgaatgaaagctctgaactcaccaccctaatcaaactataagtcttgatggaacaccctaactgtaattcaacttgtgctttaaacttagtgaatttaggtaaatcgtcatctctagttcttaacatatagatctaggtatacccagaataggcgtctacaaagcttatatagtatctatacccattagataaattaataggagcagagcccataagtctgaatgtaatagttccaggggtgaagtataattggtagtagaattaggaaacaacaatttatgatcttgtccaagacatcatgtagtgcaaacataaaaaaaaatctttatttgagattaaatattacaattggagagagccatttttacaattttggccatatgatggctaagcatattatgccatagagaaaaaatggaatttggtacaggcaattgattatgaagaagtgaagattctgagatgacaaactcaatgtagaagctggtggaacaaaagctggactgggagacaaatggatgagatgggttgaatcaaacttgtacaagcctttgtcaagcttcccaaccgataaaatcttcttggttacctgatccttgagacaacagaagaaaggatgaaactcaaagaagaaattgttatcttggaaaagttgggagacactcaataggtttttagtgataaaggaaacatgtaataggtttttaagagtgagttttttagattgaaaaggtggaagaaaggaagagttactgatattttcaatgaaaagccttgtgccattcctacaaagatctattcttggcctgagtaagagttgctagcatcaagatctgagctattaggcgtgagatggtgagtagccctagagtcaagataccaactttcatcagagaccgattcaagagaggcttaacaagcttgcatttcatccatatttgtagttagcagtaggggtattcataaaatagtcaattcaatccgcacgatccaatccaatctaatatgcaaagtgcggatatctgcacttgtacggattggattggattgaagattggattggattgaaaaattcagaatccgcacttgtgcggatagaatccgcacttgtgcggattggatgttgattgacatgtaaatgtaaccgatacaatccaatctacacaaatttataaaaaaaattaaaaaattatatatacaattaacattt

SEQ ID NO: 120025 - DNA, 684 bp, Cannabis sativa
gttttttatttttatggcagccatcggttatgtaaaacgacgtgtcgtttttcacactgcagaaaatgacgtgtcattttttttcattgtgggcaatcgtcgttcatatattgtttaatcagtcttctcctcatgtaaaacaatgtgttgttttgcctatagcaaaaacgacatgtcatttaaggtagtaaatttttttttttcaaaaaaaaaaatgaaaattaagaaaaatttaagaaaatttagaaaatttattattttgatttataactttattttattttctcatttttcttaatttagtcaatattacatttgtttaaatttttcatttttatttaacacatattttcatatatgttatttagtaagaaataattatgaaaattttttaatttggtaaattaattacatgctttatttttacatgtaattataataattgtgatattttaagaatgtgaatatttgaatattctacaattaagtgtgcaattattatatttatttaccaattaagtaatttattgattgaattaattgataatctgcctaagtatatattcttgaatttgcatttaattcattttgatataattaaattgtactgatttatatatttatcttatttatacaaatttattattagtacaaatatttaagatattatatggttataaatgc

SEQ ID NO: 120026 - DNA, 1061 bp, Cannabis sativa
tgttagaaaatatcttcccttcaatgaaactaaacttaatgtaatttggtctgacaaaacaaaagaaaatctttctgtgcgttgatgagttgcttgtttttgccacgtacgggttattttgcaatcagaagaactttatttacttggtgaaccagttttgctactagattatttgctaatctaagtcgttgctcaaatgtctgcagcagcttcaagggcccagatttcagccccacctggcttttctgttcctagcagggcacctcccccaggctttggatctcatgacaggatggagcaatcttatgataccttttctggtgcgttttaagacatgatatgttttaatatctaaaatatctttcagatcaacttattattattattttctaaattctcagggaatcgcttgcttgatacttcatcaatgttgagaaatggatatcaacaacaggcgtctggaaatattggtagcaatgctgacatcgagtttatagatcctgctatattggcagttggtaaaggaagacctcaaggtggactgaacaacccaggcatggaaatgagatcaaacttctcttcacaattaggctcttttgaaaatgatgcaagacttcagcttctgatgtcaagatccctctcccaacagcagaaccttagatttcctgacatgggagataatttttctcatcttagtgattcttatggattatcttctaggcttgttgagcaatcacaagtgaacaatgtatccccatatgcacagatgtctctccaacaatccagaaatggacttatgtcaaatggtcactgggatgggtggagtgaggttcaaggcggaaatactttgggcatggcagagcttcttcgtaatgaaagactgggatttaataagttttatgctggtggttatgaggattccaagtttcgtatgcccagttcaggtgatctatacaacagaacatttgggatgtagttctcactcatttaatatcttgacttgtgtttgagagaagcttgaaggtgtattacaagggttgagagaagcttgaaggtgtatt

SEQ ID NO: 120027 - DNA, 4056 bp, Cannabis sativa
  modified_base (2742)..(2743): a, c, t, g, unknown or other
  modified_base (4013)..(4022): a, c, t, g, unknown or other
tttaacttaaaacttagactttatagttaataatttttattatatttagataatgaagttaaagtttaaaatctataccatgttattacttttttttatattattttatgtttactcaattatatttattttatattaaagttcttaaaattaatttaaactatagtattttttagcttgaaatataaataatatatttttatttttttaaatctaattatttgaatactagaaactaataataataattatagaaaaagtaaagaacggtttggacgggttaacccgaccaaaccgacaaaatcattggacgggttgaactttttctaatttttaattgggcgagttacagttaaatatttgcaacccgatatttatattgggttaataaaaatatgctacaatcttaccaaaccgatcgttgtacacccctagaaacaacgctttttgggtgttagaagtaagacacgatgatgttttctgagaactcttccaagcatcttctctgtttttagaaaagattaagattcaactatttttggggaccaaataaaacttctgaagggccttaattgggacctagcacccaggttgacaccttgaactgggctgtttccaatcaagttcataaaaaagtgttccgcaaatttttttcgtcacaaaaaataattacgattcaagaaaactcaaggagaaaaccataaacccgagcccctagaaatcgggcccaacacctaggttgacaatcaacttggacactgccttcaattgctcaaataccaaatctgattcgactattgaatctagaatggtaaaaaaatggggtaggagacctcatccacaagctcaaaaaccttagaagtatcaaaacgagatcctaggagcttgtgaatggggtacctagcgcccaagttgacaaatggcttagtacgttgggctttgcttatccaattcttattccctttcgactgttcatttagttttttacaataacaaagatccataaagttagagaagtcaaattcacaactttgcatttctcatttccatcataggaaactcagtcaaaaatgaagagtttcaagtctctcatttctgtagaactgtaacatgttcgagaactggtgactagcttcgccaaaacacagaaacaaactaagtaatatcaaaatatcacttaagcgtattaaagtacatcccttggatgttttttcacctacccaatgtctaggttgacgtcatatgtcaacctgggtgctgggatgtcatcctaggcgttggatgtcaacctgggcgctgggtcatgatctactttcagtaaaacaatcataactcactcaatattgatttgattgatgcaattcaacttgcatttcaaagctaattcaatactttatcaagtaatgtctcacacgtaaatcgtaattttgaagctatcaacatcaaatttcaccccaatagtgttacaaaaataagttgcgtgtaacctgcagcgggtcccgccaggctccaaaaaatagccatcacgacctagagctaacttttaatgttagatcatcatctacgttcaaaaatatctattttttttttattttttccttattattgtgggcctccttcacctataaaaggagagctgccttgactcatttttcacattaaaataattatccacaaggtcagagcatttttttcttatttatctctctaaaagctagagcttaattacttagcctttttttgtaattctggtgagaaataaaaactcaaagtagacgtagctctattaccatcgcgagatggggagtgagctactatcaattttatgtgtctctctaaattatttccttaaacttattaatcatctcgccaatctagcaagttgatgttggccactttttagcgtcaaaaatttaaattagagattcaagatatacgagttaaatatgctatagttatattgacatatgtttcatattggacgagagtacccgtatgacttgtgtagcaaatagggttttcattcttaatgccttttatatgttaaaatttatcatgggtacgtagaaaatttgcatatagattgaggtcttatatcataaaaaataataggatttgctttagttaacccactattaaaattggaagaagaaatttataaaataaatagattgtcaagttgatgaaatcaatacctcaggttccatttattgatattgataatcattatttgcttactttaattttatagttaaattatttttcttgttttaataatattcctcaatttttgtttgccaattaaaaagtagaaaaataattattggtacttggtgttgacctcacttttagccaacgacaatgagtcaattaataagcgataagaaatgtaattaagataaggtaagaaccagtaagcaataaagaacacacgagtttaaagagttcgacccctttagtttggtaatagcctactccccttagatagtattaactcgagaacaaataatacaatgttttctctctcaaagctctcacaatgaaatctctgagtattttctcttagatctctctgaagtaattcttttgaccccttttacagtgaggatggatcactatttatagggctaagtgcacgagggaaggtttcccttttacttacgatatctattattggtaagaatatacattacatattagaatacatggattgagggattcagacagcttgccatatccctnngatacgatcccatgattgtagggattgctcgtttacttcacgatatcaatcttgaagttgctaagtcttgatacattgttcagagtaatgaccttattggttgtttggatcaccagtccttgccctgctcggtcagacagactttgtccgtacagatgtatactgagctctgttcggaatatctctttaaccagatgtagaaaataacagccatgtgtcaccagtatgtcctatcacgtcatagtgtgaaaaatgggataacatttgcccccaagtctgcacgagacttccgaagtcgcacgtagacttcactcagctaaagttcgtgtctgaacagatggcacgtgttcgatgcgcctgtttgtgatccgatgtgattctgaccaagagtcccttcagtttttagctaattaatgctctgattaattcgtacctcgatacccttcttcaggtacttgattacttttgatttcccaatatttacttttgaggggaaattgaggcatttgaaatttgaaattattgcaccccctcactaatctgtttataaatagggcaaaaagtcctaataaatcactcttagcatttttcttgtttagtgagttcagagcaagaacatcattctctttaaatccttcgaagaatttccagaaggtgccgatcaacatcgtttgagaaacctcaaagcttcaaagagtgagtaagtttctcttcttttctcctttaatgtttgaatctccaattttccaagtttcctttgcaaaaaatttagtagtcttgaacttattctaggaaaactctagagaatctaagtttagaaatgtgaacttttcttgtggttgatcatataacttgactgttgtggcattttgactttaacttcacgatattcagttctcactttgcccattcgaggtttagtgaagattaacccttaattcgtggttttgaaattttgggttatgaacctaattcacgcaaaatttttgtctttttaatcttttgattggacctagtcagtatgcttttgcttgttttttgttcgatatcctcgccaaatactcatcttgtgtcttatcttttgtagatgaaccctggtgagttttgggaaggaaaacaccatatcgacctggatcttctccaactcttgtacgaggaccaacctcatctttgcgctagttcgtgctcctcaagtgatagactttctaattcgagtttgggggactgggaagtgagcagtgagggtacacctgttgggttttgtgccctnnnnnnnnnncatttcaatataatcagatttccttattaataaa

SEQ ID NO: 120028 - DNA, 1447 bp, Cannabis sativa
  modified_base (1373)..(1413): a, c, t, g, unknown or other
acaatgaacatgttgcttagaatcttcaataacttcaacattcacaaacttctttctccaatgtaagagaatcctaccttcaattttattactagaaaaaaactcccagtgagtaaaataattcgccatcattgtttgaagcctcttccctttaacctttgtttcaaccaaagctccaacccctattttattcattctccatacttccgcaactttttcttgtttctcttttttattcaaacccctaacattccaacaacttatattacaaaaatccatcaatcacaaactgcagtaccttactccccctatatcttcaatttgttcccccgttaggatcgcaaaagagttcctaagaaccttctcactagaatccaagtctttcctagatgagcccgagcccttggaaaatcggttctttggagctttccattccccatcattttccttccctgtagttacattgttctagccttctgaaacttttctgtttccttcagagataactgtattgttttggtcatcttctttttgagtttcattgactgtagcggtattggtagtctcctcagttacattattagctactgtaacagcttcagtagttacttctttagctactccattcactttagctttccttttcggcttttctaccttcctacattcagccataatgtgtccaaatccaccgcaatgtttgcatttcaccggcagccactcatactcaatttcctgctctaccaattgcccatattcattaacaaaccaaaaagttcgttccgatttatcagttatttccatttcaacaagaacacgagcgaattgaactcgggttcggtccttagtgtgcttatcaataattatcggattccccacagtacttacaagagcgctcacagtttttttaccccaatattggatcccaagattaggtagcctaatccgaagaggaaatgctttcaccatcctaaccatattcaaattcgcagaccacggtctaacaatgaccgatttcctatcaaattgaatcattccgttctcaagcacctcatctcttgttgcttcatcattaaatttcaccattgtaagcccctttgtcattctagcaatatgaattatacctaaatgcccccaaattctacggataaaaccttcaaagaccaaagctggaacattagcacccagcaccatacatataactagagatttccagctttcctcttccaatttcacctcctccaagtctatgtgagcaattttcctaccttccctaatcttcggttcagtataagaaagtttagcatcagagtttagggccttacctcctgagaactgctgccaatggtgttgctgttggaaattattttacnnnnnnnnnnnnnnnnnnnnnnnnnnnnnnnnnnnnnnnnntaaatatgaactttctaaacgatgaaataaacac

SEQ ID NO: 120029 - DNA, 961 bp, Cannabis sativa
ataattattttaattatttaaataattaaaataaggtggaccaataaaataaggtaaatagcaaaacaaatcaaaacatgcacaatttagtttgtttttagtataggggtttaacgtaatcataaaattcaaatagtttagcctcaattaaccataaattaataaatattcaaaacgtttaggtggttgcaaaatgtgtggcaactgataagaagaggccacaatgacgtctctttgcttacgtgggcataaaaaagaagctgacatgtgttatcaaatgagtttcattcttcctaaaaaaaaaataagtttcattcattttttttggaaaatgatttatgaaattagtttcaatctcctgctacacaacacatctgcctcaacaattgttgaccaaattttaacttactgcaaaacaccagagaccctaccttaaaggctaattgctccgaaattcagagaaaaaaaatatgtgtctttttacacttgaatttctaaatttttttattaaggcagaatttttttgaaagatattttataagttttatattgtgtattgtgttaattttttatgattcggttgttttttagttgttcaattgttgttttaatttttctattttgttattttacagttgttttatagaataacagtatttttgtaaaaaatattttctgacagtaaaattataatcttttgctcaaaatccagtaagtaataaagttttttgcgggtaaaccctttcaactatcactcatcttgcacttaatcctctaagtttaaattttgactgtaaaatcctccaaattattgaactgtatttgcaaattttaggtgtcatctattttttatatttaagtgcttatatagacgacttatgtggacacttttatacctgtgtcaaatttatattggtacacctaatattattattttaaaaatataaaaaattatttcaaa

SEQ ID NO: 120030 - DNA, 943 bp, Cannabis sativa
ggtggcagcggtggcagaatcagcggcagtaacagtaagaagagagttagaactatcaacaccatcgctgatctcaggctaaataacttgatcatcaaataatacttttggttcggcccagcatgatctcatagacatattattccagtagtagtactcatgcataatcatcgaatcaaacctattgctttttttaattaatagatccttaaattggtagaaaatatagctataggttaagacaaggtaagttggagaggtgattaagaaagcagtatagagaagagtgtatatataaaaatatataatgtgagtgttgaatcgaaagagggaagaaaaaatgaaaatgggaagagagagaagagaattataaaagtttagaagtggtggaaaagaaatatgtggttaggtgggacatatgtatttagcatgtatcattataattagtcaccgtcaaaacgtacccactcttttaatttgaatatatacattatatatatatataaatgtgacctggttcaaccaaccaaaacatatacgtatttacatgatctaatgaatgatgacttttaaagggattcattgtgctcggtcatttacttgtattggattttcttaattgaccattttatattttcctttttttttttttttttttcatttatgtaattttttattatctaatattggccttaatgttatgggaaatttacacctttcaccgttatttctatcgaatttacacatatgatttatctcttttaatagtgatactttataacgtttttgactaacctgttttctatggtacgttatatctcataatataatatgtttgaaattaaagttaaataattgttagaatgttagaatgctgaggtttatagttgaggaagaaagaataggtgaatgtgatgcaggtttggttctgagcataggtagg

SEQ ID NO: 120031 - DNA, 1216 bp, Cannabis sativa
  modified_base (1120)..(1120): a, c, t, g, unknown or other
tgaatgtgttatttactaaattgttttctctttacttttgttttttttcccttactccaaatcttttgcagaggagtagatttcaaatagttccattatgcaattaaactaatttttcaggcaatacaatatgaatattactccgaatatttgtattagagagtcttgcattattaatttgtagaaagatagtagaatatataagatcctgctcttctcatgtattttattttacattttaacagctctctaataatttttaaaagtaatatattttatcatatatttttctagtcctagagtctgaattaaacttaaatgtaatattagaagatcttaagtctactatggtaggctgcttctcggattgggagtctttttagcaaattgtatggtgcttctgtgctatttccttatcattggtggcttctctatttaagaaaataataaaataatgttaagtctacaaagaaaaataataatgattctttctttcagcctacaaaaaagaaaagtatttgcttaactacaaaaatgaaaagtgttttttttgcttaactacaaaaaggaaaaattgatagcatgatagatgaataagctgaagaaaagtaagacagatatgacatgtccctttcctaataattgacagaaactttagcaaacataaataaataattgacctaatgagataatatggcattaaaataaaacttaagaaccacttgaagctagtcaagtgattatagaaatattaaaagtgcttgtgtggagattatgggattaattaattaaagtatatgtaagaagcttctataagtaaaagaaatgtaaaacttactacttagtctctatagttaatagatttattagtccttgatttttcattattttttttgccttttattttttatttcagtcatgaataataaggtgttatttttaaattactttcaagtttggttgttttagtttcactcaggtagcaccagtgacggaaccagaccacaaaataaggaggggtcaaataaaatatattttcacctaatttttttagtatgtagtattttagaaatcaatataaaaatacaacgtatataacattgttgaccgaggttttcgncaactattaaaatataattataataatgagctgtaagaaagtgagatgaagactttttacgtggttggggcgttaacgagccttagtccacgagcc

SEQ ID NO: 120032 - DNA, 3258 bp, Cannabis sativa
tgagagtgatgatccgagagatcgaggttttaggctaagacctgttgtgtttagcactcttattgaacatccggctcaattaatacgagatgattagtgttgttgggaagcaacgatacggtggtcccaatggctcctagaacacttactgtagtgcttggttgagattccaaatgaattccagtgcttacttactcttacatccattccatggttcatatccatagatgatttctttggagtctacccctaccagataaacctaaatggctataggatccctaccaccttctttatcttttaccgactaagaaactggcttgttccaactttccatgaaataaactttctttgtgacttgaaaagaagtccaacttgaaaagaagaatgattttaccacttccaccaatttagctcatacaaagaaaatattaccaagagtatctacaacctttaccatcagaaatacttttatacccgtgttcttcccttgagacacataatcttctaaaaggctagtcctttcaaaatacatgctcctctgatcgacataaagatgagagttgataccatattgtttgaaatcaaatcatgggaaagagatgggagaacctattaaatattgaaaatcttcgaaaggttgggcttataatgtcttactagcgagtgtatgctaacacttgctttttcaatgaatcttggacaatgttagtcaagtaggattatgagtatgctcaaagtgcaagtgtcatcttgtcttagacaatgtcaaaagaagtgacctcacttcaaagggacacaaagtattcaaggagaatatatgtgctcttagaccaggaagatggcaaagtttcctccactcgaacttctctggaaaaagatggggaatcaacaagttgttgatgctccatgctatgcagttgaactttgatgttttgcttttcttctattgtactaatcacttgtcttttttctttgcagaaaacatgagcttcttggttgttatggaatcttgtttaaactctaagaggaaaattctaatgtcaaaggagtcttaacctctcacaaggtaagtagtttacggcatccctgttgcttctgttgcttcaaagaagaaggttaggaagaggagtagacctattaatgttgctcctcctcctgaagactttacctgggagaattttaccattgctggtgttcattagagatctcctatcgatatctctctggatgaggctaatcatggtgttttgaactagggttcatatttggtggagcaactacgtgagtagggtttctggcttctttcacatggtgatgccttaataggctccaaggcagagaatatcccattgcagaagttggttagcactaaaactttgcattttattgctcaaagatgcttcactaacatctttagggtaacaattttgtctcatatgcttctagcttaactttcatttgtttaacatcacctgacattatgctcttgtcttcaggcttgtgttgtttatgcttacaccatggataacgaacacaagaaggtggttaagcttattgagaagctccaggttgcagaagatcatgctgttcctgcagaagaccaagtgactactttaaaggagaagatcggttctctgaagagtgagttgactagtcttcgagaagtttctagtggtgccaaagctcgagagagtagcctgaagaaaaacttggtagctgctcagaagaagacttcagatcttgaagagtcttcttgtcttgcactagatgaacaaactttaatagctatttatcttagagactaagtcaaggtcttgaaagagcaagttactactcttgagaatcaagctcatcttgatgttaccttctacaatggcttatgctttgatgccatatataaagtttggtctgccaatggaggagcaaagtcattcagtttgtcaggctttcctcacacaggtgccgaagtttgttaagtgttgtgagcagcattgtagtgaagaaactccccagaaaatagatttcattgtgagaggtggtgagccagtggtctaaaaggctacgagagttgaaggctacaaccctgagcatcccgacttccctccttctactattgatgcaccgattgtagaaagttagggcaaggatgaagctattgttgatgtgataagcattgaggacattgtcagagtccattcttctcttttatttttagcatttagctttagtgtgttagttagtcattcttggatggtcctttgatgtggataagccttagtaacatgttataagaatttgttttagctaaattaaaagttatttccaacttaataaaacttttattgcaatgtttgcttttttattttagtttatctgttatcccttgatcgtttagcacttgcacagtacaccatttcttaagaaactcgattactgggactaatgtcactgctccttaaagttatctttaccatgagagtactaacacagatgtgtgaaaataattttgaatgctcgtgtaacatatggttttcatataccataacataacctatgtgccccccaagtgatcaagaaagtaccttcattggtcacttacaatacataatccccctgagccttcttgatcattgctcttgagtggtgttacatgtgtgagcactctccacttatctgaggattcatgagtggcagtgtttaactcactaaagaaagaaccaaataataattagagagtacaaagatgatagaaaaaaaaatccatcaaatcaggcttcttatccacccggaatgtatgcacaactaatccatgagatgtcatggaatagggatactttagaaaaattggtaagtaaacttgtaaaaacgtataatgatcatacatcgatgtaaagcatagagaaaacaaagctcaataccaaattacaatcaatattgaagtgtaagtatagaccaaacaacaagcagctactccacactcgcatcaataaaatttgcttgaatgattgtaataacccgtaaaaaaatatcatggcaaaaataagaatccaacaaacttaaatatacactataaattaataaatttaaattgatttgataaaaaggaatagaaaacttatctcatcaacaagatcttcgaatcttcatttgaatttttgggatagacaataaatctttaacattatcataacattgttggaattattttaccaggatcttagatctactcacaataagtatgtttattaacatcct

SEQ ID NO: 120033 - DNA, 1902 bp, Cannabis sativa
acacttatccaatgtgtaactaagttctatcgctgattatcacattagtgtaaatctggtgcactgatgaatcatgggacataaacttttaaagcatataatcacaattaccttccagtgtattcacaccactgtaattgtcaataactatatgttttggatttaacagaaattgtatattaaaccataaacatgaataatacatgtaaacataaatgacttccaatcttctattgttgacctcacttctagctagcgatagtgagtaaagaataaagcgattaagtagtataaataaaagcaagcaaaaacagtaaaataaagtgagcaccaaattttaaagaggtttgagtatggtaagagcctactcccttgtatttgtattaactttagaggaggaatgaatttttgttccttgcaaaagctcttacaattgatctctgagcaactttctctcttagatcactttgttttctctagagaatatttctccaggaattctctcgatccctttcatagtgaggctaggtcattatttgtagagacttaatacaggatggatggtttcccttatccttacaatgaataaaataggaaggacaatgattctataattacaatgtatgaaatgggaaacttagaataggttctcatttttctctgactcaatcttgtgatccagagattgtcttcgcgtctagacacaatgagctcaatcaccaaagttgccatctctcgtacgtcgctcgacataaacatatccatactcggtcagacatgttctccacaatcctgctcggatgcttgaacgttacagatgctggttaatcatttataggctactagggatattttcctttgcccaggtatcaaaaatatgggacatatgtcattcaattctattgccacgtcaaggtgcaaaaaataggataacattttccccctatgtctttgcgggaccttcttggtcgcacgtggacttcactcagcctagagtcttgttcggatgggtgacgcgtgtcctaggtgtcaatgactaaccgacgtgaccctgactaggggtctcttcaatttctatccattaatgctaattgaaagttctgcctcgaatcactgttcgatgcttatgtgtgtttggcagttattctccctctaatgagtacataacgtacacttttcgggggaatttgagaaatttgaatttttgaaatgattaattcccttttggattcttaaatagggactaggaacctttggtgatccttttagccattctaactctcaaaaaactagagaaaaaattttcagacgtgtgttctctcaaattcttcgtaggacacataggaaaactcttgacgacatcatccgagcagaacaagaagctccaaaccagtgagtaagttcttcaattcttttttttttttttttacatatttgcaatgaaatgcatgcttaatttttggatttcttgctatgaatttggcctattctttaattgttctaggttaaccatagaatacctaggtttgaggcttagaaatcgtgattgtattcaaccacaacgtctgattgctcaactgcacttttaaacttcatgggtttaaaattctatttttgggtgaaacttctgcttttgattccctaatcaaacctggtcgatatattcaacatgtttttcattcgttgctctaaccaaatctcactgtcttgtcttcaaccttttgtagatgaaccctggtgagttttgagaaggaaaacatcatatcgatcaggatatactttaacttctatacaaggatcatttgttggatattattttaccaggatctcagatctactcacaagtatgttgattagcaccctaaatatgaactttctaaaacgatgaaataaacacataga

SEQ ID NO: 120034 - DNA, 2342 bp, Cannabis sativa
ataaagatatttctaaagtctcccgaagacaaaggggagatgattcagaatctgattgtgaggaccgagaaccctgcgctagaaacatctttgaagcgaagctcctaaagaattttaaaatgcctgaaatgactttgtatgtaggagactcagaccctattaaccacttatcccggtttaaccgcgtgatgatagtcatgagagtcagcaatgacacgaagtgtttgtgtttcccgctaacattaggagggtccgttgaggagtggtttataaagctagaacctgggtttgtgaaatgttggaagaagttgcaagttagctttcaaaggcagttcgtggcggccaaaaaaataaaccttgaagtcagtattttgaccaacatcaagtaactaccagttgaaactctaaaaatttttataaaaagatttaaggaagaagcttccaagactaaaagggtggatgatggacagcaattggcattgcttcaagcgggaatttgaacgggaacctttttttggaatgagctctagtaggaaggagctgctagtcttcaagacttttaagaaaaaggctaaaaaatacatcaacctagaggaagcgcaaataactgcttttggagggtattatccgggaattaccctttttggcagaccgtggtatgttcccagaatgcagtttttggaaattacccttctagttgcatcacatgccagtggaatgcctagtttgaaattctcagcaacactggggtacacccacaaccttgctcttatcccagttcaatccagttttggagcactagggggtaacctgactcctggagtaagttcgcaatatccctcttaattcgcacctcccgcgacaagtgcagtagatgctcctgagacctcccaaagcaagagatatttaaaaggaagcacgcggacaacgaacaagaggcaaaagaaaggttacacctctcagtatacccagtatattgatttagtggacacccacgaacgcatgtacttagccacaaggcaaaacacccactatcggagatcgcctcctttatatcgggatagctcgcgaagagaccttaacaaaagatgtgaatatcatactgatattgaccacaccaccaatgagtgctagaattcgaaagatgaaattgagagcctaataaagttaggtcacttgtacgaatagatcaaagataggttaccacacatgaatggacaagtcggagcaccagcgcctcccaaagtaccagcccaagtctcggataagccagtccttccaggagtcctccctccacatcatccagtgcccagacaacctattagaccaaatgggagggtggccattatttttggagggccacatattggaggaactacacagaatgagttaaagtgttatgctaaagctctagatcatgatgaagaaatatgagaagttgactaactcccgacgcaaaggccccgacttatgaatcaacctattacctttgcggaagaggatgatgataactctatgaaaatagagttatttagctcttttgtgcattaaattagctttgttctcaagtatttttagcttattaaaattacttttacttagttttatttagttttacaaaatattaattttagtatttttagattaatggtaattaattttgtaatattttatcaattttatttagtttctcattttataagtgttagtctcaatgttgtatattttatagaatgtttaaatgcgcattttggacttgtcacatgtatcaaaatggagaacattaatgttcatggatggactcactaatgaccaccaatattttgtgtaaagtagaatagacttaaactcaaatattctacactttattcactaattggctatgtttgttgggcctttactttactagttgaaaagtaaaaaaaaaaaaaaaaagcaaagagaccacataacatgggccacatgaggaggatttttcttggcaaggaaatcaatatgaaagagtttacgtatattatataatcaaagaaacggaggcgtgaataagaaagaaaaaaagaaggggtggctgctactccaggcataagaaacaacaaacaaaatgaagaaaaaaaaagaaaaaagaaatagtgttatttgagtgttaagtcttagcttattatttttattttggagattgacaaattttcaaaggaagaagaagaggattttggcaaaaaaaaacttagattattgtgacaactgacaaattccatatggattttttttttctatctcttttttcttttttaactttataatttttgcacaatttattatgagttaattttctttttgttaga

SEQ ID NO: 120035 - DNA, 1240 bp, Cannabis sativa
  modified_base (1186)..(1196): a, c, t, g, unknown or other
aaactaagaaaaagaggaatattgattacaattaatggtaataaataaaagatttgggcatccacataattattaatatttataacaaatggatatttatattgcaaattttcttttattttatgttatttaggaattttatcttccaaactatgatctatatattattgtgtccttaaatttttcagcttgttaaaaacggtctcttataatgccttactagtttaaacacactacaatattttcttaattactttgtacacatttgctaattaaagagtttatcataattaatttaaaacctttaaataaacttaaactataataattaaacataatttacataattatgggatcccattaaaagcttacaactattttcaaaatatattttatacaaaagctgtcgcctagcgactaacaaaaagtgagctgaaattgtcccaaagatctgaacactccaggtctgaccatcttgatatgtacaatctccattcaactctagactcattccggttcagctctggctcttacctgcatatgcaaataataactatgagtcgacactcagtaagaaaaacataaaaatataaacatataaccagtggcccatacacctatctacaggtctaaaactaggtcaagaatgttcctaactaaactatgactaaccatgaatccaacctattttcagtagtctagtcgtattgatgtggtagtaattagttcatactttttgaaagtctatcatataattattgatatctcagtgcaactttatgtatacttcgccaatatcctgatatgctaatttgatggctactatttttcttagcatatatctgttgatatcttagtgtaactctatgtacacttcaccaatattctgatatgctaatatgatggcaattgaatatgcacgctaaacatgtatacatatatgcatctatttatattaatcttatcttgattccgaatgcaagtgtgctggtaaccctgagtgaaaagtgttgctcgacgatttaaggctctaagtcacaatttacataaaactggtaggtgacccactaaatcactttcgggggctttaactcaaaactaaaaatttcccaatcaataatagcgtggcaataccctacatatttagaaaatactgttaagaatactgtgttggaaattattttannnnnnnnnnngatctactcacaagtatgttgatctaaatatgaactttctaaaa

SEQ ID NO: 120036 - DNA, 1473 bp, Cannabis sativa
atgtccttagcattagggtgttacattaatggtaacactgtggggaatataaaatcttctcgtggtcttcgacaaagggattcattatctccatttttatttctcatttgtgcttaaagtctttcaacgacctttaatcatgaatgttaggttgggggtcttcaggggttgccatgtggtagaagagggtcggtcatttcccatatcttatttgttaatgatagctttttcttcatggaagctactagggagagttgttctcagtttcaagaaatcatggagtggtatgaatgtgctttaggccaattagttaacttatctaaatcttcagtttgtttttcgcctagtatagatagcgacatggtgttttctttggcttccttgttaggagtacagagcattccttgtcatgaaaaatatttggatcttctttgttttgcgggacagagtaactctagtttattccaatctattcatgatagagtgtggaataatttatttagttggaaggctaaatcttttttttttttgtcgaggatcgggagattcttttgaatcagttattcaagctatcccaacgtatgatatgaatcttattcagctaccagttaaggttgttgaggaaattcatacgctttgtgcaaggttttggtggggtggtgatgatgacaataggaaagttcattggtgtacttggaaaaggctttgttggcataagacggatgagggtatgggcttccaagacctgtttgtgttcaatcaagctcttcttgctaaacaagcttggataatttattcggttctaaattctctagcttctcgtgttatgaagggcttatactttcctaatggagattttttgaatgtggataagtcatataaagattcatacatttagaaaagtattctttcgggaaaagaactgataggggtcattggattattggtgatgagagtacggtgaatataaaagatcatgtttggattcctaaacctacttcctctctatcttactctttccatggtcatcctcacgttgtgatgattagtaatttgaaggatgctaatggtaattgggatggggacctggttgatgaactcttctctgttgaagaagatgagcaaattttgtacattctgaggtcgcatcatgtttccaactatttaatttggcattacaattcatctgacgcctactccgtcaaaagtggatattgaaatgctattagactttttttgttgggggtaggggtgttcatcaaaccgctcaaaccatccacaccgtaaaaaattgtagtttgaaattctttgcggtgcggtcgtagtttgaatttttcctaaactgcgcggtgcagtgcggtttgtcgttttgaattgttaatatgcggttcaaaccgcatagcaccgcacattataaaaataccaacttttatatttatttaggtccaatatgtgaatgtctaacccaaagcc

SEQ ID NO: 120037 - DNA, 1665 bp, Cannabis sativa
taaatctgaaatttagctattttgctccctgttagagtctagggtttatttttagcctccagattatgtatgtgtctttgttgcaaatattggctaagtcttttgaatggtgggtgtgccacagtaacttaatgttcatgcgaggaatgcatgttccttgggtcactgtgatacacccagtgatttgaggcatgcggccagttttcacttttcttgcttttttagtcgcgtgttaggacaaaccaggtttctcgaaacagtgaggatttcccattaactcaatgttcatgcgaggaatgcatgctgcttgggatactggggaacctcagttgtttcttgaggtacacctttagttgtacatgtgcgactcatactttgcaaggattggctgagttgtcaaaatggtgggtgtgtctcattaccttaattctcattgggggacatgattattatgttactcagacaatcccagccatttcttgagatgtctggttaatcctttatattttcagaaccttattttatgcgagtgagggcacttctttttattctcgcactttcaccacactgaaaagatcttcaatcttttagatgagagacttcaagtatagctagatgtttggctctcgaggtggggcctttgttgatgaggtggagaagagagacagcttcatacctccctcaatctctggggaggaggttcttgatgccaggtctgtgcgtcaaggctcactatctaccgatgagataggtaggatggtttaggaacttgctgaaccatgaacgattgagatccgtgatagcaaatctacggtgtcagctcgcgaatatctcactcattcgagacatgcccctgacatcaaagttaaagaaatggaaggattcgaggccccaaatcgcgggtcagaggaggaaaaggtgttgaaggtagtgagacagattcaattgacgacgctcaactgaatgagcctttcccgtgtgagcacctagtctcgtgaggtaccaaatctgacctacatatatttgcacggttgaatttgttgcgactagggaccatgcatcattcaacatctcaaagacctcatctcccttttagcaacccaacgatcatccccacgcaagacgtggttatttcaattcctattctccatgtggggtatcttttaccctttcatccttttattaaagccatgcttagacattacgatatctctcccttcgaactaacctcaaatagttatcgcatagttctggggtgttatgcgatgtacatggattatgtccaaggggagccattgatggaggactttagctacttttacgatataaagaacgtaggccacgacaacagcttttactgatttagtaaatgggccaatttagagattaacgaggtagaaggtattgtttccaatatgggggattgaaaatctaagtggttctgcgcgtttaaagtactaggagttaggactgactttaatcgttgaactagtatgtcgtgtatctcaacacttagtatatttttagtaccttgcaaagtcactaatgtttttcttttgttgatcgcaaatagactagctcgacctattctggaccctaccgcagagaaattgtcgaggttctaggtaccttgcctattcaagatcgcgattggcgattgctgtg

SEQ ID NO: 120038 - DNA, 2724 bp, Cannabis sativa
  modified_base (2659)..(2663): a, c, t, g, unknown or other
gagtggtccgccgctaatgatgtacaatgttgtagtgtgtatccctaaaaagaatgtactgatgcacttctgtttgtttaggtatccaaggtttttaatctattttttttttattgtcgtgcatattgtagttatttaatacatcttgaaattttttgagaaattttaaaaaatttaacacgctgattcccgaagatagggtttaaataatttgttgtacgcatgactctttaattttatacacgtgtaaatagattatttgaatattgttttctatattgtaactaattctgaattttttaaaatttgatttgatgtcttaaataattattaagtacataaccatgaaaaaaatagattaaaaaaaatttctagatgccgaaacagtaaaggatgcttcagtgcacctttttttaggggtgcattgtagaaacaccctataatatttatttatttatttacttttctaaagatttatcatataatattagaagctttcgtggtacactcttaaaataagtttagtggtataaaactttttatatttaaaaaacaataataaataaataaataaataataatcaagtttaaatttttaagtaagtttttattaattttattttattttttaaattttattaaaatatattgttgatttttataagtttttattaattttattttattttttaaattttattaaaatatattgttgatttttataagtttttatttattttatttattaaaattttttaaaatatattgttttataaatataagttgggtctcataaaaatctgacacgacctgtataataatatggcttgttttgggcctggcccatattttaggaattaggctataacggtccatgagtttgaattgttcgtgtcaggccctgctttaataaattggcacatttttttttatatgtgccgatctatttttttattaaatcagttgaccctaatttttttatatatatagatgttataatatggtttatgacaaaattgttacttttttttttcatattttttaagctaatttctaacggttttaattttaaatttttaaagcataataataatattattgtaatgttatatttttgagtaatttaaatttttgaaagagtagttttgtttttgggatttctttttatttgaaaaattggtaaatagataaagtatttaaaattaatataaaaatgatatattgttacttaaaataatgataatacaaacttaatttaatatacattttatattttgttgaatataatatagttaaattgttaatatatatatatataattactgtaaatataaagtataaaaaataagaactgatattttttagaagttttttcatttttatacttcaaaatatggttttttttttttttttgtattttacggaattctatacagaaactcctatagcaactaacggagcaacctaaattgtaaccaaaatctgtatagcagtccacataaaaactaccggagcaacccaaactgtaaatttgaaaaaataaataaataaataataccaaacactcacacaaaaactgcgagtactcaataagaacacaaacactcacacaataatcacaataaaagaagtattcaaacaaagaatgaataataaataagtaaaacaagagataaaaacaataatgtaaacaatgatacgagaaatataatggttcaacataactccctagtcacaactagaaaaactcgatttatctttgctttttgcactggtctatcttcagttagaaaaaaaaaaaactcagaattgaagactctttaggcgatgacgtaggtcccaaaaatatagaaccctatgtctttggttatttcaaataaccaaagatataggtatttattttttttaaaaaaaaaaaaatcatatttttaccttcaatcgaagctaccgtttaacgctgccaccgccaagcctcaaaactcatacaaccctaaattcaaataattatttttctaactttaaatccacttaagcctacgcttatatacaatattaataggttttcaacattaaaatccttaaacaatattatttttggattaaaaaaatacaaaaaaaaaaaaaagaatgcaatgtaagctaaaagacatatattaaagtaatttatacttcaatacaagttaaaagacaatatcaaaatactcaacatcgatgccataatcgtccgttgttgtccaaaaaacttaaaaaactatcggcctaaatgtcatgtttgccctcaaatcctaaaataaattaattttttttatagtgcatatgtatttttgggtaaggaaactagaggattcaaaagaaaaatgaagagaaacgatagtgtatggagaaaatagatatttaggagcagtggcagtaatttttttgttgagagatagctggtaaagaaagaagaaatgaggattttagatatgaaattagggtttcttagacttatgttttcgattgttatgaaacaactaaagtgtaataccctagaattaagaaaatggattagcaaaacactaactagtaaactatgtattattgtggaattatattattatgtaatttaatatgtgaggatttatatgattagtaacatggtaagaccccgttggtgagnnnnnggcattttagtaattatgacctgagaagggtaaaatgttgaaattaatatatttacgtgct

SEQ ID NO: 120039 - DNA, 1082 bp, Cannabis sativa
taatattaaaaactaatctaaattaactgatctcatctgtatctttgtggattagattagattggatttgagctattgagcggattgaattgaatccaaaatataaaatgtacacttagtacggatcagatacactataaacaaaataatatagattgaattagatcaactgtatatatataatttaaggatgaaaaaagaataaatgaagatattatttgttcttatttataatttttgtttgaaaatggcattacgtgtagtttaatataatatatattatattttttatgtggcactagtaaggatgcatactttttctattgggataggcacgcggggatctatttttaatggagcgaaaacgaatattattttttgtctccaaacattaaacagaacgggaacagaaatgacactccccatcctgaagaagacctgcttcatatatttattgtctttttattaatattttataatgtgtattatattttttgtatattagtgttatttttgtaagttttttaagttgtattttgtataataaatagtatatcgaatattaaataatgtgtaatattttaatttttatataatttaatatttttatatatttaaattttaaaataaattttattttctatagtagcactctccaccaattttcccctccatgtggtagagatccctaggcactgcactagtgtccagtgttacatattggctgcaagtccaaattgtcagaaggtagggcacacatgtgtttacttattgacacgtgtcagcatatgaggaacgaggtaaactccacaactcaagctacgatttgtgcctgttttgttgcttacgtggccaagtgacacgtggctttcgaaaaacttttataccatggcaactgtaagcctttacacaatccttctgtttaaagaaatttttttttacttatcaaaaaaaaaagaaaatttttatttacatcctatattttatagatattttattttatataaaatttatatttttaattataaatttttttttatttttttaataaaatatatatctattaaataaaaataaattat

SEQ ID NO: 120040 - DNA, 2194 bp, Cannabis sativa
  modified_base (72)..(111): a, c, t, g, unknown or other
aatttatacattaaacataatcttgaaataaatcatgtgaaccatgtaacatagaatgatttctaatctttnnnnnnnnnnnnnnnnnnnnnnnnnnnnnnnnnnnnnnnntagggcacaaaacccaacagctcccatatgctatatgatatactaattgaattttatactggttattgtttagtgaacgaaaaaatgtcaaggagggtggtgatttaaggagtgcttacaaatggattatatcagcctgttccacatcaataatttcaatcttagttttcatgttttctttccacaaagtctgatcaaactcaaaccaagttatgttttcttttgaatacggctgttatttccaagagtcaaatgtgttaatcactctagtattggtagatgttcactttctaagattgttgtttggcataggcacttaggccatccatcaactcgtgcattaaatcaagttatagaattgagtcatgtaaaaaatttcaagaataaaatgagaaatttttgtgatgcttgtcaatttggcaaagatcattctcttccctttaatttgtctaattctagagttaattctatagtatggccctatcttataggtacgccacatgtgtgattttataaactagtttagtactaataaaataattaattattaaaatctattataatattaaaaatttcactaaaataaaacgctaaaaacagacatcataaagacactaatatatgttttgggaatccctgtcgtacatttttttacaaaaagtcaaaatactaaatcaaaatacatggcaaaaacaacccaataacaactcctgccaacttggctcgcaggccagtagggtcaatatgtacattggtggagaaaattgtcacatcatggctgttctagcttttctttgtcttcacctgcaccacagagcacccgtgagtcacaaggactcagcaagaaaagtaataagagataatacatggaataactaattattcaattcactattatagaataattaaacaataacatttaaaattagataatataactagccatatgcatggaaataaaaataatcatatattgcattgcctaattaagaaattccatattatgatctggcatcatacataatgtcgtttcatcaactaatcagatgagtccgtaccacaatcaggcaccaatgtattgcatcgtttaaccagacgagcttttgccacaacctgccaccaatatatcgcttcgcctagctaggcgagcttgtgccatagtctggcacctatatgtcactgccgcccatgcctaatcaggatcctcgacaagaatgcatcacctaaataggcgagcctgtgccccaactcgacactaacatgtcactgccgtgtgtgcctaaacaagcatcactgacaggaaaaaacttaataacggtttcagtctgtgccatagcttggcactcacatgtcactgccgcccatgcctaattaggatcgctgataggaagaaacctaacaacaattttagtttatagtcatgaatttataacggttgcctcacaggcacaacctgaataccagtttccacatatcacattgcatactcaagcaaattcatgccatagcctgacattcacatatatatcacatttcctaatcaaacaagtttatagtctagcctaacatctatatgtcacattgcctaatcaggcaaagctcatgccataatctagcattcatagttgataactcgtgcacaataaataactcgcctcaagaatcacagttgatagaaatatttaaacttgctaccatatagacaaaagcaagataagaataataactattaacaaataagattggtaagacaacaagtccatctcgggatgaacagaatacataatgaaagttgttcaggacaagtaaacaaagagcttgcaactcattgacccacatactcgtaagagctcgcaactaattgacccacatacttgtgagtaagagctcgcaactaactgatccacctactcgtatgttcaaagaatgactgcaacattcgttcatctcgctctttaagcattgaaggaaccacctcgctaatgttagaaaaaatagagagattacaatggaagaataaaaataagatgaataaagactaagacaattacaactctaaacaaaatattacaaggacaatata

SEQ ID NO: 120041 - DNA, 623 bp, Cannabis sativa
ttccagtacaacatttcatcttcaatatcctcttattcaatatttagataaattctcagtatccccaaattcaccattcaaattataaattaacgatgatgggggtgtaaaattaggggagtagtgtgcttaccaaatttcaattgagctttaaaattcttagttgcttccaaataggatctaaaatctactttagtttcctcctcaattcgacacatcttcaatgatcttgaaatcaaattgcctgagagagtcatcatctcctcttcctcgtcttcctctaagtccaaggattttcgccatagattttttcttgacaacaatatcaaaggatgttggtccctgtttctttctaagaatctcctttttcccttttgttactgctttaatatgaccgatagagctctgatacttgtggggacgtccacaacctgcttgaacttcaaaggatgttggtccttatttctttctaaggatctccttcttccctgtgtctgaaccctagcagagcgaacttgaaactcgggtgacggcggtcctatgttatctaattcggagcaatttgacctaatttttagtatgtgctaaatttggcacaacttagtgttggattttgtgcccta

SEQ ID NO: 120042 - DNA, 1150 bp, Cannabis sativa
  modified_base (1089)..(1120): a, c, t, g, unknown or other
aattggcttcaagatggagatggaagcacaatcctctttaatgctagtctctgagacagtagactccaaaatagaatttattctataaagttaggtgcaagtctttgaatggataagtcaggtgatgttacaggtgtattccttgaatactatcaaagtttgttgagcacaagcatgactagtcagcttaagataaataagtccatagttagagttggtacatgtgtggcagatcaacaagcagtaaccttattagcaaagttcttatatgatgatgtgaagagagttgtgttctcaatccttggaattaaagccctgggtctagatggctatggtggttatttttatcaggagtgttgggacattattggggacagcttgtgtgaaactatgttatcctttctccacttaggtaacattttgaaagaaataaattcaactgtgatcactcttgtgccaaagagcaaatatttagaatctatcagtgattataggctgatagcgtgttgcaatgttatttataaagtaggtgccaagatgatttgtacacgttttaaaatgattctacctcatcttattgctcaaaaccatggtagatttgtacatagaaggttcatagcgcacaacatagtgataggtcaagacttggttcgtcattatggaaagaagaattgtagaccaagttgtatgattaaactagattcagaaagcatatgacacagttgaatgagaattccttgaagaaatgctagttgcttttagatttcagaatagctttactaatctcattatgagttgtgtcaaaacgcctcggttttctctaatgtttaatggagaactacatagtttctttaaagctaatacatggttgcagcaaggagacccaatatcccctcttttgtttgtcctaggaatggagtatctttctcgagttatgaagaaggttgagcaaatagaagactccaagtttcataatagatgtagagacactacaaaaaattttacttttagtcacaacagaacttgtgactaaaaatgaaaaaaattgttaccaattataaattatgattcatatgttgtgactaaaannnnnnnnnnnnnnnnnnnnnnnnnnnnnnnntacaatttgttgtgactaagtatattttta

SEQ ID NO: 120043 - DNA, 3405 bp, Cannabis sativa
  modified_base (56)..(60): a, c, t, g, unknown or other
attgttattttccagctttcgttgattattcctcattcccagtcgagtactcgccnnnnnaggttgaatactcgcatttgtctttcaacaacaataatgatattgcatgcaacataatgttattggaggaattcgtctgaaagttgcttctaagatgtgatcgtccccagtcctagatgtttgaaccatttatctacggctccttttaatgtgatcatgaaacattgatactttgccttacatgacaccttttcatcttcatcaactcattaaacgcaccgagatggtactttgggtcagcaataccatcatatggtgtcatctatagttccttaaagtttgatggaagtggttccatttgaatctcctttaagagaggagattcttcatcaaactcctcatcatcattcaagtcccccttcgtagcgatagctatctttcgatgtaggtcttgcatttttgcctccaactcattcatcctttcgcttatcctctctcaagagttagcgggtggaacttgggtcttctgtgtggtttgcatagggcccgtggaaggtactcttcttgtccaaacagtgtgtgacttaccactaaagctgatggataaggttgtctgcttaccttgctcttggtggcgagccacaggcgaggtgccccctagtataagacctcttgggtgaagcctcttccttaggctatcgagtgcttacctcaatgaatcccctcatagtgggtaggctcgagttatctcaattggttcattgagcttttgtctcacgatagaatccttccgtgttcatcttatcgggtgttattagtagatgacatggaatcacatttgccagcatatgtagttaagatctcgttccctactcagtggcttttgtgaccaaagtgtgaggcttgggctttgcctttgagtatgctactcactactttttgcataccagccacagtagtttctaagctcttgttcttccaacctaggccgcttatttcctccttgtagcagtaagcctgggagcttgaactcactaagtatgcttgcttttcctttctgggcttactccttaaagtgtcggggtttggtggcacaaatagtggaaggcaccggaccgaagataaccctctcgatagttgaatacttttattgatggggttaccactgatgtcattattgagtcacatagtgctgtgggcctttttaaagtatttgtgtggtggtccacactttggttactcttcctttggccctgtttggtgataggaggttgatgttctcttactatggtggccatcttgctttcatctgagtgaaccctattttctcagagatgatggaaatttcttgacatcttgaaaattatagtgaatggtttaggaactaacatagcaagagcttgtcgttcccatagacgacaccaaactgttgacgttaaaaactcgttaactaaactttacttataaaatcaaatgtaaagtggtaaagatgaaaagcttaagaggaactcagaaaattaatagagaaaaatggtgttgtattgaatctctaaactcctttgcaatgattattttccaatcccttcttcaatggaagagagaggtatttatagagagctctaatggctccaaaatataagtagtcccaaaagttgagggacacgattacttttgcaccatgaagatcaacacgttagacgggtagtggtgcagtagttgtcgggtgtcaattggtactctgaataagataaatattgtctctattacttgtacttgttgtacaaccactacttcttcagaggtgtacgtgctttaacaacttcatcctttgttgtatgttcccttgctatccttctctttatgctcatgatgcgagtataacacttaggagaaatagctaagtgatgagtatatgagaggtaagtcttgttgtttaatgttggtagcaactccctcccccatcctttttcgtggtcactccgttgtaacatatatacattgaatgtgattgctcccttgtgtggagaatgtggtattaggtgatgattaggggagtaagagaacaaaggagagtgagtgaaggagcagggagagagtgagctaggcagtggggagagtgagtgagggagtggggagagagagctatagaacgaggagagggattgtcgcagggagagagagggagtagcggggagagaggggagtggggagcggggagctcccttggtgcatgtggggaatgacgggagtggggagcttccttggtgcgtgtggggagtgatgggagtggggaaaagacataatgtttgtcttagtgtaaatagaccgcatcaccgattatcacatcagtataaatttagtgcaccgataaatctcgagactaaaatatttgaatcatataataataataattttccaccgtaatgatatcactataattgtatataattatatgttatgtatttaataaaatttacatattaaatatacaatcatataaaacaaaatatgtgaaccaagcaattaaaataatcataaaatattttttatttggggcataaaaccctaaaacgaactagccttaggaatccctaagtgatccgggcatgttttcgcttcgctagaatgtctcctttacctagtcacaaaaaggggtttgaccaaaaaatgtacgatcaacattgggattaccaaagccactaatctgacatggtcgttccccatactagggctgaagatttagacccgcgaacccgaaaaacccggccacccgtcctgactcgctgccaaaaaaacaaaaaaaatattaaaacccgtgtgtttgggtggggttcaacccgaaattatcccacacgggttttgggttcagatattaaaatgtagtttttttagtcgggttctaacccgtgacccgaaaatacaacaaaaaaaatatttttttattatattaaaaagttaagaatattaatttttagtttatcacactttactttttactgttcatttaatacctacctactcaatactcactatttgaaccagaccaagataattaagcaaaacaagtggctacagtagatgaattcgtttttcaaaacaataaaaccatgtcccgaagagcatgactacaataacaatgataatgacatatcttaatagtggcatttacgaagtagggactccaatattctgaggcaagtaaggaccacctacttttctcgggaacccaaaagctaatgtgataaaaataaaaagccaatgtgataaatgaaacttggttgtgtgagccttttctcgggaacccaaaagtcaatgtgacaaaaataaaaaaaaaatatggcatttttaaaaattaaaattcatttgagcccagaaatgacattcgggctcagcccagtaacatcc

SEQ ID NO: 120044 - DNA, 2334 bp, Cannabis sativa
  modified_base (2297)..(2308): a, c, t, g, unknown or other
tatatatatatttttattattaacaaataatatcaacctaagtttcttataaactacaattttttattttacaagtgataaaaatataatttatacaataaaaaaaaatatttaaaagtatatagaaaataaaatttttatataacattttattatatatatttgtggttataatgaattagattaaaatattatcattattataacacaattttaacaacttacaacattttaaaatttataatctcaacttttttctacaattttgctacaactgttttttcttacaacacaacatattagggttgtacaaaaaaatttgtaaaccgcccaaatcaaactgaaaaaaccgataaaaattataaattgaaataatccgaaaaaattacaacccgcccaattaaagcgaataatccgaccaacccgactttggctttatttttattttttttactttttaatttttattacatataacctaaatgattaaatatataataacataaaattataaatatatattgtgttgtgttttagtgaaatttgatatttttaatttatctttttaatttttgttgaatttgaaacaaacatactcttaatttattggttatttgttgaagtactccattttaatattcaataataattttttgagggaaagaaatttgtcgaaattaactcccgccatcttcaattttccgaaaaaagggcccaaatttgccacgctggcgatccgccccttccactttcaaccaatagaaatgccttttctactcataggcgtcttcgcttccttatatataaatatcaaaccatcagcaatggctacattcacaatccaaattctctatttgctccatttcattttcaaccaagagtacctgaacaacgcatccctaatcttcgtatctattcaatggattccaccgccgcagcaacaaccaagaagggaggtagaggaaagcctaaggctaacaaatcggtttcaaggtcttcgaaggccggtctccaattccctgtcggtcgaatcgctcgattcctcaagaaaggccgatacgctcagcgagtcggctctggatcaccagtttacctctccgccgttctagaataccttgctgctgaggtttgtttggatttcttttcctgtaaattgcatttcttgcgcttttttcaatatcatttcacaacaaaattcattgcctaaattttctctgtcgttttgatgcagttattggagttggcgggaaacgctgctagggacaacaagaagagcagaatcattccgaggcacattcagttggctgtgaggaacgatgaagagttgagcaagcttttgggtgcggtgaccatcgcgaacggaggtgttctgcctaacatccaccagactttgttgccgaagaaagtcggaaaagggaaagacgagattggatctgcgtctcaggagttttagattttatgatttattgttctatagtatagaaattgaaaaaagatgttagatttttggatcttcaaagttcaaacttttcttttgatgtgttttgattaggtcatcaatagtatcctaatgaagtagtatgtttagatttgtaaagcctcatctttctatggattgcttctctctatttcccatcattgtttcgcttttgatcaatttctttgaaaatagatatgtattgatccatctgtgtctatttattgttcgttttctttattctgaattaaaacaatatataccatttgtagtatttgcattgtttttgtttagcatattcaagccaaaatgtctttttattgttcaaccttatctaaaacagttaaattatctacacccatcctaaaaagatagaatttttttttttgggatgtaattgtaacaaagcgaagaatacaagagaaaatatagttacaattagggcaaagaaaggagagctaagagcacctgagctggtataaatgtatatatatgccctggttaatgctacgaggaaactgcaatcataacaccattttgaggtttttttcactgtagacgtcatatgccgtgtactactgtagtcacatcattttttcttatattatatttaattaatatttatattattatattaataaaattaagattttttttgagaaattttactatgcatatttttaagagtgatgtactaatgtaattctatttgttttggacactagacaaacttttttagtttatttgttttatactgtgtatactatagttatttaaaatattttaaaaaattttaagaaatttaggtggcgtttggtannnnnnnnnnnntcagttttctgtttttaaaagtagaa

SEQ ID NO: 120045 - DNA, 2295 bp, Cannabis sativa
  modified_base (1204)..(1207): a, c, t, g, unknown or other
  modified_base (1442)..(1445): a, c, t, g, unknown or other
  modified_base (1833)..(1840): a, c, t, g, unknown or other
  modified_base (1966)..(1977): a, c, t, g, unknown or other
atgttagttagggtgttacatgtgatctgagtagtattatctctggtatcagtacaaccgaaagaggagtaggtcattacccgctaacttaggaagaaaaacctctataaaattttgtgttaattttattttattattcttatagtgtaacacgtggcaagcatcgacattaaatacgcctccgctgtcaattggccaaatctaaggtcaacaacttggtgctttcattgagagtgagttgccaatttatctaattgaacaccatggttaacataaggagaactccaactacaacttctgcctcatcaagtcttcctcaagaccctatgcctataaattctaatgttcgtgtcccagtcatgactggaatctacacaaacctgacgaatgtgctaaaccctgccatctcagtaggcaccacaaacctgaccaccacagctagtcatgaggacactaccaacctggttggtcttaatggataacctctgttacccaaggtgaacccttcactagcacctcatactgaaggaatggccaacatggagcaacccctgagtgccacgactggtctagtccccggtattatgcttgagatatggggctaagaattgatgagctagccattggtaagcctcatgtacacttgggagaagatctcaagttagcaagacttagagaggccattgtcaagtcatccaaactcaagaaccacacactgttggctacgatgcatttgcacaatagagatgtgaattagactgccgtaacagagaagccagcaacttaataaggtagttcaatgaacgaactaccagaagaggtcaagatctcataaaagatcctctccaagggagactagtcgaaagatcagggaaggtctacaaataaactgttcaaccaagttcctatagaactaggcaaaaccttccccaacttgaaggaggacaagtctttccatgaaaatctggtggcgagaatagctagactctggcaaccattggtctaagggggctggccagggatctctggcacaacaacacccctgattggccaacctttggctgaccaacaccttagtggttcacctctagctcgccaatacggtaaacttctatcccggagcatccaagaatgggtatcccaaatgccaatctttaaccggctagacccggttgtaggaagttattttaccaagatctagatnnnntaacatgtatgttgattatattctataatctaacaccctaaacatgaattcctaaaatagtgaaaaataaacacatataaagttaagaaaacattacattagtggcagcagaataatagggctccttccactctgatctctaaccattggtcctttttgtcgcagagtaataacaaaatctgagcctagatctcctttaggtgttggattcttcataatcttccacactatgatnnnntacttgacttgatatgagtgggcatgatattgtatcacaatagggatgaaattttgatgaagaaatagaagaaaactaaacaattagagagaggagcctttcttttaaattttttgacagaatagactaatgatgagttattaggttatgagtctgtcatgttctatttataggatttaatctggggataggtttaaattatatggatttcaaaaggataaaaaaatggcttaaaatctcttaactggtcggcccactattgtgaaccccactaattacaattttgccattttatttcaataatataacttttctttcataaatgccatattttaactttaaccctttttaaatggcaaatctatttttttaataattataattaatnnnnnnnnaaaattgtcatttaacttatttatcaattagaccttacaaagtctctcaattaacaaataggccctaaaaactacttttctgcacaattaagccattcctcattgaaaattcataaataagacatnnnnnnnnnnnnaattataattgattaattaaatcaattaactgagtctacaagtagtattatctcaactagtgtggggaccatgggcatatacaatcaagcttccaataagtagatccaaaatttaccaagtaaatttcctaacttattatttctcttgagtccactacagatttggaatcgcactcttaattatatagaattctctatacgttccaaaatatagatacaatattaattatctattgttatagtccatataattagagatcatttatcgatgatgtacatcgagtagggataaatttactgttctacccctcaatgtat

SEQ ID NO: 120046 - DNA, 1414 bp, Cannabis sativa
atcagaggccttgttgttttgagccactttcttggctgttagaattcccgacaaggtgacaaactcaataacatcataatcaattttcccagaagaaaatagtgtatgcgcggctgctaatgttgcgtgaccgcaaagagtaacctacacaacaaaaaagaaaaggctaattaagatttttactcccgaactttgatacgtaccaaatcatgccctttgaacttttaaggtcgttaaaaatgctccctgaactaaggagattgttgaatttaaggacttttgtccaattttaattaaaaaagtctaacatgaatgaaatttcaaggggcatgatctagaacatgtaaaagttcgaggggcatgatttggtagatattaaaatctaaggagcatggtttagtacataaacaatcactgaaatactaaaattgaatgaaattagataaaaattcaggggcatgatttggtacatgttaaagtttaggaaacaaaaatcctaattagccaaagcattgatctttgaagcttgagtgacacttgggggaaatgctggtacaactacaagtcattataattcaaagaaaactatgtaatcatttttttgagattttttcttaacttgcaaaatcaacagataagcaaagaaagacaactaaagaaataagcaattgatcttatagttgaattcaaaatccatgttatgggttttcaaattagcaaaaattaatcaacaaaatttctaaatacatatttcctttctgtgaatttttaaaagtaaatatacaagtgtaactaaaagaaatggtgaaaaacaaacctcaacaacgggagtgaaccatctaagacggaaccttggagttgaagacccatcagagttcgactcacttggcagccgggtcaggtaactagtctcggagatattgaactcggctgccaccgattgtaaccattgatcgtctctgtcctcgtctagcaagcaaacagctgctgggtttcccttgaaggctgattctgtgaacgcatccacctgatgatatagatggccatataaatatagatgatatatatatatatatatatatatacgtaaatagatagagagaaagagagaagagagtaccagagtgtagttgactgccattgatttaatcccaatctcatgtaataattatttttttcaataaagttataaatctgcctcttattcctttttatttttgctttaaataagtggcttcttaatttaataaagcgtggaatcctaagaaaaattattgggaagctaattatgatttttacttttaaattgtattaaattatatcgtttgaatttttttggcgtttaaaaattttccatgaatattgagctcgtaagatttaagaatttttattcaattttactatttcagtgatt

SEQ ID NO: 120047 - DNA, 864 bp, Cannabis sativa
atatgtgatataaagtatttatgtagttttaggcaactggtgctctttagtatttctgaataagaaaatataagttcagtgatcttaatatcttatggcatggctctaaacttaaattattagtacatatacaagctacacttacaacgacaataatgtcaagaaataacaaagaaaggacaataacatgttaatagaacaattgaaactacgaccataaggaagaactatagaagggaagactacattttgaggaaacgagagaaactataattgcatacaattgttttagaagccatttttaacaagggcgaatatcgttgattggaaaatgaacatatcctgtacaacttgaataagttcacaaaaagaacagtatagaactaggaaggagtcataaactagagctacgaaattaaatgctaagggcaaaagatgcattgcttcctttgtttttgttagccttttaaacaaattatattccttagcacagtaatgcttttccttttctattctttttccactagaaaagaaatggcataatagtttaatttctaaggaaaattaccccaactcaaattatttttaaacttgctactaacgcaacaaaaacaaagaggaccacatttatgacctttgatagatccatcactattccactccttgacgaaaagaatagtgatacacattacacataggcagagcatatgtggagtcaaatagcttaaattatagcagtagaaacattaaagcttactcataaaatagctgccaaaaaaagtttaagactaatcaaaatcaaacctaagaaaaagtgaaaaagtgaataaaaaaggcatgaaaaccccaaaaaaaaaaaaaaaa

SEQ ID NO: 120048 - DNA, 3482 bp, Cannabis sativa
  modified_base (399)..(409): a, c, t, g, unknown or other
  modified_base (531)..(539): a, c, t, g, unknown or other
  modified_base (594)..(608): a, c, t, g, unknown or other
  modified_base (1001)..(1007): a, c, t, g, unknown or other
  modified_base (1034)..(1043): a, c, t, g, unknown or other
  modified_base (1281)..(1295): a, c, t, g, unknown or other
  modified_base (2323)..(2328): a, c, t, g, unknown or other
  modified_base (2693)..(2694): a, c, t, g, unknown or other
  modified_base (2844)..(2869): a, c, t, g, unknown or other
aatagagacgaaaacttacaaaatgcttatcttttgagatctttacattgttaaatgcttcaactaataaccattcataagacgcacaaaatctagcttttcgagtttatattaagaataattaaccatgtaggaccaagaatggagtccgaatatccttataactaaaactcattattttaaaagggttgtattttaatttgatacttattttaatctatttattttaaatttatacatttatttaattaaaattactaatttagatgaattcaaatataaattttaattttatatttataaaattataccctaggaagatctgaaaaataaaatttatttttcatccttagtattaattttctaataaatattaaaaaaattacttaatttaagttnnnnnnnnnnnaattaaataattaattttcaactcacatttaattttctacaaatatatataattgaattcaaaatctaatgtattggaagcaataccttttcgaaattcacttaaaataaaataaaataaannnnnnnnnattattctaatttatgttagtctaaaattgaataaattaattttcaacataaatnnnnnnnnnnnnnnnaattaaatctcttaagaaaaatattaaacatgtaagtatctagaataaaattaacttaaatattagttttctatttaattgaatatatctagaaaaataccaaaaagtctacctagaaaatatttattagataatttataaactaattacttattttctaattaaaatataacatattttagtctaactattttaatcaatccttaataaaaattacttgatttaagttaatctaaaattaattaacaaattaattttcaactttaatataattttcaaaattgaaaatttttgaaatattttcatttaaataaagcaattcaaaatttaagtgggaaatgattattaaaataaaataaaatatattcaaaaaattattctaatttaagttgnnnnnnnattgaaaaatttccaacttaaatatannnnnnnnnntaattaaattcattaaaatataaataattaagtatctagaataaattaaacttaattaataattctaatttaaaatttatgaaaatttagttggtctaaaattaaataattaatttttaacttaaatatattttccaatttaatcaaatttcatgaaatagaaacaaataattaagtatcttgaataacatcattttaattattaattctatttaagttctaagaaaaaatattctannnnnnnnnnnnnnnaaattaattaaaattaatttttaagttaaatatatttttcgaaatataagaaaatgtaaatacttgaaatactatctagaatcttttctttaaactaagaagtgtgtttttcttaatttaattatttttaaataatccaataaaaaattaattacatttatttcaaaatttattatgttgctaattcaattttaattaagttaaactagtataattaatctaataaaattatttaaataagacaaacgggtcttcacagttggggttgttcatgtgactaaggactggactcagtaggtcgtacccactactaatggctccctaactctcacacacgtcccaaaggagatgaatttaatatttcattaaataattgttatgaactgaataagcccaatactaattgggtctaaataaaactatcataggtgatattttcttttagcaacctcgtccatttatataactcaaacaagcacactgatttagatgagccctgtcatgtttctaggtttaccacaggtgaaaaaaattataaaatttacctgttacaaattatttacataatctactaacacttagactatgattaaaattagatcattcgatctgtcaacaagttaatcatagcaattttgatcaaataaatattaggtttgtataaaaaaaaaattgaacaaaaaatttaaataaaacaaacacaatatccatttaacaaatgtgaaacaagatatttatataattaaattattattttatctaaccaactattttgaaaatttagggttgttaaaaaaataacctaaaatatcttttcaaaagtttaaaattcaaactaattttaaaatatttaaatttatttgaattattttatcaaataaaattatttatctaataagataaattgtttaaaaataaccgaaaagatattttcaatatcatcttctaatcttataatttgataaaattaaaataataaaataaactaattttaacatagatattgttaggcaattattattttaagnnnnnnataataaacaaataataattatcttaattatatgcaaaatatctcaaattaagcatttctcaaatttctacaaaaatatctgggctctttaaataattaaaatactgtatttacaaatgtctgataagtaaaatgatacaatttttttaacttataatttataaacaataaattatttaacaaaataacaaattttgaatttgaaaacattatggttaaaatatccataaaaatatgtaggttaatttcaaatttattaattatttaatccatcttataaaataattttaatataatatttcaaattaaaagataaggctatattttaattaaaaacatagctaatattaaaatatctaatcttnnaattaaataatatataaatattgacaaatttaaaaaaatttaaaatcagaccataattaaaaaaaataaaataatcaacttttaaatttaagcctcaaaatatcagaaaattaattataatctattaaaaaattaaatattattaatttnnnnnnnnnnnnnnnnnnnnnnnnnnttaaaaataatattttattttgaatttttagggtttgaaattacaaaaaattgtggaaaaatcccacaaaaactgcacaaggggagtggttgccaaggagggcagcacgtgcagcccaagaaggttgccagcagccctatccgtgcgcggactaaaggattatgtgcagcctaagacacgggcgcttgcagcattcgtgtctaaacgcacacatcttcagacagcattcatgtccccatacgcgcgcgcaccaacgaattttgtccgagtctttggtgtgattaagcaccacctcgacacccatggccacccaaaatacaaaccttcataactttttcaatttttgtcgaaatcgagttccgtaaaaatcaaaattgcttaattttttacaaggaatccaaatacaatattttcagaatgaaaataaaattatattcatggaaaaatattgtaaatcacatacatttatcaaataacacataaaccaacaggaatacatccaaatcaacacaaaaaaaatattaatcattttaaatccataatacatgaaagtaaatcattttaccaggatctagatttactaacaaaagtgttgattaacatcctaaatatg

SEQ ID NO: 120049 - DNA, 2354 bp, Cannabis sativa
tatggcatcttattttacgtaagtaagggcgttacaacatcctacctcttaataataatgccctagttggcgttttgctgagattcttcatgagtcatgcttaattaagtcaatttggtcaagatgtttactgctattgaattgtgttatatattcccattaataggtttgaattcttgtatgagtttatatatatatatatatatactttgaggaataatggtcccaaacaacttatttcaatggtcttctgtacacatgggaaactccctgttagtggctgcgattattcatacatttttaattaaaaaatgattttgttatgtttagatataaaaccttgattccaaatatattaagataagattttatgtatataattaaaatttgatatagtgctcgaattttatgtccttttccaaaaataaaaagaaaaaagaaaagaaattcatgttatgtgtatggtgtggattaatgcaggctttttagactgaatgaaaaataaaaattcatgttatatatgcctttcaaaagacaaaaagacaaaaaaaaaatggtcataaaattaattataaaataataaaataacacaaaatgaaattgtgaagaaaggcacataaaaaaatagtaattttttattagaaattagctaaattaataacaattaactgtctaatatttcttagatggcggttgataaaaaaactaaagtaaaatcaattaaaaaagattataacattacagttaatcttaaaaacacttatattcagattcatctagctaccgctcaaaacacaaaacagtaaaaagtgttgtgtacaacagattcattcaacctcgtagcttgagcattcaactattttgcaaggtacgtaactgcactactaattactctttaagtcacaaaaaacttgttattcctaaccactaacattaatgatttgatggcgagctattgaagaataaagaagaactgctcaaagtacataacagtagaaagtgttgcacacaacatgttcattcaacctcgtagtttgagcactcaactattttgcaaggtacgtaactgcactactaactctttcagtcgcagaaaacttgttattcctaaccactaacattaatgatttgatggcgagctattgaaaaataaagaagaaccaacaacgaaacaaaataaaatactcaatccaatccattcaacacggtccaatcagcaaagttgtgttgatatccacacttgtgcggattggattagattgagaaatctaaaatcagtgcttgtgcggatcgaatgttaatttatatgcaaaagtaattaatccaatttaatgatcaacacctatttatatatatttataaatttataaatgtataattcatatttaaaaaaataacaatttaaaaaattaatgcatatggtatatactaaaaaaaagctatgtgcaaggcacgcatacttagttttatattaggtgctatataatttaattataaataatataaaaaataattatatataatttaaattattattatggtctaattgaattttcttaataaaaagtaatataattattttgtgaagttatttttatgtatattcaatacatgtaaataattaattcttggatgaagaatattttatcattttttataaaaatgtatcttctaatgcatataatatgttgtttgctaagtaataaaatgttgtactctagtgtagtaatgtcttaaatgttctgtctaaaaagaaacatacagtatttcataatttgtgcatatacatatatataaatatatatttctataaaaaaaaatatatatttttaataaaacgtattgtaaaagatatctaggttgatgttacgtgcaatgcacgtaaaattagttttttttttaaattaggttcaattaaatgatgttaagtgcaatacatgtatgttttatttcttttaattaggtaatgtatttttttaatttttaaatggggtttgagattttgatctttaaaaaaaatagctattgctatattggagtgtcatttggatatgattatatatgcgtattttttaaatttttaaaactttcttaattaggtaacgtatctgataatgcatacattataatttattatattcttaatcaaaactcacataatcaaatttgagtgtgtttatatatagattggattcgtaaatttgatataaaagttgtttattcctaaactttacgaaaatgatggtgtgtgaatatcataactaaaatagaaagcaattaattccttagtacaaccatttcaatttaaaatataaaataaataataataaagttaaaaatatggttaaaaatat

SEQ ID NO: 120050 - DNA, 2132 bp, Cannabis sativa
  modified_base (280)..(282): a, c, t, g, unknown or other
  modified_base (496)..(510): a, c, t, g, unknown or other
ttactgaaatataatttataagaagctatgtgttttaaggataaactacattgaggggtagaacgataaatttgtctctactcgatgtaaatcatctacataagagctttagttattcgaattgaaacaattgataattaatagtatatctatattgggaacatatagagcattttatgtaatcgggagtacaattttgaatctataatggagttaggaggtaatttatttagtaaatttcagatttacttattgggagcttgattatataggtccatgnnncccatactagttgagacaatattagtttgtagattcagttcagttaatttgttttaattaatcaattagaattcaaaactagactatgtcttatttatgaatttttgctaagcaagggcttaatttagaagaaagaaggatttagggtttatttgttaattaaaagactttgtaatgtctaatgaataaataagttaaatggaaattttatttnnnnnnnnnnnnnnnttattaaataaatagatttgacatttataggattaaaattagaatatgacatttgtgaaagaaaaagataagttgttaaataaattgcaaaattaaaacctgtggggtccacttatatggtcagtcctttaaagggtttatttagctatcatttaatctttattaattctatataatttatatcctaaccctaaatgaaatcctataaatagataatgatagactcttgttttcataggctgataactcaaattcactttgttagacaaaataagagaggctcctattagatttctaattccttctcttcttccctctagaatttaaatgccctatagtgaagagtacttgcccactcaatttaagtcaatactcaatcatagtgtggaagattgtgaaaaattctatcatctaaagacatctaggttcagatattggtaataatctgcgataaaatggaacaagggttacacatctgaacagaaggagtcattacattccgttgccatcaatctaaggttttctacaactttatatgtgtttattttattgttttagaaaattcatgtttaagatgttagattgtaaattataatcaaacttaaaacatatatgttagtaaatctaaatcttagtaaaataagttccaacaactggtattaaagccatgataatgattcatgaaatatggattaaaaacgatgtttctataatttagatgtgttcttgtcggtttatgtgattgactaatgattgaatgtgaattacgaattttctacaaaaaaatatttttattttcgtttcgaaagtactttttcgaaatttggtgaaaaattaattagtttttacttttactgaactcaatttagattaaaatttaattagttatgattttttgaagtttaaaaaatatcttgggctagggtttccaatccacgcgcgcatatgctaatatgtttggagtttttcagacaaaacacgattcaaacatgagcttgtctgagaaatcttggtcagctcatgcaagttttccgagtgttaccacccctgatcaaaaaacatgcccatgggaggctgcgtgcaacctaggacctcgaaagttcacctctagtacgcatgcggggagtatgaaatgcatactcccctattttgttcaatttttcatttttttaacttttaaaaatcattttttaatgaaataaaatttaaattttggtagaattttgtgtagaatcttatttttcaaataaaaatctaattatcagattaaaattaatttttattaattttattattaatttaaattatttttagatgttagtaggcttcaaatttgaaaaaattgatttcacaaaaacttactattttggttattttaaaatttgattaatttttattgcaagatcagatattttcatattaaattaataaaatatgaaacgattatatttaatgctactttttgtttaaggacatgattttgagttctgttatgttggaattattgtatggatgttatataagtattttgtgtagtttggaatcaattagttagattttggtggggttttgagaagttgttaatgttggaaattattttactaagatcttagatctactca

SEQ ID NO: 120051 - DNA, 5868 bp, Cannabis sativa
  modified_base (5803)..(5821): a, c, t, g, unknown or other
ctaagttaatcacttaattctttcaaaaaatactttcagcatttatcaaccttaaattaataaaaattcagattaataccactaaaaataaaataaaacttaaccttagaaatgaccatatttccctttcaaaagaaaacttaaactattaaaatataggggcgttttggtaattttaactaacccgtcaaaccgaaaacccaacactttaagctattctggaaataaaaatccaattcaattcatctgtcgtgacatttctgacctctttgcaaaattctacagtcgccgggctagaaaatattttatttcaaaaatggtatccacgatacccacatattccaataaaatcttcgtaattaataaattacgctttattcaatcatttaataaattcacactaactaatttaataagatcataatcttacttcattactaaaataattacatatttaataaaaaatgtctaattaaatatcatattatttttctgggatattacaactgacatctgtcccaaataaatgtcggtataaagatattcgtaatacaaaatcattataataataatagaagtcatattcatttcttgataaagtatttataattaacattcatacattactctcatgcacaagtccaagtcaatacaaatattcattcaaaatcaatattagtataaatatttaatgatataccaatactcatataataatgtaaaatatatctgttacctcataaagtaaccatatattgcattttctaatcaggcaagtccgtgccatagcgtaccacccatatattgcataatcgcatcacctaattaggtgagctcgtgccaaaacatggcacccatgtatcacatctcctaatcagacgagtgtgtgccctatcctggtaccaatatattgcatcacctaatcaggtgagtccgtgtcataggttggcacccatatatgtcactacagctacctaaataggatcactaacaagtaaggaacttaataacggtttcagtttatagtcaatgacttatcacggttgtcttacaagaacaacccaaatattgctccctggtatccatatatcacattgcctaattaggcaagcccctgccataacttgacatccatatatcacattgcctaatcaggcaagcccatgccataacttgacatccatgtatcacatcacctaatcaggtgagcccgtgccatatcttggcaccaatgtatcgcatcgcctaatcaggcaagcccatatatcgcatcacctaatcaaatgagctcatgccatagcctggcacccatatatcgtatcactacatcacttaatcaggttagctcgtgccaaaacctgtcacccatatatcgcattgcctaatcaaacgagcatgtgccctatcctagcaccaatatattgaatcacctaataagttgagcccgtgccataacctggcacgcatttatgtcattgccgctacctaaatatgatcgctgacaagtaagaaacctaacaacaatttcagtttagagtcatggttgtctcacaagaataacctgaatattgctcctcggtatccatatatcacattatctaatcaggcaagcccatgccataacctggcatccatatattgcattgcctaattaggtaaacccatgccataacccgagatccatgtatcacattacctaatcatgtgagcttgtgccataatctggcactaatgtatcacatcgcctaatgaagcaagcccatatattgcatcacctaatcaaatgaacccgtgctataacttggcaccaatgtttcacatcgtctagttaggcgagcccataattcgcattaccattgcataatcagacaaccaacaatcgagaaacctaccatgccatgtagtacattacacttttcttacctttaatctagattcacgcgtgtctttcaacccaagaggaggaccattcccaatgatctgactttgtgtcataacaacggtaaactaattagtgtgtatcccaaaacactacttgatactcacataagacaacctcaagttttctaccaaaatccatggtataaataccctaaaataaaacttatattttcgctctaaaatgtataccatattgtggagctcgttacaagcttcaaaacggtatatagaacatccaaatggacacctgagtgaaaagttatgactaaaatacaatttttgatttccccaaaaataccagaaatggcaaactgtttggtaaaacggttaaccatttcctggcataaaacaattgactatttgtcccaaacaaggaaccgtttcataacaggggacgagaatcttgaatttcacactctctgaaacacaaccaagacctatctaaatcattccaaacttcacaggacacatatataccatctatacaatagtcccaatgtaacagaaattaaaaatgagcccttaaatggaaaatgccattaatgctcgagctttgagctttaaaaagctcaaactctatttctaactcaaaaccacctcaaattcagcaagtaaatatcaaaactaatcccatggcaacccaaaaacaattccataaagtcacaattcccacaactactctaaatcacatagtcaacatatagaaccaaactttttcaacttaaaatgaaaataaatctttcccttaagctcttcctcttcaatggttcactatccaattactatcagggcttgaatcactcaatttctagttgaaaattaaagaaaattagatggtggtggtgagagttttgtcgcaccaaaggaggagggtttcattctatttcttacattttaaacttttaaaacacatgttgacggtgagaactcctcaactaagttagtggttggaaaacacaaagttacccctaaatgtgatgagaataaagaagcaaggatctttgaatattgttttctctattgaatttaaaatttgagttacaccaagtgattttccaaccccctctcacacatgtgaggagggtatttataggctctaatgacctagagtacaaggtggtccctaagggacaaaacgttgcttttaagctgtacgccgcaagtgttggaggtggccctgtacctcgtacttttgtctagtttcaggtggtccctggctgcaggcttgtgatccatggttgcaggcttgtggtcctggttgtaggagagtagttattatgtacccttggttgggtcctcaaaccttgtaggctcgttatctccgccacttgtacctccctgcattcaaaggcttcagaaggcgtggttgtatgctttctcttgcatgccttgtcttgaggaagaagttctgcgattggagcgataagcctccctaatcagttgagtcagattagctctctgctgttcttacttaatgccttttaatgttcttccaattttccacgaactagtgttgaaaccattcatgttgcttatcgagagagtctcatagatgttgttgtaaatcagccaaaatttggctgagttgagctacctgaggatcgatctcctcagggtcttctatctccacgtgtggctccctaggtgggatatggtcgttggtgccaatctcgggagttgttggtggtggccttagagggtgagttgagatggttctaaggcctgctcctggcacctgcagtgcaaaagtagtcccgattctaactctatcaactggcgcacccccaatcgtttggccagctactggcgttcatctgtcaacacttgtagaacgtgttgcaaccatcttaactagtgacattcttaaactatgactctcaatgagagcaccaaaatgttgacttaaaaattggactagaattctaagccatacccacttgctagattagcaagaatgaaaattttgttaagtaattaatgagaaacatagaaatttatagtagttcacccactatatcgcgatagtaataggactacgtctacttcgagcttttatttcttatgagatggtaattacagcaagtgtttaagtattagaagcttcgaattctagagagagaagctctaaccttatgggtagttttctgaatgtgcaaaatgagctaagggagctctccttttattggttaaggaggcccacataaataggagaaaaaaatacaaataaagttttttccactgttgatgatgatctaccggtaaaaattagcttctagtggtgaaggccaatttttggtgcatggcgggtcctgttgcaagttactcagagcttatttctgtaactctcttgggggtgtattttcatgatgataacttcataattatgcttggggtgtgaggcatgacttggtagagttcttaaatagctacaaaatcaagttaaatcgtgtgaatcgaataaaaattgagtgggttatggccattttacttaaggcagttcaggtcccaacgcccaggttgacatccagcgcccagtttgacatttcagtgcccaggttgacatttgatgtcaacctggacgctgtagaagtgtataaatgtccaagggaagtcctttgggatgcataagtgatgatttgataccctttagtccttttataggttctagtgaagccggtcacctagttctcggagatgttgctattttgtagaaatgggagactcgaaactgttcatttttggaagccaaaattgaagttatgaatttgattaatctgacttcatggatcatttcacttgtgaacaactcaacagatggtcgaaatggcatcagattcggataagaagaacctagcgaatcaagccatttattgacctttggtgctgggccctttaaaccgagcttttgaggttctatttttgatacttccaaggcttctgaacttaatgacaagacatttccccctatttttgaccatgctagattcaatggtcgcatcagatttgacatttgagcaattgaaggcaacgtccaaggttaattgtcaacatgggcactaggcctaacaccaggtcaacctaggcattgggccctatttctagggactcgagtttgtggttttatccctaagtttacttgaatctttgttatttctaatgatggggaaaattcttggatcacttttttctaaactaaattggaaacagcccaagttgacaaaatgtcaacctaggggattggacccagttttgccccttcggaagttctatttggtccctagaaatagttgaatctcaatattttctgaagacggagatgatgctcgaaagaattatgggaaaactccattttcgtggcccagggttgcaaattgtcaacctaggggtatggccagccctaggtgtcaacctgggcgctttgccatgtttttatgcctcagaattgttgtcaacctgggtgctgagtgctcggggccctaggtgctcagaaatcaacttgctctgaatctaattttgatgcctcaaacatgtccgtggtatgtctagttgatgtcccaatatgagttttggctactttgcactaagacggtctcaaaaattgaaatcctagttggggatgttaacttgggtgctgggtggaaaccttaggtgcccaggttgggttctgagttgtaggttcgtgtaatttcagctcctaaatcttgggttaagttgttccatgtcttcatggtacaaagtactgaaagatagtgggttggattcaacttatagaagttcaaacttccatctcaaagatcgcggaggtaacctgcgtgtagggctagggtgccctctgttggaattttattttaccaggatcttnnnnnnnnnnnnnnnnnnnttgattaacaccctaaatatgagctttctaaaacgatgaaataaaca
